United States Patent Application Publication US 2023/0026259 A1 - sequence listing, part 58

SEQ ID NO: 154280 - DNA, 1710 bp, Homo sapiens
  Payload ID: 10319
  Gene Symbol: MFF
  Gene Name: mitochondrial fission factor
  ENST ID: ENST00000392059
  CDS Start-End: 326-991
ggacaaaagtggctctcaatccagcacatgcacattgaagcaagttaaaggatttaatatgaagcacagaagcagatagtgccaaatagcaagcagtagttgttacacatttctggaaaagcagtgtccgtgttgttatgtacacctccaaaaaaagttcaaatgtgtaggggaattgttgtgtaaagtaaactgaactgcagggtagcagtattttaatagctattatagacctgtatttactgtatttaaatgagtaaaggaacaagcagtgacacatcactaggaaggattccaagaaggagttccaaatgctagtgtgataatgcaagttccggagaggattgttgtagcaggaaataatgaagatgtttcattttcaagaccagcagatcttgaccttattcagtcaactccctttaaacccctggcactgaaaacaccacctcgtgtacttacgctgagtgaaagaccactagattttctggatttagaaagacctcctacaacccctcaaaatgaagaaatccgagcagttggcagactaaaaagagagcggtctatgagtgaaaatgctgttcgccaaaatggacagctggtcagaaatgattctcttgtgacaccatcgccacaacaggctcgggtctgtcctccccatatgttacctgaagatggagctaatctttcctctgctcgtggcattttgtcgcttatccagtcttctactcgtagggcataccagcagatcttggatgtgctggatgaaaatcgcaggtatggcatttcaaatatagatacaaccattgaaggaacgtcagatgacctgactgttgtagatgcagcttcactaagacgacagataatcaaactaaatagacgtctacaacttctggaagaggagaacaaagaacgtgctaaaagagaaatggtcatgtattcaattactgtagctttctggctgcttaatagctggctctggtttcgccgctagaggtaacatcagccctcaaaaatactgtctcaacagctggaaatataaaagatttgcaaacttctttgtttctgtctctgcattgtatgccattttatagtccacaccctgaaaatgtatttcttccagaaagtctggaggaaggacctatatttgtagaagtaaaggtatattctgtcactcagctgtattcacgtctgagcagttctgcagtaacacctgcttaaaattctccctttgcatgttttgtaaataggctccagttttgttttttaaaaggaatttattttttgcctcatcagtccacccaactgattctgaatgggagagagtctgtagagaattgattcagaaaagtgtctgtgaaagaaaaacaattattttgtcctgtttctcaaacagtgttaagcagttttgttaatagacatttttgcatcgacacttcaacattaacactttcaaagtcatggtctggtgccagatttaagaaactcgaaccacctaatatttcataaccttcttcattaggtacttgtacagattaatttctaacattgcagcagtttcatatgtgtgcaatatgtgcattctttcattttagttttgcacttggttttctataaagtacgtttttactcagttcatgcgtgaacaatttaaaaaacgacagaataaggtacaaatgtagtgtatttaataaactgtcaaccaaagaagta

SEQ ID NO: 154281 - DNA, 1247 bp, Homo sapiens
  Payload ID: 10319
  Gene Symbol: MFF
  Gene Name: mitochondrial fission factor
  Uniprot ID: Q9GZY8
  ENST ID: ENST00000409616
  CDS Start-End: 497-1213
gcccgcgcctttcgcgcttctgccctggccctctgcgggccgctccgccggtgctgtccctgggcgcctccgtgctctcagccaaccacctctgagagcgcccactcgagcgccccgggagccagagggcgggggtcctcgccgggaccctcctgtgggcccagggggacaaaagtggctctcaatccagcacatgcacattgaagcaagttaaaggatttaatatgaagcacagaagcagatagtgccaaatagcaagcagtagttgttacacatttctggaaaagcagtgtccgtgttgttatgtacacctccaaaaaaagttcaaatgtgtaggggaattgttgtgtaaagtaaactgaactgcagggtagcagtattttaatagctattatagacctgtatttactgtatttaaatgagtaaaggaacaagcagtgacacatcactaggaagggtgagcagggcagcatttccttctcccactgctgctgagatggcagaaattagtcgaattcagtacgaaatggaatatactgaaggcattagtcagcgaatgagggtcccagaaaagttaaaagtagcaccgccaaacgctgacctggaacaaggattccaagaaggagttccaaatgctagtgtgataatgcaagttccggagaggattgttgtagcaggaaataatgaagatgtttcattttcaagaccagcagatcttgaccttattcagtcaactccctttaaacccctggcactgaaaacaccacctcgtgtacttacgctgagtgaaagaccactagattttctggatttagaaagacctcctacaacccctcaaaatgaagaaatccgagcagttggcagactaaaaagagagcggtctatgagtgaaaatgctgttcgccaaaatggacagctggtcagaaatgattctctacctgtgttgcgtggtgggtctgctgccgccacttctaatcctcatcatgacaacgtcaggtatggcatttcaaatatagatacaaccattgaaggaacgtcagatgacctgactgttgtagatgcagcttcactaagacgacagataatcaaactaaatagacgtctacaacttctggaagaggagaacaaagaacgtgctaaaagagaaatggtcatgtattcaattactgtagctttctggctgcttaatagctggctctggtttcgccgctagaggtaacatcagccctcaaaaatactgtctcaac

SEQ ID NO: 154282 - DNA, 1548 bp, Homo sapiens
  Payload ID: 10319
  Gene Symbol: MFF
  Gene Name: mitochondrial fission factor
  Uniprot ID: Q9GZY8
  ENST ID: ENST00000409565
  CDS Start-End: 210-866
ccagcccgcgcctttcgcgcttctgccctggccctctgcgggccgctccgccggtgctgtccctgggcgcctccgtgctctcagccaaccacctctgagagcgcccactcgagcgccccgggagccagagggcgggggtcctcgccgggaccctcctgtgggcccagggggtgagcagggcagcatttccttctcccactgctgctgagatggcagaaattagtcgaattcagtacgaaatggaatatactgaaggcattagtcagcgaatgagggtcccagaaaagttaaaagtagcaccgccaaacgctgacctggaacaaggattccaagaaggagttccaaatgctagtgtgataatgcaagttccggagaggattgttgtagcaggaaataatgaagatgtttcattttcaagaccagcagatcttgaccttattcagtcaactccctttaaacccctggcactgaaaacaccacctcgtgtacttacgctgagtgaaagaccactagattttctggatttagaaagacctcctacaacccctcaaaatgaagaaatccgagcagttggcagactaaaaagagagcggtctatgagtgaaaatgctgttcgccaaaatggacagctggtcagaaatgattctctgtatggcatttcaaatatagatacaaccattgaaggaacgtcagatgacctgactgttgtagatgcagcttcactaagacgacagataatcaaactaaatagacgtctacaacttctggaagaggagaacaaagaacgtgctaaaagagaaatggtcatgtattcaattactgtagctttctggctgcttaatagctggctctggtttcgccgctagaggtaacatcagccctcaaaaatactgtctcaacagctggaaatataaaagatttgcaaacttctttgtttctgtctctgcattgtatgccattttatagtccacaccctgaaaatgtatttcttccagaaagtctggaggaaggacctatatttgtagaagtaaaggtatattctgtcactcagctgtattcacgtctgagcagttctgcagtaacacctgcttaaaattctccctttgcatgttttgtaaataggctccagttttgttttttaaaaggaatttattttttgcctcatcagtccacccaactgattctgaatgggagagagtctgtagagaattgattcagaaaagtgtctgtgaaagaaaaacaattattttgtcctgtttctcaaacagtgttaagcagttttgttaatagacatttttgcatcgacacttcaacattaacactttcaaagtcatggtctggtgccagatttaagaaactcgaaccacctaatatttcataaccttcttcattaggtacttgtacagattaatttctaacattgcagcagtttcatatgtgtgcaatatgtgcattctttcattttagttttgcacttggttttctataaagtacgtttttactcagttcatgcgtgaacaatttaaaaaacgacagaataaggtacaa

SEQ ID NO: 154283 - DNA, 581 bp, Homo sapiens
  Payload ID: 10319
  Gene Symbol: MFF
  Gene Name: mitochondrial fission factor
  ENST ID: ENST00000423098
  CDS Start-End: 484-581
gtctgcgcatcgcttaccgtggagccgttccagtgcgtgggccacgcgtccgcccttttccgcgtcacatgaccacgaacactcttccgctacggctcccagaaggggccagcccgcgcctttcgcgcttctgccctggccctctgcgggccgctccgccggtgctgtccctgggcgcctccgtgctctcagccaaccacctctgagagcgcccactcgagcgccccgggagccagagggcgggggtcctcgccgggaccctcctgtgggcccagggggacaaaagtggctctcaatccagcacatgcacattgaagcaagttaaaggatttaatatgaagcacagaagcagatagtgccaaatagcaagcagtagttgttacacatttctggaaaagcagtgtccgtgttgttatgtacacctccaaaaaaagttcaaatgtggtgagcagggcagcatttccttctcccactgctgctgagatggcagaaattagtcgaattcagtacgaaatggaatatactgaaggcattagtcagcgaatgagggtcccagaaaagttaaaagtagcaccgccaaa

SEQ ID NO: 154284 - DNA, 566 bp, Homo sapiens
  Payload ID: 10319
  Gene Symbol: MFF
  Gene Name: mitochondrial fission factor
  ENST ID: ENST00000443428
  CDS Start-End: 353-566
ttcccgacccgcgacctgccgcccgagctggctgccaggcctatcgccgccgccgagaccctccggccaacagggacccgcggtggccccggcccccccgggacaaaagtggctctcaatccagcacatgcacattgaagcaagttaaaggatttaatatgaagcacagaagcagatagtgccaaatagcaagcagtagttgttacacatttctggaaaagcagtgtccgtgttgttatgtacacctccaaaaaaagttcaaatgtgtaggggaattgttgtgtaaagtaaactgaactgcagggtagcagtattttaatagctattatagacctgtatttactgtatttaaatgagtaaaggaacaagcagtgacacatcactaggaagggtgagcagggcagcatttccttctcccactgctgctgagatggcagaaattagtcgaattcagtacgaaatggaatatactgaaggcattagtcagcgaatgagggtcccagaaaagttaaaagtagcaccgccaaacgctgacctggaacaaggattccaagaaggagttccaa

SEQ ID NO: 154285 - DNA, 720 bp, Homo sapiens
  Payload ID: 10319
  Gene Symbol: MFF
  Gene Name: mitochondrial fission factor
  ENST ID: ENST00000418961
  CDS Start-End: 541-720
ccgcgacctgccgcccgagctggctgccaggcctatcgccgccgccgagaccctccggccaacagggacccgcggtggccccggcccccccggtagtgtctccctgacccgagtcccgtccccgggcctcttgccttcaaccctggtctttcctcctccccgggaccttgagtccccgaggagagcgagggagaggagcgtcttctgcagggacaaaagtggctctcaatccagcacatgcacattgaagcaagttaaaggatttaatatgaagcacagaagcagatagtgccaaatagcaagcagtagttgttacacatttctggaaaagcagtgtccgtgttgttatgtacacctccaaaaaaagttcaaatgtgtaggggaattgttgtgtaaagtaaactgaactgcagggtagcagtattttaatagctattatagacctgtatttactgtatttaaatgagtaaaggaacaagcagtgacacatcactaggaagggtgagcagggcagcatttccttctcccactgctgctgagatggcagaaattagtcgaattcagtacgaaatggaatatactgaaggcattagtcagcgaatgagggtcccagaaaagttaaaagtagcaccgccaaacgctgacctggaacaaggattccaagaaggagttccaaatgctagtgtgataatgcaagttccggagaggattgttgtagca

SEQ ID NO: 154286 - DNA, 527 bp, Homo sapiens
  Payload ID: 10319
  Gene Symbol: MFF
  Gene Name: mitochondrial fission factor
  ENST ID: ENST00000436237
  CDS Start-End: 426-527
actcgagcgccccgggagccagagggcgggggtcctcgccgggaccctcctgtgggcccagggggacaaaagtggctctcaatccagcacatgcacattgaagcaagttaaaggatttaatatgaagcacagaagcagatagtgccaaatagcaagcagtagttgttacacatttgtgagtaaaaatggtcccttttggcttactttcttagtctttaaatcgtctgcatgccaaatccttaaagatctatgtccccagagattttttgataaagaataaaagatctggaaaagcagtgtccgtgttgttatgtacacctccaaaaaaagttcaaatgtgtaggggaattgttgtgtaaagtaaactgaactgcagggtagcagtattttaatagctattatagacctgtatttactgtatttaaatgagtaaaggaacaagcagtgacacatcactaggaagggtgagcagggcagcatttccttctcccactgctgctgagatggcagaaattagtcgaattcag

SEQ ID NO: 154287 - DNA, 729 bp, Homo sapiens
  Payload ID: 10319
  Gene Symbol: MFF
  Gene Name: mitochondrial fission factor
  ENST ID: ENST00000456345
  CDS Start-End: 1-465
atccgagcagttggcagactaaaaagagagcggtctatgagtgaaaatgctgttcgccaaaatggacagctggtcagaaatgattctcttgtgacaccatcgccacaacaggctcgggtctgtcctccccatatgttacctgaagatggagctaatctttcctctgctcgtggcattttgtcgcttatccagtcttctactcgtagggcataccagcagatcttggatgtgctggatgaaaatcgcaggtatggcatttcaaatatagatacaaccattgaaggaacgtcagatgacctgactgttgtagatgcagcttcactaagacgacagataatcaaactaaatagacgtctacaacttctggaagaggagaacaaagaacgtgctaaaagagaaatggtcatgtattcaattactgtagctttctggctgcttaatagctggctctggtttcgccgctagaggtaacatcagccctcaaaaatactgtctcaacagctggaaatataaaagatttgcaaacttctttgtttctgtctctgcattgtatgccattttatagtccacaccctgaaaatgtatttcttccagaaagtctggaggaaggacctatatttgtagaagtaaaggtatattctgtcactcagctgtattcacgtctgagcagttctgcagtaacacctgcttaaaattctccctttgcatgttttgtaaataggctccagt

SEQ ID NO: 154288 - DNA, 736 bp, Homo sapiens
  Payload ID: 10319
  Gene Symbol: MFF
  Gene Name: mitochondrial fission factor
  ENST ID: ENST00000452930
  CDS Start-End: 323-736
agcccgcgcctttcgcgcttctgccctggccctctgcgggccgctccgccggtgctgtccctgggcgcctccgtgctctcagccaaccacctctgagagcgcccactcgagcgccccgggagccagagggcgggggtcctcgccgggaccctcctgtgggcccaggggtgagtgttgacgtcttcccgacccgcgacctgccgcccgagctggctgccaggcctatcgccgccgccgagaccctccggccaacagggacccgcggtggccccggcccccccgggtgagcagggcagcatttccttctcccactgctgctgagatggcagaaattagtcgaattcagtacgaaatggaatatactgaaggcattagtcagcgaatgagggtcccagaaaagttaaaagtagcaccgccaaacgctgacctggaacaaggattccaagaaggagttccaaatgctagtgtgataatgcaagttccggagaggattgttgtagcaggaaataatgaagatgtttcattttcaagaccagcagatcttgaccttattcagtcaactccctttaaacccctggcactgaaaacaccacctcgtgtacttacgctgagtgaaagaccactagattttctggatttagaaagacctcctacaacccctcaaaatgaagaaatccgagcagttggcagactaaaaagagagcggtctatgagtgaaaatgctgttcgccaaaat

SEQ ID NO: 154289 - DNA, 560 bp, Homo sapiens
  Payload ID: 10319
  Gene Symbol: MFF
  Gene Name: mitochondrial fission factor
  ENST ID: ENST00000530359
  CDS Start-End: 384-560
agaaggggccagcccgcgcctttcgcgcttctgccctggccctctgcgggccgctccgccggtgctgtccctgggcgcctccgtgctctcagccaaccacctctgagagcgcccactcgagcgccccgggagccagagggcgggggtcctcgccgggaccctcctgtgggcccaggggaaataatgaagatgtttcattttcaagaccagcagatcttgaccttattcagtcaactccctttaaacccctggcactgaaaacaccacctcgtgtacttacgctgagtgaaagaccactagattttctggatttagaaagacctcctacaacccctcaaaatgaagaaatccgagcagttggcagactaaaaagagagcggtctatgagtgaaaatgctgttcgccaaaatggacagctggtcagaaatgattctctgtggcacagatcagattctgccccaagaaataaaatttcaaggttccaggcaccgatttctgcaccggagtacactgtgacaccatcgccacaacaggctcgggtctgtcctccccatatgtta

SEQ ID NO: 154290 - DNA, 584 bp, Homo sapiens
  Payload ID: 10319
  Gene Symbol: MFF
  Gene Name: mitochondrial fission factor
  ENST ID: ENST00000531278
  CDS Start-End: 378-584
ggccagcccgcgcctttcgcgcttctgccctggccctctgcgggccgctccgccggtgctgtccctgggcgcctccgtgctctcagccaaccacctctgagagcgcccactcgagcgccccgggagccagagggcgggggtcctcgccgggaccctcctgtgggcccaggggaaataatgaagatgtttcattttcaagaccagcagatcttgaccttattcagtcaactccctttaaacccctggcactgaaaacaccacctcgtgtacttacgctgagtgaaagaccactagattttctggatttagaaagacctcctacaacccctcaaaatgaagaaatccgagcagttggcagactaaaaagagagcggtctatgagtgaaaatgctgttcgccaaaatggacagctggtcagaaatgattctcttgtgacaccatcgccacaacaggctcgggtctgtcctccccatatgttacctgaagatggagctaatctttcctctgctcgtggcattttgtcgcttatccagtcttctactcgtagggcataccagcagatcttggatgtgctggatgaaaat

SEQ ID NO: 154291 - DNA, 576 bp, Homo sapiens
  Payload ID: 10319
  Gene Symbol: MFF
  Gene Name: mitochondrial fission factor
  ENST ID: ENST00000534203
  CDS Start-End: 364-576
tttcgcgcttctgccctggccctctgcgggccgctccgccggtgctgtccctgggcgcctccgtgctctcagccaaccacctctgagagcgcccactcgagcgccccgggagccagagggcgggggtcctcgccgggaccctcctgtgggcccaggggaaataatgaagatgtttcattttcaagaccagcagatcttgaccttattcagtcaactccctttaaacccctggcactgaaaacaccacctcgtgtacttacgctgagtgaaagaccactagattttctggatttagaaagacctcctacaacccctcaaaatgaagaaatccgagcagttggcagactaaaaagagagcggtctatgagtgaaaatgctgttcgccaaaatggacagctggtcagaaatgattctctgtggcacagatcagattctgccccaagaaataaaatttcaaggttccaggcaccgatttctgcaccggagtacacgtatggcatttcaaatatagatacaaccattgaaggaacgtcagatgacctgactgttgtagatgcagcttcactaagacgacag

SEQ ID NO: 154292 - DNA, 647 bp, Homo sapiens
  Payload ID: 10319
  Gene Symbol: MFF
  Gene Name: mitochondrial fission factor
  ENST ID: ENST00000524634
  CDS Start-End: 364-633
tttcgcgcttctgccctggccctctgcgggccgctccgccggtgctgtccctgggcgcctccgtgctctcagccaaccacctctgagagcgcccactcgagcgccccgggagccagagggcgggggtcctcgccgggaccctcctgtgggcccaggggaaataatgaagatgtttcattttcaagaccagcagatcttgaccttattcagtcaactccctttaaacccctggcactgaaaacaccacctcgtgtacttacgctgagtgaaagaccactagattttctggatttagaaagacctcctacaacccctcaaaatgaagaaatccgagcagttggcagactaaaaagagagcggtctatgagtgaaaatgctgttcgccaaaatggacagctggtcagaaatgattctctgtatggcatttcaaatatagatacaaccattgaaggaacgtcagatgacctgactgttgtagatgcagcttcactaagacgacagataatcaaactaaatagacgtctacaacttctggaagaggagaacaaagaacgtgctaaaagagaaatggtcatgtattcaattactgtagctttctggctgcttaatagctggctctggtttcgccgctagaggtaacatcagcc

SEQ ID NO: 154293 - DNA, 558 bp, Homo sapiens
  Payload ID: 10319
  Gene Symbol: MFF
  Gene Name: mitochondrial fission factor
  ENST ID: ENST00000525195
  CDS Start-End: 402-558
tttcgcgcttctgccctggccctctgcgggccgctccgccggtgctgtccctgggcgcctccgtgctctcagccaaccacctctgagagcgcccactcgagcgccccgggagccagagggcgggggtcctcgccgggaccctcctgtgggcccagggggacaaaagtggctctcaatccagcacatgcacattgaagcaagttaaaggatttaatatgaagcacagaagcagatagtgccaaatagcaagcagtagttgttacacatttctggaaaagcagtgtccgtgttgttatgtacacctccaaaaaaagttcaaatgtgtaggggaattgttgtgtaaagtaaactgaactgcaggggtgagcagggcagcatttccttctcccactgctgctgagatggcagaaattagtcgaattcagtacgaaatggaatatactgaaggcattagtcagcgaatgagggtcccagaaaagttaaaagtagcaccgccaaacgctgacctggaacaaggattccaagaaggagttccaaatgctagtgtgataatgcaag

SEQ ID NO: 154294 - DNA, 1370 bp, Homo sapiens
  Payload ID: 10320
  Gene Symbol: MTFP1
  Gene Name: mitochondrial fission process 1
  Uniprot ID: Q9UDX5
  ENST ID: ENST00000266263
  CDS Start-End: 351-851
gaataaagagatgctggataagcccgaggtcacaagctttgcagtgtagcatcccccaacttgatcccctgtctctttggctccaaaacctacactcagtcctgggagcgattagcgccaacagctcagagaaaacgtgacgaaaaccagtctgtaaaacccgagcctgggagaggggcttcggtgcgcggggggaatttgcagacgctccctgctggcggagatttcctgacctgtccttcggcgcgggactttcggcgggtcccggccgggcagacccaagtgccggcggcggagactgcagtggagccagtaccggctgtagtggccggggccgtggcgggagagtcatgtcagagccgcagccgcggggcgcagagcgcgatctctaccgggacacgtgggtgcgatacctgggctatgccaatgaggtgggcgaggctttccgctctcttgtgccagcggcggtggtgtggctgagctatggcgtggccagctcctacgtgctggcggatgccattgacaaaggcaagaaggctggagaggtgcccagccctgaagcaggccgcagcgccagggtgactgtggctgtggtggacacctttgtatggcaggctctagcctctgtggccattccgggcttcaccatcaaccgcgtgtgtgctgcctctctctatgtcctgggcactgccacccgctggcccctggctgtccgcaagtggaccaccaccgcgcttgggctgttgaccatccccatcattatccaccccattgacaggtcggtggatttcctcctggactccagcctgcgcaagctctacccaacagtggggaagcccagctcctcctgatcatactctggtacctggcctgtgcatcggcctcctgcttcatgtcaacctcctactcctgccagggaatgtggacacctggctccctggtgtccaaagaccctggcacctgggtgggtttgagctggacagaagcttagagacaaaggcttcaagaagcagtggctgcagggagtcacagaagggcaggacctgaacgctgtctgcttccctggaatccaagatgctgagtggaagtggaccctgggtgggcccggccctgtctttttcaggaaaattacatcctcccatggaggatgagagactgaggctcagggagggcaaggaataggcccaagatcacttggcaagctgggcacccaggacccccaggtgcttgacagagtcaccccatggtggtatggctgaacaaggagcggcagacaactcagggagaaactcaggagtgcagtaccagggacacctcaggacagattctctggccaggcccttccctgacccaataaatcctgaagaggt

SEQ ID NO: 154295 - DNA, 891 bp, Homo sapiens
  Payload ID: 10320
  Gene Symbol: MTFP1
  Gene Name: mitochondrial fission process 1
  Uniprot ID: Q9UDX5
  ENST ID: ENST00000355143
  CDS Start-End: 105-512
cgggactttcggcgggtcccggccgggcagacccaagtgccggcggcggagactgcagtggagccagtaccggctgtagtggccggggccgtggcgggagagtcatgtcagagccgcagccgcggggcgcagagcgcgatctctaccgggacacgtgggtgcgatacctgggctatgccaatgaggtgggcgaggctttccgctctcttgtgccagcggcggtggtgtggctgagctatggcgtggccagctcctacgtgctggcggatgccattgacaaaggcaagaaggctggagaggtcggtggatttcctcctggactccagcctgcgcaagctctacccaacagtggggaagcccagctcctcctgatcatactctggtacctggcctgtgcatcggcctcctgcttcatgtcaacctcctactcctgccagggaatgtggacacctggctccctggtgtccaaagaccctggcacctgggtgggtttgagctggacagaagcttagagacaaaggcttcaagaagcagtggctgcagggagtcacagaagggcaggacctgaacgctgtctgcttccctggaatccaagatgctgagtggaagtggaccctgggtgggcccggccctgtctttttcaggaaaattacatcctcccatggaggatgagagactgaggctcagggagggcaaggaataggcccaagatcacttggcaagctgggcacccaggacccccaggtgcttgacagagtcaccccatggtggtatggctgaacaaggagcggcagacaactcagggagaaactcaggagtgcagtaccagggacacctcaggacagattctctggccaggcccttccctgacccaataaatcctgaagaggt

SEQ ID NO: 154296 - DNA, 912 bp, Homo sapiens
  Payload ID: 10320
  Gene Symbol: MTFP1
  Gene Name: mitochondrial fission process 1
  ENST ID: ENST00000407550
  CDS Start-End: 64-495
ggcggcggagactgcagtggagccagtaccggctgtagtggccggggccgtggcgggagagtcatgtcagagccgcagccgcggggcgcagagcgcgatctctaccgggacacgtgggtgcgatacctgggctatgccaatgaggtgggcgaggctttccgctctcttgtgccagcggcggtggtgtggctgagctatggcgtggccagctcctacgtgctggcggatgccattgacaaaggcaagaaggctggagaggctctagcctctgtggccattccgggcttcaccatcaaccgcgtgtgtgctgcctctctctatgtcctgggcactgccacccgctggcccctggctgtccgcaagtggaccaccaccgcgcttgggctgttgaccatccccatcattatccaccccattgacaggtcggtggatttcctcctggactccagcctgcgcaagctctacccaacagtggggaagcccagctcctcctgatcatactctggtacctggcctgtgcatcggcctcctgcttcatgtcaacctcctactcctgccagggaatgtggacacctggctccctggtgtccaaagaccctggcacctgggtgggtttgagctggacagaagcttagagacaaaggcttcaagaagcagtggctgcagggagtcacagaagggcaggacctgaacgctgtctgcttccctggaatccaagatgctgagtggaagtggaccctgggtgggcccggccctgtctttttcaggaaaattacatcctcccatggaggatgagagactgaggctcagggagggcaaggaataggcccaagatcacttggcaagctgggcacccaggacccccaggtgcttgacagagtcaccccatggtggtatggctgaacaaggagc

SEQ ID NO: 154297 - DNA, 759 bp, Homo sapiens
  Payload ID: 10320
  Gene Symbol: MTFP1
  Gene Name: mitochondrial fission process 1
  ENST ID: ENST00000412752
  CDS Start-End: 101-325
actttcggcgggtcccggccgggcagacccaagtgccggcggcggagactgcagtggagccagtaccggctgtagtggccggggccgtggcgggagagtcatgtcagagccgcagccgcggggcgcagagcgcgatctctaccgggacacgtgggtgcgatacctgggctatgccaatgaggtgggcgaggctttccgctctcttgtgccagcggcggtggtgtggctgagctatggcgtggccagctcctacgtgctggcggatgccattgacaaaggcaagaaggctggagaggattttctgcctctgccccagctggattaagtgtctctgcgcccaccaggtgcccagccctgaagcaggccgcagcgccagggtgactgtggctgtggtggacacctttgtatggcaggctctagcctctgtggccattccgggcttcaccatcaaccgcgtgtgtgctgcctctctctatgtcctgggcactgccacccgctggcccctggctgtccgcaagtggaccaccaccgcgcttgggctgttgaccatccccatcattatccaccccattgacaggtcggtggatttcctcctggactccagcctgcgcaagctctacccaacagtggggaagcccagctcctcctgatcatactctggtacctggcctgtgcatcggcctcctgcttcatgtcaacctcctactcctgccagggaatgtggacacctggctccctggtgtccaaagaccctggcac

SEQ ID NO: 154298 - DNA, 482 bp, Homo sapiens
  Payload ID: 10320
  Gene Symbol: MTFP1
  Gene Name: mitochondrial fission process 1
  ENST ID: ENST00000629597
  CDS Start-End: 258-482
actcagtcctgggagcgattagcgccaacagctcagagaaaacgtgacgaaaaccagtctgtaaaacccgagcctgggagaggggcttcggtgcgcggggggaatttgcagacgctccctgctggcggagatttcctgacctgtccttcggcgcgggactttcggcgggtcccggccgggcagacccaagtgccggcggcggagactgcagtggagccagtaccggctgtagtggccggggccgtggcgggagagtcatgtcagagccgcagccgcggggcgcagagcgcgatctctaccgggacacgtgggtgcgatacctgggctatgccaatgaggtgggcgaggctttccgctctcttgtgccagcggcggtggtgtggctgagctatggcgtggccagctcctacgtgctggcggatgccattgacaaaggcaagaaggctggagaggattttctgcctctgccccagctggattaa

SEQ ID NO: 154299 - DNA, 2640 bp, Homo sapiens
  Payload ID: 10321
  Gene Symbol: MTFR1
  Gene Name: mitochondrial fission regulator 1
  Uniprot ID: Q15390
  ENST ID: ENST00000262146
  CDS Start-End: 127-1128
agaagcctgaggagccggagagggtgctggctgccgcgcggccgagtgtgttttatggaccatgtgctgctatgtatgcctgaagaagtacttgaaatgcaaatttggggagactttgccatataaatgcttggctggattaagcgcctaattaggatggtttttcaacaagttggagtaagcatgcaatcggtactttggtctaggaagccatatggttcgtctcgaagtatcgtaaggaaaattggtactaatttgtctctgattcagtgtccaagagttcagtttcagattaacagccatgcaacagaatggagtcccagccacccaggagaggatgcagtggcgtcttttgctgatgttggatgggtagccaaagaagaaggagagtgttcagcaagactaaggacagaggtcagatcaaggccaccccttcaggatgaccttcttttctttgagaaggccccaagcagacagatttccttaccagacttgtctcaagaagagcctcagctgaagaccccagcgctggcaaatgaggaagcactgcagaagatttgcgctctcgaaaatgaacttgctgctctcagagctcagattgccaaaattgtgacccagcaggagcagcaaaatctcactgcaggtgacttagattctaccacatttggtaccataccaccacaccctccacctcccccaccgcccctgcctccccctgcactggggctccaccaaagtacatctgctgttgatctgattaaagaacgaagagagaaaagagccaatgctggaaagactttggttaagaacaatccaaagaaacctgaaatgccaaatatgctagagatccttaaagagatgaacagtgtaaaacttcggtcagtgaagaggtcagagcaagatgtgaagcccaagccagtggatgctactgaccctgctgccctcatagcagaggctctgaaaaagaaatttgcttatcggtatcgaagtgatagccaagatgaagttgaaaaaggaattccaaagtctgaatcagaggccacctcagagagagtgttgtttgggccacacatgttgaagccaacaggaaaaatgaaggctttaattgaaaatgtatcagactcctaatagacaatgagctgcgaaaagactcctggttcccctgttgatttgtgagggccaagtttgctagtagaaatcgacactgtttagtaaatacctctttagtattcagtggtcttcttttcaggctaattagtggattaagcaataatgaaagcactaagtttggttttgcttttgtgagatggtcagctttggtgctctccacaacatgtgtgttctgacatgtttctaatatgtggccagggcgttcagatttccagttttgaaaacaattgtatagatttcacaacacaaaaaggacatttgtggatgttactgcacattttaaattcttaacactaatttatctgtataagtgttttatatgcatatttttggacataaacagtttatgtaaaattagtaatgaatgatggcaacgagggcactgttatcttcgtttgttttcaatgatcatttagcattcaatgatggaacagctggtataacataagttgttggcatgaaatatttgagattggaaacttcttgccttgaacagaacttatatcttagattctctctcacattttcttggagctggggtttgaataggaaccagatgatgttcactgctgaaattccataatgcttcccattgaagggaagttgagaaccaggaaagctgctttcacgtcattgccatccagtactgacagggaagaaagatgtagttttccagtagtgatgaatcaaattattgaattaaatttcttcttaagaagtaaaaactcagaatgtaccatcttgtttcctttcagtttattaaatggcatcataaagatgactttgctaagttaatagagttaaaaatttttttaatataagccaaaatattaactttaatgaaacattgacttggcaaatgaatttcctataaattatcattggtcagaatgctgttttgtttaataatattacgcaacataaaccataggtgttattagaagtggagaactgcctttttcatctggggcttttaaggacttgctataaatgattattttttaaatgctttataaatcttcatggtttttctatttctgatacactcagctatagttaataccagagtatcctaccaggagtaatatttggaatatttaaatctagtaaaagaagaaagttgtacttcctggctgggagtattaggagatgggagtagagattcacttttaagttcttgaaaatatatgcattctcctaaatattaacaaaaatgatttggggaaatgacatggcttgattgttctgtttaaatttgtactgtggcttatgttacacatgttcatgttcacctctcattcacctgttttatatggtttaaaattctctttaacaaaattcagaaaattcacctgaaacgtattttgacctaaaagaaacatatttttgtatcagtattgaattttggacagtgcccccatataaggaagttactgttttaaaataaagcaaactaactgttttattttc

SEQ ID NO: 154300 - DNA, 2500 bp, Homo sapiens
  Payload ID: 10321
  Gene Symbol: MTFR1
  Gene Name: mitochondrial fission regulator 1
  Uniprot ID: Q15390
  ENST ID: ENST00000458689
  CDS Start-End: 81-983
tgtgttttatggaccatgtgctgctatgtatgcctgaagaagtacttgaaatgcaaatttggggagactttgccatataaatgcttggctggattaagcgcctaattaggatggtttttcaacaagttggagtaagcatgcaatcgattaacagccatgcaacagaatggagtcccagccacccaggagaggatgcagtggcgtcttttgctgatgttggatgggtagccaaagaagaaggagagtgttcagcaagactaaggacagaggtcagatcaaggccaccccttcaggatgaccttcttttctttgagaaggccccaagcagacagatttccttaccagacttgtctcaagaagagcctcagctgaagaccccagcgctggcaaatgaggaagcactgcagaagatttgcgctctcgaaaatgaacttgctgctctcagagctcagattgccaaaattgtgacccagcaggagcagcaaaatctcactgcaggtgacttagattctaccacatttggtaccataccaccacaccctccacctcccccaccgcccctgcctccccctgcactggggctccaccaaagtacatctgctgttgatctgattaaagaacgaagagagaaaagagccaatgctggaaagactttggttaagaacaatccaaagaaacctgaaatgccaaatatgctagagatccttaaagagatgaacagtgtaaaacttcggtcagtgaagaggtcagagcaagatgtgaagcccaagccagtggatgctactgaccctgctgccctcatagcagaggctctgaaaaagaaatttgcttatcggtatcgaagtgatagccaagatgaagttgaaaaaggaattccaaagtctgaatcagaggccacctcagagagagtgttgtttgggccacacatgttgaagccaacaggaaaaatgaaggctttaattgaaaatgtatcagactcctaatagacaatgagctgcgaaaagactcctggttcccctgttgatttgtgagggccaagtttgctagtagaaatcgacactgtttagtaaatacctctttagtattcagtggtcttcttttcaggctaattagtggattaagcaataatgaaagcactaagtttggttttgcttttgtgagatggtcagctttggtgctctccacaacatgtgtgttctgacatgtttctaatatgtggccagggcgttcagatttccagttttgaaaacaattgtatagatttcacaacacaaaaaggacatttgtggatgttactgcacattttaaattcttaacactaatttatctgtataagtgttttatatgcatatttttggacataaacagtttatgtaaaattagtaatgaatgatggcaacgagggcactgttatcttcgtttgttttcaatgatcatttagcattcaatgatggaacagctggtataacataagttgttggcatgaaatatttgagattggaaacttcttgccttgaacagaacttatatcttagattctctctcacattttcttggagctggggtttgaataggaaccagatgatgttcactgctgaaattccataatgcttcccattgaagggaagttgagaaccaggaaagctgctttcacgtcattgccatccagtactgacagggaagaaagatgtagttttccagtagtgatgaatcaaattattgaattaaatttcttcttaagaagtaaaaactcagaatgtaccatcttgtttcctttcagtttattaaatggcatcataaagatgactttgctaagttaatagagttaaaaatttttttaatataagccaaaatattaactttaatgaaacattgacttggcaaatgaatttcctataaattatcattggtcagaatgctgttttgtttaataatattacgcaacataaaccataggtgttattagaagtggagaactgcctttttcatctggggcttttaaggacttgctataaatgattattttttaaatgctttataaatcttcatggtttttctatttctgatacactcagctatagttaataccagagtatcctaccaggagtaatatttggaatatttaaatctagtaaaagaagaaagttgtacttcctggctgggagtattaggagatgggagtagagattcacttttaagttcttgaaaatatatgcattctcctaaatattaacaaaaatgatttggggaaatgacatggcttgattgttctgtttaaatttgtactgtggcttatgttacacatgttcatgttcacctctcattcacctgttttatatggtttaaaattctctttaacaaaattcagaaaattcacctgaaacgtattttgacctaaaagaaacatatttttgtatcagtattgaattttggacagtgcccccatataaggaagttactgttttaaaataaagcaaactaactgttttattttccttgg

SEQ ID NO: 154301 - DNA, 798 bp, Homo sapiens
  Payload ID: 10321
  Gene Symbol: MTFR1
  Gene Name: mitochondrial fission regulator 1
  ENST ID: ENST00000521247
  CDS Start-End: 1-435
ccacaccctccacctcccccaccgcccctgcctccccctgcactggggctccaccaaagtacatctgctgttgatctgattaaagaacgaagagagaaaagagccaatgctggaaagactttggttaagaacaatccaaagaaacctgaaatgccaaatatgctagagatccttaaagagatgaacagtgtaaaacttcggtcagtgaagaggtcagagcaagatgtgaagcccaagccagtggatgctactgaccctgctgccctcatagcagaggctctgaaaaagaaatttgcttatcggtatcgaagtgatagccaagatgaagttgaaaaaggaattccaaagtctgaatcagaggccacctcagagagagtgttgtcccttccagctggctttattcagccccacgtgtccaagcattgtctgggatagccttgtattggaaaacctggcccattctgtaaataaaggctccactagaaaagactcgttaaagtcagaacctgctggacaagaaggcctatggcaaatcctactgaagataaatttataagccttaagagaataaggactatgacaaaaacaatccaaaccacaataattcatggtaggaaatattgtggcatctacataataaaatggttgaggtccttcttttgttaattttgaggcctataattgctccttaactggtcaggtatcttagatatcagctggctcacaggagaatgtatcttcataatataaacccaaacgttgcttataataaactgtacatataaaaaatcttaaaag

SEQ ID NO: 154302 - DNA, 576 bp, Homo sapiens
  Payload ID: 10321
  Gene Symbol: MTFR1
  Gene Name: mitochondrial fission regulator 1
  ENST ID: ENST00000523222
  CDS Start-End: 132-302
aagctagaagcctgaggagccggagagggtgctggctgccgcgcggccgagtgtgttttatggaccatgtgctgctatgtatgcctgaagaagtacttgaaatgcaaatttggggagactttgccatataaatgcttggctggattaagcgcctaattaggatggtttttcaacaagttggagtaagcatgcaatcggtactttggtctaggaagccatatggttcgtctcgaagtatcgtaaggaaaattggtactaatttgtctctgattcagtgtccaagagttcagtttcagctgtagtaggacaggaccttgctgggaaccttcaattaacagccatgcaacagaatggagtcccagccacccaggagaggatgcagtggcgtcttttgctgatgttggatgggtagccaaagaagaaggagagtgttcagcaagactaaggacagaggtcagatcaaggccaccccttcaggatgaccttcttttctttgagaaggccccaagcagacagatttccttaccagacttgtctcaagaagagcctcagctgaagaccccagcgctggcaaat

SEQ ID NO: 154303 - DNA, 2393 bp, Homo sapiens
  Payload ID: 10321
  Gene Symbol: MTFR1
  Gene Name: mitochondrial fission regulator 1
  ENST ID: ENST00000518800
  CDS Start-End: 1-875
ggatggtttttcaacaagttggagtaagcatgcaatcgattaacagccatgcaacagaatggagtcccagccacccaggagaggatgcagtggcgtcttttgctgatgttggatgggtagccaaagaagaaggagagtgttcagcaagactaaggacagaggtcagatcaaggccaccccttcaggatgaccttcttttctttgagaaggccccaagcagacagatttccttaccagacttgtctcaagaagagcctcagctgaagaccccagcgctggcaaatgaggaagcactgcagaagatttgcgctctcgaaaatgaacttgctgctctcagagctcagattgccaaaattgtgacccagcaggagcagcaaaatctcactgcaggtgacttagattctaccacatttggtaccataccaccacaccctccacctcccccaccgcccctgcctccccctgcactggggctccaccaaagtacatctgctgttgatctgattaaagaacgaagagagaaaagagccaatgctggaaagactttggttaagaacaatccaaagaaacctgaaatgccaaatatgctagagatccttaaagagatgaacagtgtaaaacttcggtcagtgaagaggtcagagcaagatgtgaagcccaagccagtggatgctactgaccctgctgccctcatagcagaggctctgaaaaagaaatttgcttatcggtatcgaagtgatagccaagatgaagttgaaaaaggaattccaaagtctgaatcagaggccacctcagagagagtgttgtttgggccacacatgttgaagccaacaggaaaaatgaaggctttaattgaaaatgtatcagactcctaatagacaatgagctgcgaaaagactcctggttcccctgttgatttgtgagggccaagtttgctagtagaaatcgacactgtttagtaaatacctctttagtattcagtggtcttcttttcaggctaattagtggattaagcaataatgaaagcactaagtttggttttgcttttgtgagatggtcagctttggtgctctccacaacatgtgtgttctgacatgtttctaatatgtggccagggcgttcagatttccagttttgaaaacaattgtatagatttcacaacacaaaaaggacatttgtggatgttactgcacattttaaattcttaacactaatttatctgtataagtgttttatatgcatatttttggacataaacagtttatgtaaaattagtaatgaatgatggcaacgagggcactgttatcttcgtttgttttcaatgatcatttagcattcaatgatggaacagctggtataacataagttgttggcatgaaatatttgagattggaaacttcttgccttgaacagaacttatatcttagattctctctcacattttcttggagctggggtttgaataggaaccagatgatgttcactgctgaaattccataatgcttcccattgaagggaagttgagaaccaggaaagctgctttcacgtcattgccatccagtactgacagggaagaaagatgtagttttccagtagtgatgaatcaaattattgaattaaatttcttcttaagaagtaaaaactcagaatgtaccatcttgtttcctttcagtttattaaatggcatcataaagatgactttgctaagttaatagagttaaaaatttttttaatataagccaaaatattaactttaatgaaacattgacttggcaaatgaatttcctataaattatcattggtcagaatgctgttttgtttaataatattacgcaacataaaccataggtgttattagaagtggagaactgcctttttcatctggggcttttaaggacttgctataaatgattattttttaaatgctttataaatcttcatggtttttctatttctgatacactcagctatagttaataccagagtatcctaccaggagtaatatttggaatatttaaatctagtaaaagaagaaagttgtacttcctggctgggagtattaggagatgggagtagagattcacttttaagttcttgaaaatatatgcattctcctaaatattaacaaaaatgatttggggaaatgacatggcttgattgttctgtttaaatttgtactgtggcttatgttacacatgttcatgttcacctctcattcacctgttttatatggtttaaaattctctttaacaaaattcagaaaattcacctgaaacgtattttgacctaaaagaaacatatttttgtatcagtattgaattttggacagtgcccccatataaggaagttactgttttaaaataaagcaaactaactgttttattttccttgga

SEQ ID NO: 154304 - DNA, 679 bp, Homo sapiens
  Payload ID: 10321
  Gene Symbol: MTFR1
  Gene Name: mitochondrial fission regulator 1
  ENST ID: ENST00000527155
  CDS Start-End: 1-556
tccacctcccccaccgcccctgcctccccctgcactggggctccaccaaagtacatctgctgttgatctgattaaagaacgaagagagaaaagagccaatgctggaaagactttggttaagaacaatccaaagaaacctgaaatgccaaatatgctagagatccttaaagagatgaacagtgtaaaacttcggtcagtgaagaggtcagagcaagatgtgaagcccaagccagtggatgctactgaccctgctgccctcatagcagaggctctgaaaaagaaatttgcttatcggtatcgaagtgatagccaagatgaagttgaaaaaggaattccaaagtctgaatcagaggccacctcagagagagtgttgaaaagactcgttaaagtcagaacctgctggacaagaaggcctatggcaaatcctactgaagataaatttataagccttaagagaataaggactatgacaaaaacaatccaaaccacaataattcatggtaggaaatattgtggcatctacataataaaatggttgaggtccttcttttgttaattttgaggcctataattgctccttaactggtcaggtatcttagatatcagctggctcacaggagaatgtatcttcataatataaacccaaacgttgcttataataaactgtacatataaaaaa

SEQ ID NO: 154305 - DNA, 2053 bp, Homo sapiens
  Payload ID: 10322
  Gene Symbol: MTFR1L
  Gene Name: mitochondrial fission regulator 1-like
  Uniprot ID: Q9H019
  ENST ID: ENST00000374300
  CDS Start-End: 263-1141
cagttatctagttcctctcgcgaggactccgagggacaggcagggtgctgcggagcgcacaggaaaggacctgaccctgtcgcagggaaggaaggtgatgcttaagctgagctctgaggaatgatgaagaatgagctcggcgaagggggtgctggtgtttgatgcagggctcagagatggcctgatatgaaggagtcacgcctcccgcctcccggagctgcccagtggctgccttgtccttcaagtgcaggagctggttcaaatgtcaggaatggaagccactgtgaccatcccaatctggcaaaacaagccacatggggctgctcgaagtgtagtaagaagaattgggaccaacctacccttgaagccgtgtgcccgggcgtcctttgagaccctgcccaacatctctgacctgtgtttgagagatgtgcccccagtccctaccctggctgacatcgcctggattgctgcggatgaagaggagacatatgcccgggtcaggagtgatacgcgccccctgaggcacacctggaaacccagccctctgattgtcatgcagcgcaatgcctctgttcccaacctgcgtgggtccgaggagaggcttctggccctgaagaagccagctctgccagccctaagccgcactactgagctgcaggacgagctgagccacttgcgcagccagattgcaaagatagtggcagctgatgcagcttcggcttcattaacgccagatttcttatctccaggaagttcaaatgtctcttctcccttaccttgttttggatcctcattccactctacaacttcctttgtcattagtgacatcaccgaggagacagaggtggaggtccctgagcttccatcagtccccctgctttgttctgccagccctgaatgttgcaaaccagaacacaaagctgcctgcagttcgtctgaagaggatgactgcgtctctttgtccaaggccagcagctttgcagacatgatgggtatcctgaaggactttcaccgaatgaaacagagtcaagatctgaaccggagtttattgaaggaggaagaccctgctgtgcttatctctgaggtcctaaggaggaagtttgctctaaaggaagaagatatcagtagaaaaggaaattgacaaccctcagctctgcaaactcagtctcatgctcctggaataccttcaatagctgccttcctcaccgcagatgtttctgcctcttaaggatagatcttctgcaacagtcttgctgacaagctagagcttggactgaaagagaagagctggattatatatttcccagacttcaaaccctagcagaagctaaggcttgtgatttgacctgagacatttgtttcaggtaatcgtgtagaatgaagtatcttagtttaaagggtaagagagaagttgtttctggtttttccttgcccctgtgtgaaaataggtcctaaatgactgacttcactgcattagaccctatagctggtctcacaagacactttgtgcccagctgtcactcactcagcagcttccttgcagcagagcagggctgaggggaaggggctatgaatgtttgtatacatgttcacagggcacggaaaatcttatgctgctccgtcataaacctacaccaatgcccagcaatcaccctcctcacttccttgtctagatgtagaggtcaggctgctgaaccagccaacacatgggctactgctgggaagcctgggctgttttttttcttaaacacattttatattactgaacaaccaaatctaccctccacggccctgaggccttatcagttccactgattaaaaactttctcttccacggactttaagcccggtaggaaagagagaggaggagggggaaagagcaaaccatctttcttccaggcccttgactgctcctttgggctgggccaaggtttgtatgtaccacaccatgcatgactcagatgccctcaggtccctttctctatggtatgtatactgcttgtgtttgggttgaagcactacctgacattaaaggaaggacttggagagagaa

SEQ ID NO: 154306 - DNA, 2099 bp, Homo sapiens
  Payload ID: 10322
  Gene Symbol: MTFR1L
  Gene Name: mitochondrial fission regulator 1-like
  Uniprot ID: Q9H019
  ENST ID: ENST00000374301
  CDS Start-End: 309-1187
gagtccccgaagggtagttgctcgtcggagttccccagcaaacagtgaccaagccagacctcaggcttctagtttcggcttcgctgcttgacgggccgggctgccccgccgcgcattctgagacctggccgcggctcggaggcttccgcgcactcgggtccgggtcctgtgggtccaagggccgctgggcaggcggcgagcacttggccgaccttggcccagatggcctgatatgaaggagtcacgcctcccgcctcccggagctgcccagtggctgccttgtccttcaagtgcaggagctggttcaaatgtcaggaatggaagccactgtgaccatcccaatctggcaaaacaagccacatggggctgctcgaagtgtagtaagaagaattgggaccaacctacccttgaagccgtgtgcccgggcgtcctttgagaccctgcccaacatctctgacctgtgtttgagagatgtgcccccagtccctaccctggctgacatcgcctggattgctgcggatgaagaggagacatatgcccgggtcaggagtgatacgcgccccctgaggcacacctggaaacccagccctctgattgtcatgcagcgcaatgcctctgttcccaacctgcgtgggtccgaggagaggcttctggccctgaagaagccagctctgccagccctaagccgcactactgagctgcaggacgagctgagccacttgcgcagccagattgcaaagatagtggcagctgatgcagcttcggcttcattaacgccagatttcttatctccaggaagttcaaatgtctcttctcccttaccttgttttggatcctcattccactctacaacttcctttgtcattagtgacatcaccgaggagacagaggtggaggtccctgagcttccatcagtccccctgctttgttctgccagccctgaatgttgcaaaccagaacacaaagctgcctgcagttcgtctgaagaggatgactgcgtctctttgtccaaggccagcagctttgcagacatgatgggtatcctgaaggactttcaccgaatgaaacagagtcaagatctgaaccggagtttattgaaggaggaagaccctgctgtgcttatctctgaggtcctaaggaggaagtttgctctaaaggaagaagatatcagtagaaaaggaaattgacaaccctcagctctgcaaactcagtctcatgctcctggaataccttcaatagctgccttcctcaccgcagatgtttctgcctcttaaggatagatcttctgcaacagtcttgctgacaagctagagcttggactgaaagagaagagctggattatatatttcccagacttcaaaccctagcagaagctaaggcttgtgatttgacctgagacatttgtttcaggtaatcgtgtagaatgaagtatcttagtttaaagggtaagagagaagttgtttctggtttttccttgcccctgtgtgaaaataggtcctaaatgactgacttcactgcattagaccctatagctggtctcacaagacactttgtgcccagctgtcactcactcagcagcttccttgcagcagagcagggctgaggggaaggggctatgaatgtttgtatacatgttcacagggcacggaaaatcttatgctgctccgtcataaacctacaccaatgcccagcaatcaccctcctcacttccttgtctagatgtagaggtcaggctgctgaaccagccaacacatgggctactgctgggaagcctgggctgttttttttcttaaacacattttatattactgaacaaccaaatctaccctccacggccctgaggccttatcagttccactgattaaaaactttctcttccacggactttaagcccggtaggaaagagagaggaggagggggaaagagcaaaccatctttcttccaggcccttgactgctcctttgggctgggccaaggtttgtatgtaccacaccatgcatgactcagatgccctcaggtccctttctctatggtatgtatactgcttgtgtttgggttgaagcactacctgacattaaaggaaggacttggagagagaa

SEQ ID NO: 154307 - DNA, 2004 bp, Homo sapiens
  Payload ID: 10322
  Gene Symbol: MTFR1L
  Gene Name: mitochondrial fission regulator 1-like
  Uniprot ID: Q9H019
  ENST ID: ENST00000374303
  CDS Start-End: 211-1089
gtgcgcagctgcggaggatcgcttccggggggcgggtcagcggaagtgagggcggttgaggctgggcggcccaaggtggaaggaggggccgtgaggtgagagagtccgggagcccgagcttgagatggcctgatatgaaggagtcacgcctcccgcctcccggagctgcccagtggctgccttgtccttcaagtgcaggagctggttcaaatgtcaggaatggaagccactgtgaccatcccaatctggcaaaacaagccacatggggctgctcgaagtgtagtaagaagaattgggaccaacctacccttgaagccgtgtgcccgggcgtcctttgagaccctgcccaacatctctgacctgtgtttgagagatgtgcccccagtccctaccctggctgacatcgcctggattgctgcggatgaagaggagacatatgcccgggtcaggagtgatacgcgccccctgaggcacacctggaaacccagccctctgattgtcatgcagcgcaatgcctctgttcccaacctgcgtgggtccgaggagaggcttctggccctgaagaagccagctctgccagccctaagccgcactactgagctgcaggacgagctgagccacttgcgcagccagattgcaaagatagtggcagctgatgcagcttcggcttcattaacgccagatttcttatctccaggaagttcaaatgtctcttctcccttaccttgttttggatcctcattccactctacaacttcctttgtcattagtgacatcaccgaggagacagaggtggaggtccctgagcttccatcagtccccctgctttgttctgccagccctgaatgttgcaaaccagaacacaaagctgcctgcagttcgtctgaagaggatgactgcgtctctttgtccaaggccagcagctttgcagacatgatgggtatcctgaaggactttcaccgaatgaaacagagtcaagatctgaaccggagtttattgaaggaggaagaccctgctgtgcttatctctgaggtcctaaggaggaagtttgctctaaaggaagaagatatcagtagaaaaggaaattgacaaccctcagctctgcaaactcagtctcatgctcctggaataccttcaatagctgccttcctcaccgcagatgtttctgcctcttaaggatagatcttctgcaacagtcttgctgacaagctagagcttggactgaaagagaagagctggattatatatttcccagacttcaaaccctagcagaagctaaggcttgtgatttgacctgagacatttgtttcaggtaatcgtgtagaatgaagtatcttagtttaaagggtaagagagaagttgtttctggtttttccttgcccctgtgtgaaaataggtcctaaatgactgacttcactgcattagaccctatagctggtctcacaagacactttgtgcccagctgtcactcactcagcagcttccttgcagcagagcagggctgaggggaaggggctatgaatgtttgtatacatgttcacagggcacggaaaatcttatgctgctccgtcataaacctacaccaatgcccagcaatcaccctcctcacttccttgtctagatgtagaggtcaggctgctgaaccagccaacacatgggctactgctgggaagcctgggctgttttttttcttaaacacattttatattactgaacaaccaaatctaccctccacggccctgaggccttatcagttccactgattaaaaactttctcttccacggactttaagcccggtaggaaagagagaggaggagggggaaagagcaaaccatctttcttccaggcccttgactgctcctttgggctgggccaaggtttgtatgtaccacaccatgcatgactcagatgccctcaggtccctttctctatggtatgtatactgcttgtgtttgggttgaagcactacctgacattaaaggaaggacttggagagagaatgc

SEQ ID NO: 154308 - DNA, 1868 bp, Homo sapiens
  Payload ID: 10322
  Gene Symbol: MTFR1L
  Gene Name: mitochondrial fission regulator 1-like
  Uniprot ID: Q9H019
  ENST ID: ENST00000374307
  CDS Start-End: 114-956
gagagagtccgggagcccgagcttgagatggcctgatatgaaggagtcacgcctcccgcctcccggagctgcccagtggctgccttgtccttcaagtgcaggagctggttcaaatgtcaggaatggaagccactgtgaccatcccaatctggcaaaacaagccacatggggctgctcgaagtgtagtaagaagaattgggaccaacctacccttgaagccgtgtgcccgggcgtcctttgagaccctgcccaacatctctgacctgtgtttgagagatgtgcccccagtccctaccctggctgacatcgcctggattgctgcggatgaagaggagacatatgcccgggtcaggagtgatacgcgccccctgaggcacacctggaaacccagccctctgattgtcatgcagcgcaatgcctctgttcccaacctgcgtgggtccgaggagaggcttctggccctgaagaagccagctctgccagccctaagccgcactactgagctgcaggacgagctgagccacttgcgcagccagattgcaaagatagtggcagctgatgcaggaagttcaaatgtctcttctcccttaccttgttttggatcctcattccactctacaacttcctttgtcattagtgacatcaccgaggagacagaggtggaggtccctgagcttccatcagtccccctgctttgttctgccagccctgaatgttgcaaaccagaacacaaagctgcctgcagttcgtctgaagaggatgactgcgtctctttgtccaaggccagcagctttgcagacatgatgggtatcctgaaggactttcaccgaatgaaacagagtcaagatctgaaccggagtttattgaaggaggaagaccctgctgtgcttatctctgaggtcctaaggaggaagtttgctctaaaggaagaagatatcagtagaaaaggaaattgacaaccctcagctctgcaaactcagtctcatgctcctggaataccttcaatagctgccttcctcaccgcagatgtttctgcctcttaaggatagatcttctgcaacagtcttgctgacaagctagagcttggactgaaagagaagagctggattatatatttcccagacttcaaaccctagcagaagctaaggcttgtgatttgacctgagacatttgtttcaggtaatcgtgtagaatgaagtatcttagtttaaagggtaagagagaagttgtttctggtttttccttgcccctgtgtgaaaataggtcctaaatgactgacttcactgcattagaccctatagctggtctcacaagacactttgtgcccagctgtcactcactcagcagcttccttgcagcagagcagggctgaggggaaggggctatgaatgtttgtatacatgttcacagggcacggaaaatcttatgctgctccgtcataaacctacaccaatgcccagcaatcaccctcctcacttccttgtctagatgtagaggtcaggctgctgaaccagccaacacatgggctactgctgggaagcctgggctgttttttttcttaaacacattttatattactgaacaaccaaatctaccctccacggccctgaggccttatcagttccactgattaaaaactttctcttccacggactttaagcccggtaggaaagagagaggaggagggggaaagagcaaaccatctttcttccaggcccttgactgctcctttgggctgggccaaggtttgtatgtaccacaccatgcatgactcagatgccctcaggtccctttctctatggtatgtatactgcttgtgtttgggttgaagcactacctgacattaaaggaaggacttggagagagaa

SEQ ID NO: 154309 - DNA, 756 bp, Homo sapiens
  Payload ID: 10322
  Gene Symbol: MTFR1L
  Gene Name: mitochondrial fission regulator 1-like
  ENST ID: ENST00000424294
  CDS Start-End: 300-756
tggaagagctgtggggcataaaccacactgcagagctgaactggccttttggaccttttatcagtcattggcttgggaggtgaaggaaattcccaggtagggagctccgttcttcctgcaaggggatctgagtgggacaccaaatcagcatctacacccaggacagacagccagcgtggacttgcatgatccgccatcgcacaggagggaaagatggcctgatatgaaggagtcacgcctcccgcctcccggagctgcccagtggctgccttgtccttcaagtgcaggagctggttcaaatgtcaggaatggaagccactgtgaccatcccaatctggcaaaacaagccacatggggctgctcgaagtgtagtaagaagaattgggaccaacctacccttgaagccgtgtgcccgggcgtcctttgagaccctgcccaacatctctgacctgtgtttgagagatgtgcccccagtccctaccctggctgacatcgcctggattgctgcggatgaagaggagacatatgcccgggtcaggagtgatacgcgccccctgaggcacacctggaaacccagccctctgattgtcatgcagcgcaatgcctctgttcccaacctgcgtgggtccgaggagaggcttctggccctgaagaagccagctctgccagccctaagccgcactactgagctgcaggacgagctgagccacttgcgcagccagattgcaaagatagtggcagctgatgcagcttcgg

SEQ ID NO: 154310 - DNA, 815 bp, Homo sapiens
  Payload ID: 10322
  Gene Symbol: MTFR1L
  Gene Name: mitochondrial fission regulator 1-like
  ENST ID: ENST00000526158
  CDS Start-End: 304-815
gactcgccctggcgggtccccgcggggagagggtccgcgcgggtctccggccactgctgcgcgcggcaaagtttcactgagcgcggcggcctccgtgggggcccccgggaccaggggtgctgagcagggccctgcgctggaggagctcccgttctcctgaggggacgcctgtcagcagacagcaactgcagcctccggagggctgcggggcgcagagatggcctgatatgaaggagtcacgcctcccgcctcccggagctgcccagtggctgccttgtccttcaagtgcaggagctggttcaaatgtcaggaatggaagccactgtgaccatcccaatctggcaaaacaagccacatggggctgctcgaagtgtagtaagaagaattgggaccaacctacccttgaagccgtgtgcccgggcgtcctttgagaccctgcccaacatctctgacctgtgtttgagagatgtgcccccagtccctaccctggctgacatcgcctggattgctgcggatgaagaggagacatatgcccgggtcaggagtgatacgcgccccctgaggcacacctggaaacccagccctctgattgtcatgcagcgcaatgcctctgttcccaacctgcgtgggtccgaggagaggcttctggccctgaagaagccagctctgccagccctaagccgcactactgagctgcaggacgagctgagccacttgcgcagccagattgcaaagatagtggcagctgatgcagcttcggcttcattaacgccagatttcttatctccaggaagttcaaatgtctcttctccctt

SEQ ID NO: 154311 - DNA, 763 bp, Homo sapiens
  Payload ID: 10322
  Gene Symbol: MTFR1L
  Gene Name: mitochondrial fission regulator 1-like
  ENST ID: ENST00000530599
  CDS Start-End: 247-405
gtttagttcagcgcgttgaagcgctcactgtgtcctaggcagacaccgtgctgtgcgcggggatcacagttatctagttcctctcgcgaggactccgagggacaggcagggtgctgcggagcgcacaggaaaggacctgaccctgtcgcagggaaggaagatggcctgatatgaaggagtcacgcctcccgcctcccggagctgcccagtggctgccttgtccttcaagtgcaggagctggttcaaatgtcaggaatggaagccactgtgaggcctggaattggagcaaggccaccgtttcactccctccccctaagaagaaccaactatgatcctggggcacttcaggagtcagtaccatcccaatctggcaaaacaagccacatggggctgctcgaagtgtagtaagaagaattgggaccaacctacccttgaagccgtgtgcccgggcgtcctttgagaccctgcccaacatctctgacctgtgtttgagagatgtgcccccagtccctaccctggctgacatcgcctggattgctgcggatgaagaggagacatatgcccgggtcaggagtgatacgcgccccctgaggcacacctggaaacccagccctctgattgtcatgcagcgcaatgcctctgttcccaacctgcgtgggtccgaggagaggcttctggccctgaagaagccagctctgccagccctaagccgcactactgagctgcaggacgagctgagccacttgcgcagccagattgcaaa

SEQ ID NO: 154312 - DNA, 733 bp, Homo sapiens
  Payload ID: 10322
  Gene Symbol: MTFR1L
  Gene Name: mitochondrial fission regulator 1-like
  ENST ID: ENST00000526894
  CDS Start-End: 138-686
aggtggaaggaggggccgtgaggtgagagagtccgggagcccgagcttgagatggcctgatatgaaggagtcacgcctcccgcctcccggagctgcccagtggctgccttgtccttcaagtgcaggagctggttcaaatgtcaggaatggaagccactgtgaccatcccaatctggcaaaacaagccacatggggctgctcgaagtgtagtaagaagaattgggaccaacctacccttgaagccgtgtgcccgggcgtcctttgagaccctgcccaacatctctgacctgtgtttgagagatgtgcccccagtccctaccctggctgacatcgcctggattgctgcggatgaagaggagacatatgcccgggtcaggagtgatacgcgccccctgaggcacacctggaaacccagccctctgattgtcatgcagcgcaatgcctctgttcccaacctgcgtgggtccgaggagaggcttctggccctgaagaagccagctctgccagccctaagccgcactactgagctgcaggacgagctgagccacttgcgcagccagattgcaaagatagtggcagctgatgcagccctgaatgttgcaaaccagaacacaaagctgcctgcagttcgtctgaagaggatgactgcgtctctttgtccaaggccagcagctttgcagacatgatgggtatcctgaaggactttcaccgaatgaaacagagtcaagatctg

SEQ ID NO: 154313 - DNA, 838 bp, Homo sapiens
  Payload ID: 10322
  Gene Symbol: MTFR1L
  Gene Name: mitochondrial fission regulator 1-like
  ENST ID: ENST00000472643
  CDS Start-End: 358-838
ggtcagcggaagtgagggcggttgaggctgggcggcccaaggtggaaggaggggccgtgaggtgagagagtccgggagcccgagcttgagaccatcccaatctggcaaaacaagccacatggggctgctcgaagtgtagtaagaagaattgggaccaacctacccttgaagccgtgtgcccgggcgtcctttgagaccctgcccaacatctctgacctgtgtttgagagatgtgcccccagtccctaccctggctgacatcgcctggattgctgcggatgaagaggagacatatgcccgggtcaggagtgatacgcgccccctgaggcacacctggaaacccagccctctgattgtcatgcagcgcaatgcctctgttcccaacctgcgtgggtccgaggagaggcttctggccctgaagaagccagctctgccagccctaagccgcactactgagctgcaggacgagctgagccacttgcgcagccagattgcaaagatagtggcagctgatgcagcttcggcttcattaacgccagatttcttatctccaggaagttcaaatgtctcttctcccttaccttgttttggatcctcattccactctacaacttcctttgtcattagtgacatcaccgaggagacagaggtggaggtccctgagcttccatcagtccccctgctttgttctgccagccctgaatgttgcaaaccagaacacaaagctgcctgcagttcgtctgaagaggatgactgcgtctctttgtccaaggccagcagctttgcagacatgatgggtatcctgaaggactttcaccgaatgaaacagagtcaagatc

SEQ ID NO: 154314 - DNA, 555 bp, Homo sapiens
  Payload ID: 10322
  Gene Symbol: MTFR1L
  Gene Name: mitochondrial fission regulator 1-like
  ENST ID: ENST00000529116
  CDS Start-End: 211-555
tccggggggcgggtcagcggaagtgagggcggttgaggctgggcggcccaaggtggaaggaggggccgtgaggtgagagagtccgggagcccgagcttgagagggaaatctggtgctcctccagatggcctgatatgaaggagtcacgcctcccgcctcccggagctgcccagtggctgccttgtccttcaagtgcaggagctggttcaaatgtcaggaatggaagccactgtgaccatcccaatctggcaaaacaagccacatggggctgctcgaagtgtagtaagaagaattgggaccaacctacccttgaagccgtgtgcccgggcgtcctttgagaccctgcccaacatctctgacctgtgtttgagagatgtgcccccagtccctaccctggctgacatcgcctggattgctgcggatgaagaggagacatatgcccgggtcaggagtgatacgcgccccctgaggcacacctggaaacccagccctctgattgtcatgcagcgcaatgcctctgttcccaacctgcgtgggtccgaggagaggcttctg

SEQ ID NO: 154315 - DNA, 575 bp, Homo sapiens
  Payload ID: 10322
  Gene Symbol: MTFR1L
  Gene Name: mitochondrial fission regulator 1-like
  ENST ID: ENST00000525713
  CDS Start-End: 244-575
gagtccccgaagggtagttgctcgtcggagttccccagcaaacagtgaccaagccagacctcaggcttctagtttcggcttcgctgcttgacgggccgggctgccccgccgcgcattctgagacctggccgcggctcggaggcttccgcgcactcggatggcctgatatgaaggagtcacgcctcccgcctcccggagctgcccagtggctgccttgtccttcaagtgcaggagctggttcaaatgtcaggaatggaagccactgtgaccatcccaatctggcaaaacaagccacatggggctgctcgaagtgtagtaagaagaattgggaccaacctacccttgaagccgtgtgcccgggcgtcctttgagaccctgcccaacatctctgacctgtgtttgagagatgtgcccccagtccctaccctggctgacatcgcctggattgctgcggatgaagaggagacatatgcccgggtcaggagtgatacgcgccccctgaggcacacctggaaacccagccctctgattgtcatgcagcgcaatgcctctgttcccaacctgcgtgggtccga

SEQ ID NO: 154316 - DNA, 562 bp, Homo sapiens
  Payload ID: 10322
  Gene Symbol: MTFR1L
  Gene Name: mitochondrial fission regulator 1-like
  ENST ID: ENST00000528624
  CDS Start-End: 249-407
aaactgagtccccgaagggtagttgctcgtcggagttccccagcaaacagtgaccaagccagacctcaggcttctagtttcggcttcgctgcttgacgggccgggctgccccgccgcgcattctgagacctggccgcggctcggaggcttccgcgcactcggatggcctgatatgaaggagtcacgcctcccgcctcccggagctgcccagtggctgccttgtccttcaagtgcaggagctggttcaaatgtcaggaatggaagccactgtgaggcctggaattggagcaaggccaccgtttcactccctccccctaagaagaaccaactatgatcctggggcacttcaggagtcagtaccatcccaatctggcaaaacaagccacatggggctgctcgaagtgtagtaagaagaattgggaccaacctacccttgaagccgtgtgcccgggcgtcctttgagaccctgcccaacatctctgacctgtgtttgagagatgtgcccccagtccctaccctggctgacatcgcctggattgctgcggatgaagaggagacatat

SEQ ID NO: 154317 - DNA, 3262 bp, Homo sapiens
  Payload ID: 10322
  Gene Symbol: MTFR1L
  Gene Name: mitochondrial fission regulator 1-like
  Uniprot ID: Q9H019
  ENST ID: ENST00000466284
  CDS Start-End: 1583-2200
gtgaatgacacctcgtctcccaagggtagaagaggggaccctccacaggaggtctccagaaagagctgctttgtcagtctagtctatctcccattcagagcctgtccagggctccccagtgacccggacctcatgacttgccccctacttttgtagctttatcatgctctgctcctctttccatgtccttcaccttcttgtgctggacctgtgctcttgctgttttgtcttcatttcctactccctcgcaacttactacagggcactagggccagagctctgacctcatctggccacctgcctaatgctactcagcctttgctagaagtatgtattcatgtcctatcactctgctggacagcgagttccttgagagcatgactgtgtcttactccttccatagcccctacggtgcccagcacaaggcctggcacaagtgggtactgttggtgtttgatgaacaagtgaatgaacgagcacactgattgcatctgctcaccatgcaaggactgctgtgaagagcagtcagatgtcacctcacccatctgtgtcatgttttaacagttcattaagcactcaaccccatttcactcattgacccttaaggtagcctccagtggcagcttttcctgtctcctttttccagatggaaaaaccaacattcagaaaagttaaataacttgcctgtagctacaaagccagaaggtggctgagccaggataaacttttttggctctttttctctgtagctcatgagactgagattggcatgagctggtgttcgttctcctattttctctgatctctccctttgcaagggcccagcagtgcttttacatctcatcttcaagaatgaatcctgggcttggatagtacttataatttggctagatgagctttgtagctaccaaggattctatttgcatctttagaagttttgcctcaagaaacctgagagcccaggaaggctcttgggttggccaagctcactaggcaaatcttttttttttttttttttttttgagacggagtctcgctctgtcacccaggttggagtgcagtggcgtgatctcggctcactgcaagctctgcctcctgggttcacgccattctcctgcctcagcctcccaagtagctggtactacaggtgcccgccaccacacctggctaattttttgtatttttagtagagacagggcttcactgtgttagccaggatggtctcgctctcctgacctcgtgatccgcccacctcggcctcccaaagtgctgggattacagatgtgagccactgcgcctggccgcagatctttaacagaacctttaagagtctggacttagagctaagtgttgggtgagggcagcctcttgggctggttttctcccctgtgaagtcatggctctgcagggcctggttttttggggcttgtgtggtgaccattaaatccccactgtggggggttgtttcacaagagggaaatctggtgctcctccagatggcctgatatgaaggagtcacgcctcccgcctcccggagctgcccagtggctgccttgtccttcaagtgcaggagctggttcaaatgtcaggaatggaagccactgtgaccatcccaatctggcaaaacaagccacatggggctgctcgaagtgtagtaagaagaattgggaccaacctacccttgaagccgtgtgcccgggcgtcctttgagaccctgcccaacatctctgacctgtgtttgagagatgtgcccccagtccctaccctggctgacatcgcctggattgctgcggatgaagaggagacatatgcccgggtcaggagtgatacgcgccccctgaggcacacctggaaacccagccctctgattgtcatgcagcgcaatgcctctgttcccaacctgcgtgggtccgaggagaggcttctggccctgaagaagccagctctgccagccctaagccgcactactgagctgcaggacgagctgagccacttgcgcagccagattgcaaagatagtggcagctgatgcagtgacatcaccgaggagacagaggtggaggtccctgagcttccatcagtccccctgctttgttctgccagccctgaatgttgcaaaccagaacacaaagctgcctgcagttcgtctgaagaggatgactgcgtctctttgtccaaggccagcagctttgcagacatgatgggtatcctgaaggactttcaccgaatgaaacagagtcaagatctgaaccggagtttattgaaggaggaagaccctgctgtgcttatctctgaggtcctaaggaggaagtttgctctaaaggaagaagatatcagtagaaaaggaaattgacaaccctcagctctgcaaactcagtctcatgctcctggaataccttcaatagctgccttcctcaccgcagatgtttctgcctcttaaggatagatcttctgcaacagtcttgctgacaagctagagcttggactgaaagagaagagctggattatatatttcccagacttcaaaccctagcagaagctaaggcttgtgatttgacctgagacatttgtttcaggtaatcgtgtagaatgaagtatcttagtttaaagggtaagagagaagttgtttctggtttttccttgcccctgtgtgaaaataggtcctaaatgactgacttcactgcattagaccctatagctggtctcacaagacactttgtgcccagctgtcactcactcagcagcttccttgcagcagagcagggctgaggggaaggggctatgaatgtttgtatacatgttcacagggcacggaaaatcttatgctgctccgtcataaacctacaccaatgcccagcaatcaccctcctcacttccttgtctagatgtagaggtcaggctgctgaaccagccaacacatgggctactgctgggaagcctgggctgttttttttcttaaacacattttatattactgaacaaccaaatctaccctccacggccctgaggccttatcagttccactgattaaaaactttctcttccacggactttaagcccggtaggaaagagagaggaggagggggaaagagcaaaccatctttcttccaggcccttgactgctcctttgggctgggccaaggtttgtatgtaccacaccatgcatgactcagatgccctcaggtccctttctctatggtatgtatactgcttgtgtttgggttgaagcactacctgacattaaaggaaggacttggagagag

SEQ ID NO: 154318 - DNA, 722 bp, Homo sapiens
  Payload ID: 10322
  Gene Symbol: MTFR1L
  Gene Name: mitochondrial fission regulator 1-like
  ENST ID: ENST00000533762
  CDS Start-End: 682-722
gcttccggggggcgggtcagcggaagtgagggcggttgaggctgggcggcccaaggtggaaggaggggccgtgaggtgagagagtccgggagcccgagcttgagatggcctgatatgaaggagtcacgcctcccgcctcccggagctgcccagtggctgccttgtccttcaagtgcaggagctggttcaaatgtcaggaatggaagccactgtggcctggaattggagcaaggccaccgtttcactccctccccctaagaagaaccaactatgatcctggggcacttcaggagtcagtgtatgtctgcctttctgtacagaggacgggaaggaaagcctggataatctctacactcagctacttcctctccccttccctgaccctcccaacattgactgccttagcagcagcagaccatcccaatctggcaaaacaagccacatggggctgctcgaagtgtagtaagaagaattgggaccaacctacccttgaagccgtgtgcccgggcgtcctttgagaccctgcccaacatctctgacctgtgtttgagagatgtgcccccagtccctaccctggctgacatcgcctggattgctgcggatgaagaggagacatatgcccgggtcaggagtgatacgcgccccctgaggcacacctggaaacccagccctctgattgtcatgcagcgcaatgcctctgttcccaacctgcgtgggtccga

SEQ ID NO: 154319 - DNA, 1217 bp, Homo sapiens
  Payload ID: 10322
  Gene Symbol: MTFR1L
  Gene Name: mitochondrial fission regulator 1-like
  ENST ID: ENST00000524618
  CDS Start-End: 445-1032
aggaggggccgtgaggtgagagagtccgggagcccgagcttgagatggcctgatatgaaggagtcacgcctcccgcctcccggagctgcccagtggctgccttgtccttcaagtgcaggagctggttcaaatgtcaggaatggaagccactgtgctgtctccgtctctttgctccagaccatcccaatctggcaaaacaagccacatggggctgctcgaagtgtagtaagaagaattgggaccaacctacccttgaagccgtgtgcccgggcgtcctttgagaccctgcccaacatctctgacctgtgtttgagagatgtgcccccagtccctaccctggctgacatcgcctggattgctgcggatgaagaggagacatatgcccgggtcaggagtgatacgcgccccctgaggcacacctggaaacccagccctctgattgtcatgcagcgcaatgcctctgttcccaacctgcgtgggtccgaggagaggcttctggccctgaagaagccagctctgccagccctaagccgcactactgagctgcaggacgagctgagccacttgcgcagccagattgcaaagatagtggcagctgatgcagcttcggcttcattaacgccagatttcttatctccaggaagttcaaatgtctcttctcccttaccttgttttggatcctcattccactctacaacttcctttgtcattagtgacatcaccgaggagacagaggtggaggtccctgagcttccatcagtccccctgctttgttctgccagccctgaatgttgcaaaccagaacacaaagctgcctgcagttcgtctgaagaggatgactgcgtctctttgtccaaggccagcagctttgcagacatgatgggtatcctgaaggactttcaccgaatgaaacagagtcaagatctgaaccggagtttattgaaggaggaagaccctgctgtgcttatctctgaggtcctaaggaggaagtttgctctaaaggaagaagatatcagtagaaaaggaaattgacaaccctcagctctgcaaactcagtctcatgctcctggaataccttcaatagctgccttcctcaccgcagatgtttctgcctcttaaggatagatcttctgcaacagtcttgctgacaagctagagcttggactgaaagagaagagctggattatatatttcccagacttcaaaccctagcagaa

SEQ ID NO: 154320 - DNA, 1873 bp, Homo sapiens
  Payload ID: 10322
  Gene Symbol: MTFR1L
  Gene Name: mitochondrial fission regulator 1-like
  Uniprot ID: Q9H019
  ENST ID: ENST00000474295
  CDS Start-End: 188-805
tccggggggcgggtcagcggaagtgagggcggttgaggctgggcggcccaaggtggaaggaggggccgtgaggtgagagagtccgggagcccgagcttgagatggcctgatatgaaggagtcacgcctcccgcctcccggagctgcccagtggctgccttgtccttcaagtgcaggagctggttcaaatgtcaggaatggaagccactgtgaccatcccaatctggcaaaacaagccacatggggctgctcgaagtgtagtaagaagaattgggaccaacctacccttgaagccgtgtgcccgggcgtcctttgagaccctgcccaacatctctgacctgtgtttgagagatgtgcccccagtccctaccctggctgacatcgcctggattgctgcggatgaagaggagacatatgcccgggtcaggagtgatacgcgccccctgaggcacacctggaaacccagccctctgattgtcatgcagcgcaatgcctctgttcccaacctgcgtgggtccgaggagaggcttctggccctgaagaagccagctctgccagccctaagccgcactactgagctgcaggacgagctgagccacttgcgcagccagattgcaaagatagtggcagctgatgcagtgacatcaccgaggagacagaggtggaggtccctgagcttccatcagtccccctgctttgttctgccagccctgaatgttgcaaaccagaacacaaagctgcctgcagttcgtctgaagaggatgactgcgtctctttgtccaaggccagcagctttgcagacatgatgggtatcctgaaggactttcaccgaatgaaacagagtcaagatctgaaccggagtttattgaaggaggaagaccctgctgtgcttatctctgaggtcctaaggaggaagtttgctctaaaggaagaagatatcagtagaaaaggaaattgacaaccctcagctctgcaaactcagtctcatgctcctggaataccttcaatagctgccttcctcaccgcagatgtttctgcctcttaaggatagatcttctgcaacagtcttgctgacaagctagagcttggactgaaagagaagagctggattatatatttcccagacttcaaaccctagcagaagctaaggcttgtgatttgacctgagacatttgtttcaggtaatcgtgtagaatgaagtatcttagtttaaagggtaagagagaagttgtttctggtttttccttgcccctgtgtgaaaataggtcctaaatgactgacttcactgcattagaccctatagctggtctcacaagacactttgtgcccagctgtcactcactcagcagcttccttgcagcagagcagggctgaggggaaggggctatgaatgtttgtatacatgttcacagggcacggaaaatcttatgctgctccgtcataaacctacaccaatgcccagcaatcaccctcctcacttccttgtctagatgtagaggtcaggctgctgaaccagccaacacatgggctactgctgggaagcctgggctgttttttttcttaaacacattttatattactgaacaaccaaatctaccctccacggccctgaggccttatcagttccactgattaaaaactttctcttccacggactttaagcccggtaggaaagagagaggaggagggggaaagagcaaaccatctttcttccaggcccttgactgctcctttgggctgggccaaggtttgtatgtaccacaccatgcatgactcagatgccctcaggtccctttctctatggtatgtatactgcttgtgtttgggttgaagcactacctgacattaaaggaaggacttggagagagaatgca

SEQ ID NO: 154321 - DNA, 793 bp, Homo sapiens
  Payload ID: 10322
  Gene Symbol: MTFR1L
  Gene Name: mitochondrial fission regulator 1-like
  ENST ID: ENST00000478284
  CDS Start-End: 136-357
gtggaaggaggggccgtgaggtgagagagtccgggagcccgagcttgagatggcctgatatgaaggagtcacgcctcccgcctcccggagctgcccagtggctgccttgtccttcaagtgcaggagctggttcaaatgtcaggaatggaagccactgtgaggacgggaaggaaagcctggataatctctacactcagctacttcctctccccttccctgaccctcccaacattgactgccttagcagcagcagaccatcccaatctggcaaaacaagccacatggggctgctcgaagtgtagtaagaagaattgggaccaacctacccttgaagccgtgtgcccgggcgtcctttgagaccctgcccaacatctctgacctgtgtttgagagatgtgcccccagtccctaccctggctgacatcgcctggattgctgcggatgaagaggagacatatgcccgggtcaggagtgatacgcgccccctgaggcacacctggaaacccagccctctgattgtcatgcagcgcaatgcctctgttcccaacctgcgtgggtccgaggagaggcttctggccctgaagaagccagctctgccagccctaagccgcactactgagctgcaggacgagctgagccacttgcgcagccagattgcaaagatagtggcagctgatgcagcttcggcttcattaacgccagatttcttatctccaggaagttcaaatgtctcttctcccttaccttgttttggatcctcattccactctacaacttcctttgtcattagtgac

SEQ ID NO: 154322 - DNA, 1201 bp, Homo sapiens
  Payload ID: 10322
  Gene Symbol: MTFR1L
  Gene Name: mitochondrial fission regulator 1-like
  ENST ID: ENST00000464008
  CDS Start-End: 515-673
aaacagtgaccaagccagacctcaggcttctagtttcggcttcgctgcttgacgggccgggctgccccgccgcgcattctgagacctggccgcggctcggaggcttccgcgcactcgggtccgggtcctgtgggtccaagggccgctgggcaggcggcgagcacttggccgaccttggcccaggtcgggtcgtctgccgcgggggaggggcgactcgccctggcgggtccccgcggggagagggtccgcgcgggtctccggccactgctgcgcgcggcaaagtttcactgagcgcggcggcctccgtgggggcccccgggaccaggggtgctgagcagggccctgcgctggaggagctcccgttctcctgaggggacgcctgtcagcagacagcaactgcagcctccggagggctgcggggcgcagagatggcctgatatgaaggagtcacgcctcccgcctcccggagctgcccagtggctgccttgtccttcaagtgcaggagctggttcaaatgtcaggaatggaagccactgtgaggcctggaattggagcaaggccaccgtttcactccctccccctaagaagaaccaactatgatcctggggcacttcaggagtcagtaccatcccaatctggcaaaacaagccacatggggctgctcgaagtgtagtaagaagaattgggaccaacctacccttgaagccgtgtgcccgggcgtcctttgagaccctgcccaacatctctgacctgtgtttgagagatgtgcccccagtccctaccctggctgacatcgcctggattgctgcggatgaagaggagacatatgcccgggtcaggagtgatacgcgccccctgaggcacacctggaaacccagccctctgattgtcatgcagcgcaatgcctctgttcccaacctgcgtgggtccgaggagaggcttctggccctgaagaagccagctctgccagccctaagccgcactactgagctgcaggacgagctgagccacttgcgcagccagattgcaaagatagtggcagctgatgcagcttcggcttcattaacgccagatttcttatctccaggaagttcaaatgtctcttctcccttaccttgttttggatcctcattccactctacaacttcctttgtcattagtgacatcaccgaggagacagaggtggaggtccctgagcttc

SEQ ID NO: 154323 - DNA, 541 bp, Homo sapiens
  Payload ID: 10322
  Gene Symbol: MTFR1L
  Gene Name: mitochondrial fission regulator 1-like
  ENST ID: ENST00000488327
  CDS Start-End: 382-541
gggtcagcggaagtgagggcggttgaggctgggcggcccaaggtggaaggaggggccgtgaggtgagagagtccgggagcccgagcttgagctgtctccgtctctttgctccagaccatcccaatctggcaaaacaagccacatggggctgctcgaagtgtagtaagaagaattgggaccaacctacccttgaagccgtgtgcccgggcgtcctttgagaccctgcccaacatctctgacctgtgtttgagagatgtgcccccagtccctaccctggctgacatcgcctggattgctgcggatgaagaggagacatatgcccgggtcaggagtgatacgcgccccctgaggcacacctggaaacccagccctctgattgtcatgcagcgcaatgcctctgttcccaacctgcgtgggtccgaggagaggcttctggccctgaagaagccagctctgccagccctaagccgcactactgagctgcaggacgagctgagccacttgcgcagccagattgcaaagatagtggcagctgatgcag

SEQ ID NO: 154324 - DNA, 1586 bp, Homo sapiens
  Payload ID: 10323
  Gene Symbol: MTFR2
  Gene Name: mitochondrial fission regulator 2
  Uniprot ID: Q6P444
  ENST ID: ENST00000367784
  CDS Start-End: 84-218
agtagcagtccggtcctagggactagcaggcaccaagaaactgataatgttcctttgaattggcttctgtatttgcttcatcaatgtctctcatactgaatatcttaagagagatgctggaatattttggcgttcctgtagaacagttagaagtaacttcagcatatttgtcatcactctggaagaaacagacaggaagaaatttaagatccacatgagagaggattgagcaccgcctttgagaaggttttgctgatttgggaaaataaagactatggatcaactaggagtattgttcgtattattgggaaaatgcttccactggaaccttgtcgaagacctaattttgagttgatcccgctcttgaactctgtagactctgataattgtggatctatggttccatcttttgctgatattttgtatgtggcaaatgatgaagaagccagttatctcagatttcgaaatagtatatggaaaaatgaagaagagaaagtggaaatttttcatcctttgcgactagttcgggatccactgtcacctgctgtaagacagaaagaaactgtgaaaaatgacctgcctgtaaatgaagctgcaattagaaaaatagctgcccttgaaaatgagctgacttttcttcgctctcagattgcagcaattgtggaaatgcaggaactgaaaaatagtacaaattctagttcctttggcttgagtgacgagcgcattagtttgggtcagctgtcatcatcgcgggctgcccatctgagtgtggacccagatcagcttccaggttcagtgctttctcctcctcctcctccaccacttcctcctcagttttcatctctccagccaccgtgttttcctcccgtacaaccaggatctaataatatttgtgactcagataatccagcaactgaaatgagcaaacagaacccggctgctaataagaccaattatagtcatcattcaaaaagccagagaaataaagatattccaaacatgttggacgttctaaaggatatgaataaggttaagcttcgtgcaattgagcggtcacctggcggtagacccattcataagaggaaaagacagaattcacattgggatccagtttctttaatatctcatgcacttaaacagaaatttgcatttcaagaagatgattcttttgagaaagagaatagatcttgggaatcttccccattttctagtccagaaacttcaaggtttggacatcacatttcacagtcagaaggacagcgaactaaagaagaaatggtcaacacaaaagctgttgaccaaggtatcagcaacacaagccttctaaactcaaggatttaaactcaacttaaggttgagctttaaacttccaaaacttcttcctggatgataaattattcttagaaactgatttggactgttaaaggctaaaagtagatgtatttaaagactcttcttgacacattttgcctacacttgctatgtaaatatgtatgcctgtcatttttgtttcctttgttcctttttacgtttatactctgttcttctgtacatagagcttaaaataaacattctttttgaacttg

SEQ ID NO: 154325 - DNA, 1793 bp, Homo sapiens
  Payload ID: 10323
  Gene Symbol: MTFR2
  Gene Name: mitochondrial fission regulator 2
  Uniprot ID: Q6P444
  ENST ID: ENST00000420702
  CDS Start-End: 391-1548
agcagtcctgtcatgcggaagtagcagtccggtcctagggactagcaggtgggttggttgggcgcaggaggacgggggcgcgcttcccataacattaccctggctgagcgtgaggctccagggctgggcaccgggttgacctcttattcctcgctgagggcatcgttaccgcctgtggctgcaagccgaggcgcgcgggtggaaactgggtcgaggtctgggtagacgtctgagcgatctgcacaaggagtggcgcagtctggaatttgattgaggattcctaacgccctccgcttgatgttctggtgattcccgggggctcggcttcggaggaaggcaccaagaaactgataatgttcctttgaattggcttctgtatttgcttcatcaatgtctctcatactgaatatcttaagagagatgctggaatattttggcgttcctgtagaacaggttttgctgatttgggaaaataaagactatggatcaactaggagtattgttcgtattattgggaaaatgcttccactggaaccttgtcgaagacctaattttgagttgatcccgctcttgaactctgtagactctgataattgtggatctatggttccatcttttgctgatattttgtatgtggcaaatgatgaagaagccagttatctcagatttcgaaatagtatatggaaaaatgaagaagagaaagtggaaatttttcatcctttgcgactagttcgggatccactgtcacctgctgtaagacagaaagaaactgtgaaaaatgacctgcctgtaaatgaagctgcaattagaaaaatagctgcccttgaaaatgagctgacttttcttcgctctcagattgcagcaattgtggaaatgcaggaactgaaaaatagtacaaattctagttcctttggcttgagtgacgagcgcattagtttgggtcagctgtcatcatcgcgggctgcccatctgagtgtggacccagatcagcttccaggttcagtgctttctcctcctcctcctccaccacttcctcctcagttttcatctctccagccaccgtgttttcctcccgtacaaccaggatctaataatatttgtgactcagataatccagcaactgaaatgagcaaacagaacccggctgctaataagaccaattatagtcatcattcaaaaagccagagaaataaagatattccaaacatgttggacgttctaaaggatatgaataaggttaagcttcgtgcaattgagcggtcacctggcggtagacccattcataagaggaaaagacagaattcacattgggatccagtttctttaatatctcatgcacttaaacagaaatttgcatttcaagaagatgattcttttgagaaagagaatagatcttgggaatcttccccattttctagtccagaaacttcaaggtttggacatcacatttcacagtcagaaggacagcgaactaaagaagaaatggtcaacacaaaagctgttgaccaaggtatcagcaacacaagccttctaaactcaaggatttaaactcaacttaaggttgagctttaaacttccaaaacttcttcctggatgataaattattcttagaaactgatttggactgttaaaggctaaaagtagatgtatttaaagactcttcttgacacattttgcctacacttgctatgtaaatatgtatgcctgtcatttttgtttcctttgttcctttttacgtttatactctgttcttctgtacatagagcttaaaataaacattctttttgaacttg

SEQ ID NO: 154326 - DNA, 1524 bp, Homo sapiens
  Payload ID: 10323
  Gene Symbol: MTFR2
  Gene Name: mitochondrial fission regulator 2
  Uniprot ID: Q6P444
  ENST ID: ENST00000451457
  CDS Start-End: 116-1273
gggatgcggaagtagcagtcctgtcatgcggaagtagcagtccggtcctagggactagcaggcaccaagaaactgataatgttcctttgaattggcttctgtatttgcttcatcaatgtctctcatactgaatatcttaagagagatgctggaatattttggcgttcctgtagaacaggttttgctgatttgggaaaataaagactatggatcaactaggagtattgttcgtattattgggaaaatgcttccactggaaccttgtcgaagacctaattttgagttgatcccgctcttgaactctgtagactctgataattgtggatctatggttccatcttttgctgatattttgtatgtggcaaatgatgaagaagccagttatctcagatttcgaaatagtatatggaaaaatgaagaagagaaagtggaaatttttcatcctttgcgactagttcgggatccactgtcacctgctgtaagacagaaagaaactgtgaaaaatgacctgcctgtaaatgaagctgcaattagaaaaatagctgcccttgaaaatgagctgacttttcttcgctctcagattgcagcaattgtggaaatgcaggaactgaaaaatagtacaaattctagttcctttggcttgagtgacgagcgcattagtttgggtcagctgtcatcatcgcgggctgcccatctgagtgtggacccagatcagcttccaggttcagtgctttctcctcctcctcctccaccacttcctcctcagttttcatctctccagccaccgtgttttcctcccgtacaaccaggatctaataatatttgtgactcagataatccagcaactgaaatgagcaaacagaacccggctgctaataagaccaattatagtcatcattcaaaaagccagagaaataaagatattccaaacatgttggacgttctaaaggatatgaataaggttaagcttcgtgcaattgagcggtcacctggcggtagacccattcataagaggaaaagacagaattcacattgggatccagtttctttaatatctcatgcacttaaacagaaatttgcatttcaagaagatgattcttttgagaaagagaatagatcttgggaatcttccccattttctagtccagaaacttcaaggtttggacatcacatttcacagtcagaaggacagcgaactaaagaagaaatggtcaacacaaaagctgttgaccaaggtatcagcaacacaagccttctaaactcaaggatttaaactcaacttaaggttgagctttaaacttccaaaacttcttcctggatgataaattattcttagaaactgatttggactgttaaaggctaaaagtagatgtatttaaagactcttcttgacacattttgcctacacttgctatgtaaatatgtatgcctgtcatttttgtttcctttgttcctttttacgtttatactctgttcttctgtacatagagcttaaaataaacattctttttgaacttgcttgtg

SEQ ID NO: 154327 - DNA, 833 bp, Homo sapiens
  Payload ID: 10323
  Gene Symbol: MTFR2
  Gene Name: mitochondrial fission regulator 2
  ENST ID: ENST00000418509
  CDS Start-End: 98-833
gaagtagcagtccggtcctagggactagcaggttttgctgatttgggaaaataaagactatggatcaactaggagtattgttcgtattattgggaaaatgcttccactggaaccttgtcgaagacctaattttgagttgatcccgctcttgaactctgtagactctgataattgtggatctatggttccatcttttgctgatattttgtatgtggcaaatgatgaagaagccagttatctcagatttcgaaatagtatatggaaaaatgaagaagagaaagtggaaatttttcatcctttgcgactagttcgggatccactgtcacctgctgtaagacagaaagaaactgtgaaaaatgacctgcctgtaaatgaagctgcaattagaaaaatagctgcccttgaaaatgagctgacttttcttcgctctcagattgcagcaattgtggaaatgcaggaactgaaaaatagtacaaattctagttcctttggcttgagtgacgagcgcattagtttgggtcagctgtcatcatcgcgggctgcccatctgagtgtggacccagatcagcttccaggttcagtgctttctcctcctcctcctccaccacttcctcctcagttttcatctctccagccaccgtgttttcctcccgtacaaccaggatctaataatatttgtgactcagataatccagcaactgaaatgagcaaacagaacccggctgctaataagaccaattatagtcatcattcaaaaagccagagaaataaagatattccaaacatgttggacgttctaaaggatatgaataaggttaagcttcgtgcaattg

SEQ ID NO: 154328 - DNA, 437 bp, Homo sapiens
  Payload ID: 10323
  Gene Symbol: MTFR2
  Gene Name: mitochondrial fission regulator 2
  ENST ID: ENST00000532958
  CDS Start-End: 1-346
aagccagagaaataaagatattccaaacatgttggacgttctaaaggatatgaataaggttaagcttcgtgcaattgagcggtcacctggcggtagacccattcataagaggaaaagacagaattcacattgggatccagtttctttaatatctcatgcacttaaacagaaatttgcatttcaagaagatgattcttttgagaaagagaatagatcttgggaatcttccccattttctagtccagaaacttcaagggtaagctacactaatgtaaaattaatttttcagtttttctcagatgtgttgtttatgttacagctttgtgttcaagttctcttgaagtaattgtgcagaatgggctatataattgtttattgatgctgctaatgtttctggggtttttttgttgttaattttatatgctcattttcacttt

SEQ ID NO: 154329 - DNA, 1781 bp, Homo sapiens
  Payload ID: 10324
  Gene Symbol: MGME1
  Gene Name: mitochondrial genome maintenance exonuclease 1
  ENST ID: ENST00000377704
  CDS Start-End: 87-845
gttaagcgaagtgtggtggcttccaaggaatacaaacataaaggccttcgaccgttgcaaatagactaaagtgaaaacaaatctgaatgaagatgaagttatttcagaccatttgcaggcagctcaggagttcaaagttttctgtggaatcagctgcccttgtggctttctctacttcctcttactcatgtggccggaagaaaaaagtgaacccatatgaagaagtggaccaagaaaaatactctaatttagttcagtctgtcttgtcatccagaggcgtcgcccagaccccgggatcggtggaggaagatgctttgctctgtggacccgtgagcaagcataagctgccaaaccaaggtgaggacagacgagtgccacaaaactggtttcctatcttcaatccagagagaagtgataaaccaaatgcaagtgatccttcagttcctttgaaaatccccttgcaaaggaatgtgataccaagtgtgacccgagtccttcagcagaccatgacaaaacaacaggttttcttgttggagaggtggaaacagcggatgattctggaactgggagaagatggctttaaagaatacacttcaagttcaatgtggcttaattgtggtggcctacaaagatggatcacctgcccacccacatttcatggatgcagagctctgttcccagtactggaccaagtggcttcttcgactagaagaatatacggaaaagaaaaagaaccagaatattcagaaaccagaatattcagaatagggagcaagttgctatttgggaacattcagcaccttctcacagtttgggaacatatattgctgtttactccagtgtaaaaatgaggtgccactggatctgagtgctacacgaacacaagtagaagtattaatttgttgaaatgtgttgttaccaaaaagactgaaaagccccaaagtctagatataaagacctagacttcggcacgcgaaatcccagctatgctacctcttatttacctgaaaggaggacacgcaggatgggcagtcatgctggtgactcttgtactcccttgagggacattgggggggggggggcgtggtcccaggcaggatgcccagtctttgagctgagattggaaggcagtgaggctgagggtgccaagatttccccagggttcacccagaggggaaggggctacatgcccccagctgtgtgcagggaggacacatcagcccactaccgctgccaacaccaatgcctaaaacttgtttcatacattggggttttctatatatttcagctgggaaaagcttacatttaaccttttgaaaaaataaatacgtgattagcctcaactaaacattgctgactataaagacagtatattcaccatgtcgctggcaatatgtcattgcgtaacaccaaataaccccccagaagtagccagaggccagtttgaacatcacaattctaagtgttttagtaactatttctggcgtgagtcaacagatcatgtagatagagtcaattattgtttgtggagtttttcagctataggggaggggaactattaaaatccatttgtttctattcaataggtaataaaaattagttgtccctgggtttgggaaacttaaatgcccattacagccctggggaagggttttctgtcttatggagtgagtcttagcatttaagttatacagttgctgccttaaaatagtagcctgctacaatgacttctttgggtagccattttcataagaaataaaatacaagatatgagtaatgaa

SEQ ID NO: 154330 - DNA, 1936 bp, Homo sapiens
  Payload ID: 10324
  Gene Symbol: MGME1
  Gene Name: mitochondrial genome maintenance exonuclease 1
  ENST ID: ENST00000377709
  CDS Start-End: 129-923
ggatgaaagtacgggtcgcgagaggttgttcgcgccttgagagttaagcgaagtgtggtggcttccaaggaatacaaacataaaggccttcgaccgttgcaaatagactaaagtgaaaacaaatctgaatgaagatgaagttatttcagaccatttgcaggcagctcaggagttcaaagttttctgtggaatcagctgcccttgtggctttctctacttcctcttactcatgtggccggaagaaaaaagtgaacccatatgaagaagtggaccaagaaaaatactctaatttagttcagtctgtcttgtcatccagaggcgtcgcccagaccccgggatcggtggaggaagatgctttgctctgtggacccgtgagcaagcataagctgccaaaccaagacgtctttttacaagggaaacggttccacgaagccttggaaagcatactttcaccccaggaaaccttaaaagagagagatgaaaatctcctcaagtctggttacattgaaagtgtccagcatattctgaaagatgtcagtggagtgcgagctcttgaaagtgctgttcaacatgaaaccttaaactatataggtctgctggactgtgtggctgagtatcagggcaagctctgtgtgattgattggaagacatcagagaaaccaaagccttttattcaaagtacatttgacaacccactgcaagttgtggcatacatgggtgccatgaaccatgataccaactacagctttcaggttcaatgtggcttaattgtggtggcctacaaagatggatcacctgcccacccacatttcatggatgcagagctctgttcccagtactggaccaagtggcttcttcgactagaagaatatacggaaaagaaaaagaaccagaatattcagaaaccagaatattcagaatagggagcaagttgctatttgggaacattcagcaccttctcacagtttgggaacatatattgctgtttactccagtgtaaaaatgaggtgccactggatctgagtgctacacgaacacaagtagaagtattaatttgttgaaatgtgttgttaccaaaaagactgaaaagccccaaagtctagatataaagacctagacttcggcacgcgaaatcccagctatgctacctcttatttacctgaaaggaggacacgcaggatgggcagtcatgctggtgactcttgtactcccttgagggacattgggggggggggggcgtggtcccaggcaggatgcccagtctttgagctgagattggaaggcagtgaggctgagggtgccaagatttccccagggttcacccagaggggaaggggctacatgcccccagctgtgtgcagggaggacacatcagcccactaccgctgccaacaccaatgcctaaaacttgtttcatacattggggttttctatatatttcagctgggaaaagcttacatttaaccttttgaaaaaataaatacgtgattagcctcaactaaacattgctgactataaagacagtatattcaccatgtcgctggcaatatgtcattgcgtaacaccaaataaccccccagaagtagccagaggccagtttgaacatcacaattctaagtgttttagtaactatttctggcgtgagtcaacagatcatgtagatagagtcaattattgtttgtggagtttttcagctataggggaggggaactattaaaatccatttgtttctattcaataggtaataaaaattagttgtccctgggtttgggaaacttaaatgcccattacagccctggggaagggttttctgtcttatggagtgagtcttagcatttaagttatacagttgctgccttaaaatagtagcctgctacaatgacttctttgggtagccattttcataagaaataaaatacaagatatgagtaatgaa

SEQ ID NO: 154331 - DNA, 2336 bp, Homo sapiens
  Payload ID: 10324
  Gene Symbol: MGME1
  Gene Name: mitochondrial genome maintenance exonuclease 1
  Uniprot ID: Q9BQP7
  ENST ID: ENST00000377710
  CDS Start-End: 289-1323
ggagacgccggcccttccgctcggagaggtactccctgcctctaactggtggcgcgttggcggaggccgacgaaagcctcgggtggggcgtgagcgccgcggggcattctggacctgctttgccttaggctgtgcctaattcgaaaccaaagcgcgggacggatgaaagtacgggtcgcgagaggttgttcgcgccttgagagttaagcgaagtgtggtggcttccaaggaatacaaacataaaggccttcgaccgttgcaaatagactaaagtgaaaacaaatctgaatgaagatgaagttatttcagaccatttgcaggcagctcaggagttcaaagttttctgtggaatcagctgcccttgtggctttctctacttcctcttactcatgtggccggaagaaaaaagtgaacccatatgaagaagtggaccaagaaaaatactctaatttagttcagtctgtcttgtcatccagaggcgtcgcccagaccccgggatcggtggaggaagatgctttgctctgtggacccgtgagcaagcataagctgccaaaccaaggtgaggacagacgagtgccacaaaactggtttcctatcttcaatccagagagaagtgataaaccaaatgcaagtgatccttcagttcctttgaaaatccccttgcaaaggaatgtgataccaagtgtgacccgagtccttcagcagaccatgacaaaacaacaggttttcttgttggagaggtggaaacagcggatgattctggaactgggagaagatggctttaaagaatacacttcaaacgtctttttacaagggaaacggttccacgaagccttggaaagcatactttcaccccaggaaaccttaaaagagagagatgaaaatctcctcaagtctggttacattgaaagtgtccagcatattctgaaagatgtcagtggagtgcgagctcttgaaagtgctgttcaacatgaaaccttaaactatataggtctgctggactgtgtggctgagtatcagggcaagctctgtgtgattgattggaagacatcagagaaaccaaagccttttattcaaagtacatttgacaacccactgcaagttgtggcatacatgggtgccatgaaccatgataccaactacagctttcaggttcaatgtggcttaattgtggtggcctacaaagatggatcacctgcccacccacatttcatggatgcagagctctgttcccagtactggaccaagtggcttcttcgactagaagaatatacggaaaagaaaaagaaccagaatattcagaaaccagaatattcagaatagggagcaagttgctatttgggaacattcagcaccttctcacagtttgggaacatatattgctgtttactccagtgtaaaaatgaggtgccactggatctgagtgctacacgaacacaagtagaagtattaatttgttgaaatgtgttgttaccaaaaagactgaaaagccccaaagtctagatataaagacctagacttcggcacgcgaaatcccagctatgctacctcttatttacctgaaaggaggacacgcaggatgggcagtcatgctggtgactcttgtactcccttgagggacattgggggggggggggcgtggtcccaggcaggatgcccagtctttgagctgagattggaaggcagtgaggctgagggtgccaagatttccccagggttcacccagaggggaaggggctacatgcccccagctgtgtgcagggaggacacatcagcccactaccgctgccaacaccaatgcctaaaacttgtttcatacattggggttttctatatatttcagctgggaaaagcttacatttaaccttttgaaaaaataaatacgtgattagcctcaactaaacattgctgactataaagacagtatattcaccatgtcgctggcaatatgtcattgcgtaacaccaaataaccccccagaagtagccagaggccagtttgaacatcacaattctaagtgttttagtaactatttctggcgtgagtcaacagatcatgtagatagagtcaattattgtttgtggagtttttcagctataggggaggggaactattaaaatccatttgtttctattcaataggtaataaaaattagttgtccctgggtttgggaaacttaaatgcccattacagccctggggaagggttttctgtcttatggagtgagtcttagcatttaagttatacagttgctgccttaaaatagtagcctgctacaatgacttctttgggtagccattttcataagaaataaaatacaagatatgagtaatgaa

SEQ ID NO: 154332 - DNA, 589 bp, Homo sapiens
  Payload ID: 10325
  Gene Symbol:
  Gene Name: Mitochondrial import inner membrane translocase subunit Tim10 B  [Source:UniProtKB/Swiss-Prot
  Acc:Q9Y5J6]
  ENST ID: ENST00000464330
  CDS Start-End: 33-248
ggaagtggcgtacggcatgcgccggtggcgtgatggagcggcagcagcagcagcaacagcaactgcgaaacgaggcctgtctgcacagctgtgctgggaagctgatccattccaaccaccgcctcatggccgcttacgtgcagctcatgcctgccctggtacagcgccgcatcgcagactacgaggctgcctcggctgtgccaggcgttgctgctgaacagcctggggtctctccatcaggcagctagccatacccaaccccaggaaggaaggccttggatggaccctcagattgaaggacccggtggaccttggggtctcagcttgactatgaagttcccagggaaaaggccttccaaaagagcagcaccggcttttcacctgagacttccttcctggatagccaggtgatgactgctctgaagatggagagatacctgaagaagatccacttcctctatctcaatgtggctcccagccggtactttaggccttacagcctgatggtggtgccacccgacaaggtgaatcccgagcactacatcttctctccctttgggatcttgcatgtacatcctgtggaaggtag

SEQ ID NO: 154333 - DNA, 595 bp, Homo sapiens
  Payload ID: 10325
  Gene Symbol:
  Gene Name: Mitochondrial import inner membrane translocase subunit Tim10 B  [Source:UniProtKB/Swiss-Prot
  Acc:Q9Y5J6]
  Uniprot ID: Q9Y5J6
  ENST ID: ENST00000472836
  CDS Start-End: 17-328
atgcgccggtggcgtgatggagcggcagcagcagcagcaacagcaactgcgaaacctgcgtgacttcctgttggtctacaatcggatgacagaactctgcttccagcgctgtgtgcccagcttgcaccaccgagctctggacgctgaggaggaggcctgtctgcacagctgtgctgggaagctgatccattccaaccaccgcctcatggccgcttacgtgcagctcatgcctgccctggtacagcgccgcatcgcagactacgaggctgcctcggctgtgccaggcgttgctgctgaacagcctggggtctctccatcaggcagctagccatacccaaccccaggaaggaaggccttggatggaccctcagattgaaggacccggtggaccttggggcgatcgccagctcgagtgcagattccttgctgtgaccgaggttcagagtgagctctgtcggtgtgtcagtttgcctcttcaggtgaggccccgcatctggcatcctggaactggcagttggagcctgagctatgggcaaggtcacttcgacagcagttgaatgcccagctcctcatggtcccggaggagaggagggta

SEQ ID NO: 154334 - DNA, 3712 bp, Homo sapiens
  Payload ID: 10326
  Gene Symbol: MINOS1
  Gene Name: mitochondrial inner membrane organizing system 1
  Uniprot ID: Q5TGZ0
  ENST ID: ENST00000322753
  CDS Start-End: 57-293
aggggtcggagcgcgggggccggccgagaggaaagctggaggcgcgggtggggaacatgtctgagtcggagctcggcaggaagtgggaccggtgtctggcggatgcggtcgtgaagataggtactggttttggattaggaattgttttctcacttaccttctttaaaagaagaatgtggccattagccttcggttctggcatgggattaggaatggcttattccaactgtcagcatgatttccaggctccatatcttctacatggaaaatatgtcaaagagcaggagcagtgacttcacctgagaacatcccagcgggaggacaagagaaatcatgtttattcctcaggaatactgaagtgccctggagtaagctgccattcttctgtaacaatgttatcagtaatgctttaaactccagcacctggttatgcatttgaaaccaagtctgtttcttgttttgtattttctctctggaagttgtaaggaggtggtcttaaataaattaaacaaaaagaggaagtccattgcatggcctttgtttcttcacctttggtctctgagcatgaggaggactgtgtgtgaactgccagcagctgtagccacctgctcacagcctctctgagaaccccctgaaaccagttgttgggtatccttcccatttgccccctcaggcgtagttttcagaactgcttccacctcgtaatcagaagttgaagattgctgctgcgtggcctgatggagatgactgatgtcttaaggcgcctttccttctgtggcacctcttcgtgtgttctcacctggggacctggcagggcacatctccgctgtgcctactgcaaggcggtcccactgctgctgtattagcaggggaagaatcctggctgtgtggatggcccactccattgaagtcaagtcctgcagcttcatagagcttgagacagtccaagcttcagctctggagggcggaggaaagctcatggcatacccacctggccggaggagcccgattggggttaattttatcttcacgtagcagctgaagtttgaggacaaaagggccacttctgatgcccctctgagtttgttcctgtggtttcacttgaaccagggatgctagatgcaaaagtcatattttagcaatttcttcagacgatatacagaaccccagcgctcagccgttcttatttctttttccttatcgtagaattaagatagggagagcccgatcccacttgcccctgtatcctgtaaatgttgatttatcatctactgtaagcgaggcactgttgtaagcagcagagataaatggataaatagacacaggcttctgccttcaaggagcttagagtctgatggaaagacagacgtgcaaacacaactctgaaagaagtgttttaatggagaagagaggtgtaggcaaagtacactgagaacaaaggagaaggagcaactatgtctccctaggatggccccacaggcgacggaatgcctgcgctgggacccgaagttgactgggaatcccagacagaaggagggtagcctctgtgtttgctcaggatcatgtaatgcatattatagctgggaaatcgcaagtagttcagcatagccagggtgtgtaggggcaggggaaaggcatggagggggaggctgggcaatagggtacaactcatgtctgactccagttctggaacattgattagaccttagttcttgcaagtgctatagtgagtacattcagggtagcaaataccctccctcagcctccccactcccttttccagaaaggtctgctaggctctgccctgcaaactgtccaggctcctctgccctctgggcttgttttcctctttattgctacttggctgtttttcacttggtcctcttcattctatgattaaggcaacccatataattgaaagaaaaataatgtgcagcctgtttcatcccttccacttgttttcttactatttatttatttatttctgagatggaattttgctcttgttgcccaggctggagtgcaatggtggcgatctcggcctgctgcaacctccgcttcctgggttcaagcgcttctcctgcctcagcctcccgagtagctgggattacaggcatgcgccatcacacctggctaattttgtatttttagtagagacggtgtttctccttggtcatgctggtctccaactcccgacctcaggtgatcctcccgcctcggcctcccaaagtgctgggattacaggcgtgagccaccgcacccagcctcctatttgctttaaaagtaatttcctggccggatgcggtggctcacacctgtaatcccagcactttgggaggccaaggcaggtggatcatgaggtcaagagatcaagaccatcctggccaacattgtaaaaccctgtctctactaaaaatataaaaatcagctgggcatggtggcgcacacctgtagtcccagctactcaggaggttgaggcaggagaatcatttgaacccgggaggcagaggttgcggtgagctgagatcgcgccactgcactccagcccggcgacagagcgagaatctgtctcaaaaaaaaaaaaaaaaaaaaagcattttccttccccaatttttctgtcattttcccatcctcattcaggcagagagaagaataacatgcccccttccaaaaaagacaaaacacaaggtagccacaaattccctagacacattagaaaaatagggagtggagaggggcattggaatgaaagttctctatctcattagctgttaggctttaggcatttatttggatggatccctttggcaccttggaagcaccactgaagtgctctgagaaaggggtcagctgtctgagggaatagttctggatagaggccacaggaagcactggccagttgctttagttctagatagctttgtattcccgccttgttgcccttagcggaggctggcccaaagcacacttgatcttgtccccactccctgcccccatctcagatcaaccttcagaaagtcccggcttgttggcaaaggcacacattctgtgttactcttaagtttcattagaaattcaagtcctctggggccctgttcccttgtgggcttgtgcaactgactttgtttcttgtctgcctttctggaaccaaatccaaggaaattcatgggtttggggagacagcgatgggaacccagcagggcacaggatgctaggataaagctgtggcgccccaaaagtggcctgctctgccaacatacataaatacatacagtctgagcttgacactgtataatttggcccagaacaatatgtattttgagctcatttaggtgaatgactttggcattccatgtacccactaggggaagctttatcaggctgcatttgccttatgcagaagtatgcctttgttctgagaaatggcctcagaacacactgttgagctgtctcctttagtgagtgtcatcctctcatccatttcaaaagattgcagatgccgtcttgaagtcctgcttgtaagaaatgcaggggttgggaatggaggagatgacgatgtagttttgcttttagttttcccaaacctgtttacattttttaaaaatgtaaccaacccataattgcattttacttgtcgtggttcgatctgattgtattgtcgaaggactatttttgaacctgtccaaataaactctgcaaagtatttccacaa

SEQ ID NO: 154335 - DNA, 3678 bp, Homo sapiens
  Payload ID: 10326
  Gene Symbol: MINOS1
  Gene Name: mitochondrial inner membrane organizing system 1
  ENST ID: ENST00000617872
  CDS Start-End: 70-258
tcgcgagactttcaggggtcggagcgcgggggccggccgagaggaaagctggaggcgcgggtggggaacatgtctgagtcggagctcggcaggaagtgggaccggtgtctggcggatgcggtcgtgaagataggaagaatgtggccattagccttcggttctggcatgggattaggaatggcttattccaactgtcagcatgatttccaggctccatatcttctacatggaaaatatgtcaaagagcaggagcagtgacttcacctgagaacatcccagcgggaggacaagagaaatcatgtttattcctcaggaatactgaagtgccctggagtaagctgccattcttctgtaacaatgttatcagtaatgctttaaactccagcacctggttatgcatttgaaaccaagtctgtttcttgttttgtattttctctctggaagttgtaaggaggtggtcttaaataaattaaacaaaaagaggaagtccattgcatggcctttgtttcttcacctttggtctctgagcatgaggaggactgtgtgtgaactgccagcagctgtagccacctgctcacagcctctctgagaaccccctgaaaccagttgttgggtatccttcccatttgccccctcaggcgtagttttcagaactgcttccacctcgtaatcagaagttgaagattgctgctgcgtggcctgatggagatgactgatgtcttaaggcgcctttccttctgtggcacctcttcgtgtgttctcacctggggacctggcagggcacatctccgctgtgcctactgcaaggcggtcccactgctgctgtattagcaggggaagaatcctggctgtgtggatggcccactccattgaagtcaagtcctgcagcttcatagagcttgagacagtccaagcttcagctctggagggcggaggaaagctcatggcatacccacctggccggaggagcccgattggggttaattttatcttcacgtagcagctgaagtttgaggacaaaagggccacttctgatgcccctctgagtttgttcctgtggtttcacttgaaccagggatgctagatgcaaaagtcatattttagcaatttcttcagacgatatacagaaccccagcgctcagccgttcttatttctttttccttatcgtagaattaagatagggagagcccgatcccacttgcccctgtatcctgtaaatgttgatttatcatctactgtaagcgaggcactgttgtaagcagcagagataaatggataaatagacacaggcttctgccttcaaggagcttagagtctgatggaaagacagacgtgcaaacacaactctgaaagaagtgttttaatggagaagagaggtgtaggcaaagtacactgagaacaaaggagaaggagcaactatgtctccctaggatggccccacaggcgacggaatgcctgcgctgggacccgaagttgactgggaatcccagacagaaggagggtagcctctgtgtttgctcaggatcatgtaatgcatattatagctgggaaatcgcaagtagttcagcatagccagggtgtgtaggggcaggggaaaggcatggagggggaggctgggcaatagggtacaactcatgtctgactccagttctggaacattgattagaccttagttcttgcaagtgctatagtgagtacattcagggtagcaaataccctccctcagcctccccactcccttttccagaaaggtctgctaggctctgccctgcaaactgtccaggctcctctgccctctgggcttgttttcctctttattgctacttggctgtttttcacttggtcctcttcattctatgattaaggcaacccatataattgaaagaaaaataatgtgcagcctgtttcatcccttccacttgttttcttactatttatttatttatttctgagatggaattttgctcttgttgcccaggctggagtgcaatggtggcgatctcggcctgctgcaacctccgcttcctgggttcaagcgcttctcctgcctcagcctcccgagtagctgggattacaggcatgcgccatcacacctggctaattttgtatttttagtagagacggtgtttctccttggtcatgctggtctccaactcccgacctcaggtgatcctcccgcctcggcctcccaaagtgctgggattacaggcgtgagccaccgcacccagcctcctatttgctttaaaagtaatttcctggccggatgcggtggctcacacctgtaatcccagcactttgggaggccaaggcaggtggatcatgaggtcaagagatcaagaccatcctggccaacattgtaaaaccctgtctctactaaaaatataaaaatcagctgggcatggtggcgcacacctgtagtcccagctactcaggaggttgaggcaggagaatcatttgaacccgggaggcagaggttgcggtgagctgagatcgcgccactgcactccagcccggcgacagagcgagaatctgtctcaaaaaaaaaaaaaaaaaaaaagcattttccttccccaatttttctgtcattttcccatcctcattcaggcagagagaagaataacatgcccccttccaaaaaagacaaaacacaaggtagccacaaattccctagacacattagaaaaatagggagtggagaggggcattggaatgaaagttctctatctcattagctgttaggctttaggcatttatttggatggatccctttggcaccttggaagcaccactgaagtgctctgagaaaggggtcagctgtctgagggaatagttctggatagaggccacaggaagcactggccagttgctttagttctagatagctttgtattcccgccttgttgcccttagcggaggctggcccaaagcacacttgatcttgtccccactccctgcccccatctcagatcaaccttcagaaagtcccggcttgttggcaaaggcacacattctgtgttactcttaagtttcattagaaattcaagtcctctggggccctgttcccttgtgggcttgtgcaactgactttgtttcttgtctgcctttctggaaccaaatccaaggaaattcatgggtttggggagacagcgatgggaacccagcagggcacaggatgctaggataaagctgtggcgccccaaaagtggcctgctctgccaacatacataaatacatacagtctgagcttgacactgtataatttggcccagaacaatatgtattttgagctcatttaggtgaatgactttggcattccatgtacccactaggggaagctttatcaggctgcatttgccttatgcagaagtatgcctttgttctgagaaatggcctcagaacacactgttgagctgtctcctttagtgagtgtcatcctctcatccatttcaaaagattgcagatgccgtcttgaagtcctgcttgtaagaaatgcaggggttgggaatggaggagatgacgatgtagttttgcttttagttttcccaaacctgtttacattttttaaaaatgtaaccaacccataattgcattttacttgtcgtggttcgatctgattgtattgtcgaaggactatttttgaacctgtccaaataaactctgcaaagtatttccacaag

SEQ ID NO: 154336 - DNA, 2400 bp, Homo sapiens
  Payload ID: 10327
  Gene Symbol: MIPEP
  Gene Name: mitochondrial intermediate peptidase
  Uniprot ID: Q99797
  ENST ID: ENST00000382172
  CDS Start-End: 100-2241
cggcgtgggctgctgccttggaaacgcggagcgcgcgctcccagcgaaagcagcagggcagggatctgcgttggaggaagggactgctctggtgctagaatgctgtgcgtcggaaggctgggcggcttgggagccagagcagcagctctgccgccccgccgggcgggccggggaagcctcgaagccgggatccgggcccgaagggtcagcaccagctggtctcccgtgggcgccgccttcaatgtcaagccccagggcagccgcttggacctgttcggcgagcgccggggtctttttggagttcctgagctgagtgccccagaaggatttcatattgcacaagaaaaagccttgagaaagacagaattgcttgtggaccgtgcatgttccaccccacctgggccccagaccgtgctgatcttcgatgagctctcggattccttatgcagagtggccgacttggctgattttgtgaaaatcgctcaccctgagccagcattcagagaagctgcggaagaagcttgtagaagtattggcaccatggtagagaagttgaacacaaatgtggatttatatcaaagtttgcaaaaattactagctgataaaaaacttgtggattcccttgatccagaaacaaggcgagtggctgaactgtttatgtttgattttgaaattagtggaatccatctagacaaagaaaagcgtaaaagagcagtggacctcaatgttaaaatcttggatttgagtagtacatttcttatgggaaccaattttcccaacaagattgagaagcatctcttaccagaacacattcgtcgtaactttacatctgctggggatcatatcataattgatggtctccacgcagaatcaccagatgacttggtgcgagaagctgcttataaaatttttctttatcccaatgctggtcaattgaaatgtttagaagaattgctcagcagcagagatcttctggcaaagttggtggggtattccacgttttctcacagggctctccaaggaacgatagctaaaaatccagagactgtcatgcagttccttgaaaaactatctgacaaactttctgaaagaactctgaaagattttgagatgatacgagggatgaaaatgaaactgaatcctcaaaattccgaagtaatgccctgggaccccccttactacagtggtgtgattcgtgcagaaaggtataatattgagcccagcctatattgcccgtttttctctcttggagcatgcatggaaggcctgaatattttgcttaacagactgttggggatttcattatatgcagagcagcctgcaaaaggagaggtgtggagcgaagatgtccgaaaactggctgttgttcatgaatctgaaggattgttggggtacatttactgtgatttttttcagcgagcagacaaaccacatcaggattgccatttcactatccgtggaggcagactaaaggaagatggagactatcaactcccagttgtagttcttatgctgaatcttccccgttcctcaaggagttctccaactttgctaactcctagcatgatggaaaatcttttccatgaaatgggacatgccatgcattcaatgctaggacgtactcgttaccaacacgtcactgggaccaggtgccctactgattttgctgaggttccttctattctgatggagtactttgcaaatgattatcgagtagttaaccaatttgccagacattatcagactggacagccactgccaaaaaatatggtgtctcgtctttgtgaatctaaaaaggtttgtgctgcagctgatatgcaacttcaggtcttttatgccactctggatcaaatctaccatgggaagcatcccctgaggaattcaaccacagacattctcaaggaaacacaagagaaattctatggcctaccatatgttccaaatactgcctggcagctgcgattcagccacctcgtggggtatggtgctagatattactcttacctcatgtccagagcggtcgcctccatggtttggaaggagtgttttctacaggatcctttcaacagggctgccggggagcgctatcgcagggagatgctggcccacggtggaggcagggagcccatgctcatggttgaaggtatgcttcagaagtgtccttctgttgatgacttcgtaagtgccctcgtttccgacttggatctggacttcgaaactttcctcatggattctgaataaaagaaacactctacacctcttaaatcaaggtcatgtagataatgactttgttataaatgctacagctgtgagagcttgtttctgatttcattgttcgcttctgtaattctgaaaaactttaaactggtagaacttggaataaataatttgttttaatta

SEQ ID NO: 154337 - DNA, 2734 bp, Homo sapiens
  Payload ID: 10328
  Gene Symbol: MTFMT
  Gene Name: mitochondrial methionyl-tRNA formyltransferase
  Uniprot ID: Q96DP5
  ENST ID: ENST00000220058
  CDS Start-End: 15-1184
cggcggccgaggcgatgagggtgttggtgcggcgctgttggggtcctccgctggctcatggcgccaggcgtgggaggccgagtccccagtggcgagcactggcccgactcggctgggaggactgccgggactccagagtccgcgagaagcctccctggcgggtgctcttcttcggcacggaccagttcgcccgcgaggcgctgcgggcgctgcacgccgccagggaaaacaaagaagaagagttaatcgacaaactggaggtggtcacaatgccttccccatcaccaaaaggactgccagtgaagcaatatgctgtgcagtctcagcttcccgtatatgagtggccggatgtgggatctggagaatatgatgttggagtagtggcttcgtttggccgacttttgaatgaggctcttattcttaaatttccctatggcatattgaatgttcatcccagttgcctcccgagatggcgtggcccagcccctgtaatccatacagtgcttcacggagacacagttactggagtaacaattatgcaaattagacctaaaaggtttgatgtaggcccaattctcaaacaagaaactgttcctgtgccacccaagagcactgcaaaggaattggaagcagtgttgtcaagactgggtgccaacatgctcatttcagttttgaaaaatttgcctgaaagtctgagcaatggaaggcagcagccaatggagggggcgacttacgcccctaagatttctgctggtaccagttgtataaaatgggaggaacaaacttcagaacaaatattcagactttaccgtgccattggaaatataattccgttgcagacgctctggatggcgaataccattaaacttctggatttggtagaagttaacagttcagtccttgctgatccaaaattaacgggacaggctcttattccaggatcagtaatataccacaaacagtcacaaatactattggtttattgcaaggatggttggattggtgttcgatcagtgatgctcaagaaatcactaacagctactgacttctacaatggatatttgcacccctggtaccagaaaaattcccaagctcaaccaagccaatgcagatttcagactctcagacttccaacaaagaagaagcagaaaaaaactgttgctatgcaacaatgcattgagtagttaggaagaagatggataaaaacctattacatatttgtaatttattaaaaaccttatttacaaggaattatctggacttttttttttttttttttttttgagacagagtctcactctgtcacccaggctggaatccagtggcactatctcagctcactgcaacctccgcctcccaggttcaagcaattctcctgcctcagcctcctgagtagctgggattacaggcacacgccaccacacgcagctaatttttgtatttttagtagagatggggtttcaccatgttggtcaggctggtctcgaactcctgaccttgtgatctgcccacctcagcctcccaaagtgctatgattacagacgtgagccaccgtgcctggcctggaattatctggactttcaaagaagatggcattattataagaagagaagattattgccgaaaagatggattgcctcactttccactttttatgtaacagtagttaaaaaacagctttttttttacttgaattacaaaaaagtttaaataaaacttgtatttatgatacgaaactcaaggagattatctttccttaagaacaagggcaaccctaactggtgtatgtatgtacctacatacatactgagaagaggttttttgtttttatttttatttttttgagacggagtcttgttctgtggcccaggctggagtgcagtggcgtgatgtcagctcactgcaagctccacctcccgggttcacaccattctcctgcctcagcctcccaagtagctgggactacaggcgtccgccaccatgcctggctaatttttttttttgtatttttagtagagatggggtttcactgtgttagccaggatggtcttgatctcctgacctcgtgatccacccgccttggcctcccaaagtgctgggattacagctgtgagccaccgtgcctggccgagaagaggtttttttaaaaacagtgcatctatttaattttttaaaaatcgtgtcaccactgacattttaggagtattgaatctgcattttttatttcctataagtagtaaatccagctctttacatttcactaccagctagatttaaccaagtagtaaacgtaggtaatatttaataatctctgccacattgatctgtactataaattaacattttacatccagattttatttttttttattaatttttttagagatggggtcttgctctctcacacagtctggagtccagtggcgtgaaacactgcttactgcatcttcaacctcctgggcttaagtgatcctccagcctcagcctcccaaagtggggccaccacgcctggctaattttctttcttagtttttaaaaaaaattttgtagagataggggtctcactatgttgcttaggctggtcttgaactcctgggcccaagcaatcctcctgccttggcctctcaaagtgctgggattacaagcatgaaccactgcacccggcccaggttttcttgaagtaggaacgtgctaacatttttcaacttacttgtgcaataaaggttattgagca

SEQ ID NO: 154338 - DNA, 1216 bp, Homo sapiens
  Payload ID: 10328
  Gene Symbol: MTFMT
  Gene Name: mitochondrial methionyl-tRNA formyltransferase
  Uniprot ID: Q96DP5
  ENST ID: ENST00000543678
  CDS Start-End: 27-461
agggccggccgccggcggccgaggcgatgagggtgttggtgcggcgctgttggggtcctccgctggctcatggcgccaggcgtgggaggccgagtccccagtggcgagcactggcccgactcggctgggaggactgccgggactccagagtccgcgagaagcctccctggcgggtgctcttcttcggcacggaccagttcgcccgcgaggcgctgcgggcgctgcacgccgccagggaaaacaaagaagaagagttaatcgacaaactggaggtggtcacaatgccttccccatcaccaaaaggactgccagtgaagcaatatgctgtgcagtctcagcttcccgtatatgagtggccggatgtgggatctggagaatatgatgttggagtagtggcttcgtttggccgacttttgaatgaggctcttattcttaaatttccctactcatttcagttttgaaaaatttgcctgaaagtctgagcaatggaaggcagcagccaatggagggggcgacttacgcccctaagatttctgctggtaccagttgtataaaatgggaggaacaaacttcagaacaaatattcagactttaccgtgccattggaaatatagtaagttgggaagtcaggttgcagttctacctagttggttttctatgtgtgtaatttgctttctaaatatttttatttaggaataatcccaaataaaaatatcccaaataaaaggttgatcttaggaacaaaacctagaaaacctgaaatttattcttaaaaattctttaagctgtttaaagtgtttatagagaccttagaattcacaaagcacttttaaatatatgtatattgcagtttcacataaccaagttttactatcctacttcataggtgaggggaaagaaatgagatgactaacaggaatgtccagtcactaaataatgaacttaaatcttctcactcctaatcctgtgcttcttccagtatgtctttctgcctttagccaattttttacaatcaaattgttaaatcattgatttctacatatggtacaccaagtgtagtaatataacagtttgttaaaatgtctgagttaaattctcagttcattgataaatttgtggggttttttcctttcatttcaatagctacttgtgttatttgaacactgagcttaccgtatgtgtgtttgtgtgtgtgtgttgttttattttttgagac

SEQ ID NO: 154339 - DNA, 1522 bp, Homo sapiens
  Payload ID: 10328
  Gene Symbol: MTFMT
  Gene Name: mitochondrial methionyl-tRNA formyltransferase
  Uniprot ID: Q96DP5
  ENST ID: ENST00000558460
  CDS Start-End: 4-1173
gcgatgagggtgttggtgcggcgctgttggggtcctccgctggctcatggcgccaggcgtgggaggccgagtccccagtggcgagcactggcccgactcggctgggaggactgccgggactccagagtccgcgagaagcctccctggcgggtgctcttcttcggcacggaccagttcgcccgcgaggcgctgcgggcgctgcacgccgccagggaaaacaaagaagaagagttaatcgacaaactggaggtggtcacaatgccttccccatcaccaaaaggactgccagtgaagcaatatgctgtgcagtctcagcttcccgtatatgagtggccggatgtgggatctggagaatatgatgttggagtagtggcttcgtttggccgacttttgaatgaggctcttattcttaaatttccctatggcatattgaatgttcatcccagttgcctcccgagatggcgtggcccagcccctgtaatccatacagtgcttcacggagacacagttactggagtaacaattatgcaaattagacctaaaaggtttgatgtaggcccaattctcaaacaagaaactgttcctgtgccacccaagagcactgcaaaggaattggaagcagtgttgtcaagactgggtgccaacatgctcatttcagttttgaaaaatttgcctgaaagtctgagcaatggaaggcagcagccaatggagggggcgacttacgcccctaagatttctgctggtaccagttgtataaaatgggaggaacaaacttcagaacaaatattcagactttaccgtgccattggaaatataattccgttgcagacgctctggatggcgaataccattaaacttctggatttggtagaagttaacagttcagtccttgctgatccaaaattaacgggacaggctcttattccaggatcagtaatataccacaaacagtcacaaatactattggtttattgcaaggatggttggattggtgttcgatcagtgatgctcaagaaatcactaacagctactgacttctacaatggatatttgcacccctggtaccagaaaaattcccaagctcaaccaagccaatgcagatttcagactctcagacttccaacaaagaagaagcagaaaaaaactgttgctatgcaacaatgcattgagtagttaggaagaagatggataaaaacctattacatatttgtaatttattaaaaaccttatttacaaggaattatctggacttttttttttttttttttttttgagacagagtctcactctgtcacccaggctggaatccagtggcactatctcagctcactgcaacctccgcctcccaggttcaagcaattctcctgcctcagcctcctgatgctatgattacagacgtgagccaccgtgcctggcctggaattatctggactttcaaagaagatggcattattataagaagagaagattattgccgaaaagatggattgcctcactttccactttttatgtaacagtagtt

SEQ ID NO: 154340 - DNA, 1111 bp, Homo sapiens
  Payload ID: 10328
  Gene Symbol: MTFMT
  Gene Name: mitochondrial methionyl-tRNA formyltransferase
  ENST ID: ENST00000560717
  CDS Start-End: 1-405
cggcgctgttggggtcctccgctggctcatggcgccaggcgtgggaggccgagtccccagtggcgagcactggcccgactcggctgggaggactgccgggactccagagtccgcgagaagcctccctggcgggtgctcttcttcggcacggaccagttcgcccgcgaggcgctgcgggcgctgcacgccgccagggaaaacaaagaagaagagttaatcgacaaactggaggtggtcacaatgccttccccatcaccaaaaggactgccagtgaagcaatatgctgtgcagtctcagcttcccgtatatgagtggccggatgtgggatctggagaatatgatgttggagtagtggcttcgtttggccgacttttgaatgaggctcttattcttaaatttccctagtaagttttatttgtttgatgtaggcccaattctcaaacaagaaactgttcctgtgccacccaagagcactgcaaaggaattggaagcagtgttgtcaagactgggtgccaacatgctcatttcagttttgaaaaatttgcctgaaagtctgagcaatggaaggcagcagccaatggagggggcgacttacgcccctaagatttctgctggtaccagttgtataaaatgggaggaacaaacttcagaacaaatattcagactttaccgtgccattggaaatataattccgttgcagacgctctggatggcgaataccattaaacttctggatttggtagaagttaacagttcagtccttgctgatccaaaattaacgggacaggctcttattccaggatcagtaatataccacaaacagtcacaaatactattggtttattgcaaggatggttggattggtgttcgatcagtgatgctcaagaaatcactaacagctactgacttctacaatggatatttgcacccctggtaccagaaaaattcccaagctcaaccaagccaatgcagatttcagactctcagacttccaacaaagaagaagcagaaaaaaactgttgctatgcaacaatgcattgagtagttaggaagaagatggataaaaacctattacatatttgtaatttattaaaaaccttatttacaagga

SEQ ID NO: 154341 - DNA, 5601 bp, Homo sapiens
  Payload ID: 10329
  Gene Symbol: MTPAP
  Gene Name: mitochondrial poly(A) polymerase
  Uniprot ID: Q9NVV4
  ENST ID: ENST00000263063
  CDS Start-End: 45-1793
agcttcgcgctagtgctgttttttttttttttttttttttagcaatggcggttcccggcgtggggctcttgacccgtttgaacctgtgtgcccggagaagaactcgagtccagcggcctatcgtcaggcttttgagttgcccaggaactgtggccaaagaccttaggagagacgagcagccttcagggagcgtggagacaggctttgaagacaagattcccaaaaggagattctctgagatgcaaaatgaaagacgagaacaggcacagcggactgttttaatacattgcccagagaaaatcagtgaaaacaagtttcttaaatatttatcccaatttggacctattaataatcatttcttctatgaaagctttggtctctatgctgtcgtagaattttgccaaaaggaaagcataggttcactgcagaatgggactcatactccaagcacggccatggagactgcaattccattcagatcacgtttcttcaatctgaagttgaaaaaccagacttctgaacggtcacgcgtacggtcaagtaatcagttgccacgttcaaacaagcagctttttgaattactttgttatgcagaaagtatagacgatcagctgaacactctcttgaaggagttccagctaacagaggagaacactaagctccgatatctcacctgttctcttattgaagacatggccgccgcgtattttccagactgcatagtcagaccctttggctcctcagtcaacacttttgggaagttaggatgtgatttggacatgtttttggatctagatgaaaccagaaacctcagcgctcacaagatctcaggaaattttctgatggaatttcaagtgaaaaatgttccttcagaaagaattgcaactcagaagatcctgtctgtgttaggagagtgccttgaccactttggccctggctgtgtgggtgtgcaaaaaatattaaatgcccggtgtccgctcgtgaggttctcacaccaggcctccggatttcagtgtgatttgactacgaacaataggattgccttgacaagttccgaactcctttatatatatggtgccctagactcaagagtgagagccttggtgttcagtgtacggtgctgggctcgagcacattcactaacaagtagtattcctggtgcatggattacaaatttctcccttacaatgatggtcatcttttttctccagagaagatcaccccctattcttccaacactagattccttaaaaaccctagcagatgcagaagataaatgtgtaatagaaggcaacaactgcacatttgttcgtgacttgagtagaattaaaccttcacagaacacagaaacattagaattactactgaaggaattttttgagtattttggcaattttgctttcgataaaaattccataaatattcgacagggaagggagcaaaacaaacctgattcttctcctctgtacattcagaatccatttgaaacttctctcaacataagcaaaaatgtaagtcaaagccagctgcaaaaatttgtagatttggcccgagaaagtgcctggattttacaacaggaagatacagatcgaccttccatatcaagtaatcggccctgggggctggtatccctattgctaccatctgctccaaacagaaagtcctttaccaagaagaaaagcaataagtttgcaattgaaacagtcaaaaacttgctagaatctttaaaaggtaacagaacagaaaatttcacaaaaaccagtgggaagagaacaattagtactcagacatgatggctgctacattgtgtaaagaactgggcttagcctatcaaatggtctgtggacttacttggaaaaactgatttgaaactttcacagatctcagctttcatctgatgtcacttttcatgatcttctcattggcccccttaacctggtctgaagttctgggatgttttcagtttgatcagtctgatactcagtggcactttattaaaacatcagctgtggagtgtggcggtgcacacctgtagtcccagctgctcaggaggctgaggcaggaggatctcttgagcccaggattttgaatccatcgtggacaacatagcaagattccatctctaaaaaaaatgaaaataaacataagccacaaggaatgggtgaaagattattgtaatgtgctttaactaaataggtaaatatactaaacaaatgctaaaactcagttttaggatgaaaccattgttgatatccacatcagtccctgtttagaaaacatttaaaatgacttttagttatgtacagtacgttggcaatgaatacattaagcttcaaaatttggtagtgctctcgaatatgtatatttgtatttttcaagcgaagttctcttattcacatataaattaaagtgggttggtactgatatcaaaaaatgtttatgtttttagaacagacatttcagtcactgcattcttaggtattccaaaccaaatatgatgacatcaatagattgcattttaaaaatattgtttgatttttctattttcaaaaataaaattctgtttctaactaaaatgtgatattcccagtattccttcacatctcttttgagaactcccctcttcctgcaggaaagagacatatttgtctctcagtatatgcagaaaattggttccaggaccatccacgtacacccagatctgcacacactgaactccttcagtcctgtggagcccgtgcatgggagaattccaccttgcacataagcagattttgcatcctgtgaaagtactgtattttctttctttcttttttttttttttttttttttgagacagagtctcgctctgtcgcccaggctagagtgcagtggcgcaatctcggctcactgcaagctctgcctcccaggttcacgccattctcctgcctcagcctctctgagtagctgggactataggtgcccgccaccacgcccggacaatttttttgtatttttagtagagacagggtttcaccatggtctcgatctcccgacctcgtgatcagcccacctcaacctcccaaagtgctgggattacaagcgtgagccaccatgcctggccgagaatactgtattttcaatccaagtttggttggaaaaaatctgtgtgtaaatggacttcgcagttgaaacccatgttgttcaatgggcaactgtatattgaaatttaatttccattacattctctgtggagcaacttttttgctttgtttcgttttgtttctgagacggagttttgctcttgttgcccaggctggggtgcaatggcacaatctcagctcactgcaacctccgcctcccggattcaagtgattctcctgcctcagctgggattacaggcgcccaccaccaagcccagctaatttttgtagttttagtagggacagggtttcaccatgttggccaggctgatctcgaactcctgacctcaggtgatcgcccaccttggccttccaaagtgttggaattacaggcgtgagccactgcacctggcttctgtggagtaactttctatttaagaagcaagtaaggcctgggcatagcggcacatgcctgtagtcccaggtacttgggaggccgaggcacaaggactgcttgaacctgggaggcagaggctgcagtgagctgagatcacagcactgtactccatcctgggcgacagtgagactctctcaaaggaaaagaagcaagtagtatagtgtttaaaaacagacttgagcgagactggctcaatgacaagttactcagtctcttggggcccctgtttgatctgtaaaatggggatcatgatcagatcaatgtgaggattaagcgagggatgtaggaaaatgctaggtcagtgcattttcctggcgcgaagtaaatgttacttctctttaactgttgcctttcggtgtttgtggtatgtaattaccttttttgctactcaaaattcagatttagagtttgtagtactttaaaaatttttcccatttaaattttatgtcagaaattataatgggttctgcatgggatattttaagaaactcagcattgttatgaagcaaatgaattctgtgtccttgtgtctgtgctattggattgcacatttgacaccaacaaatatcagtgttctgtacaggcgatgtctttaaaagccatttttcatttgttctttattttgttgggctagaaatccatattgatttaaaaagcttaaaaagcataaaccacttaagggtttctaaatgaaatttttttttctgttcacagatatttagtcagatattttcttttttaggttggtgctaggtgtaatatggttatttaagcacataaagtatgtgtatgggttagcattttcttttctttttggtaatttgtaggacagccttgacactaggctgttttacttttcagaatcagatttaattatgtgattaattttaaatctacaaagacttgttttttgtttttttttttgagagcaaatcttgctctgtcacccaggctagactgcagtggtgcgatctcggctcactgcaacctctgcctcctgggttcaagcgatactcctgccccagcctcccaagtaactgggattacaggcgcctgccaccatgcctagctaatttttgtatgttagtagagacggggtttcaccatgttggccaggctggtcttgaattcctgacctcaagtgatctacctgtctcagcctctcaaagtgctgggattacaggttacaggtgtgagccaccgcacctggcctacaaagacccttttttttttttttttttgagatgggtctccctctgtcacccaggctggagagtgcagtgatcttggctcactgaaacctccacttcccgggttcaggtgattcttctgcctcagcctcctgagtagctgggattacaggtgcatgccaccacacctggctaagttttctatttttagtagagatggggttttactctgttggccaggctggtctcgaactcctgacctcaggtgacctgcccacctcgccctcccaaaatgctgggattacaggcatgagccaccacgcctggctgcaaagaccttttaatacacagttttaaagtctgttcaactgaatatagactacagacaaatatattttctcataactttagtgtatcacaacccagatttttaaaatatttttattacgtgatagtgataactagcaattatttgtcattgctgtttcttaattaaaaataattgcaatgttaagtaaaacttttttcaagtttttttcttctataactattactaggctttcattcagtagctttcacctgtaatgagttttactaagtatgtgaaagtaattttgataggagactacccagatcaaaacgatttcagctatagcccactagtataattcctggagctattatccatctttagaaaatttgagaattagccagagactttctaggaaataacgattagcctgaaacgttataggaaaactgtgtgtaattatctcattcaccttcagttaccataaaggagaagggaaaataaagttgagttgaaataaga

SEQ ID NO: 154342 - DNA, 695 bp, Homo sapiens
  Payload ID: 10329
  Gene Symbol: MTPAP
  Gene Name: mitochondrial poly(A) polymerase
  ENST ID: ENST00000421701
  CDS Start-End: 1-453
gaccttaggagagacgagcagccttcagggagcgtggagacaggctttgaagacaagattcccaaaaggagattctctgagatgcaaaatgaaagacgagaacaggcacagcggactgttttaatacattgcccagagaaaatcagtgaaaacaagtttcttaaatatttatcccaatttggacctattaataatcatttcttctatgaaagctttggtctctatgctgtcgtagaattttgccaaaaggaaagcataggttcactgcagaatgggactcatactccaagcacggccatggagactgcaattccattcagatcacgtttcttcaatctgaagttgaaaaaccagacttctgaacggtcacgcgtacggtcaagtaatcagttgccacgttcaaacaagcagctttttgaattactttgttatgcagaaagtgtaagtttttaggtgtacctcaacttttagaactatgtatttttttatgaacaataaagattcctgtaaaatgttcaagctacattattgtttaatgggtatagatcttcagttttacaaggtgaaaagagttacggagatgaatcgtggtggtggatgcataatgagatgaaggaaagtttttttctatttctagctttctaagaatgtcgtcatgctcaacacattgagtagatgttgagttttgacatttg

SEQ ID NO: 154343 - DNA, 816 bp, Homo sapiens
  Payload ID: 10329
  Gene Symbol: MTPAP
  Gene Name: mitochondrial poly(A) polymerase
  ENST ID: ENST00000417581
  CDS Start-End: 160-816
gatctctgtaggggaacccagggtcgccgccgttgctgaggcagaagtgagatgtgtgatgtttgtttggggcgactcctgtgtacagtaatggagttgtttagacttccatgaaattcaggctttgaagacaagattcccaaaaggagattctctgagatgcaaaatgaaagacgagaacaggcacagcggactgttttaatacattgcccagagaaaatcagtgaaaacaagtttcttaaatatttatcccaatttggacctattaataatcatttcttctatgaaagctttggtctctatgctgtcgtagaattttgccaaaaggaaagcataggttcactgcagaatgggactcatactccaagcacggccatggagactgcaattccattcagatcacgtttcttcaatctgaagttgaaaaaccagacttctgaacggtcacgcgtacggtcaagtaatcagttgccacgttcaaacaagcagctttttgaattactttgttatgcagaaagtatagacgatcagctgaacactctcttgaaggagttccagctaacagaggagaacactaagctccgatatctcacctgttctcttattgaagacatggccgccgcgtattttccagactgcatagtcagaccctttggctcctcagtcaacacttttgggaagttaggatgtgatttggacatgtttttggatctagatgaaaccagaaacctcagcgctcacaagatctcaggaaattttctgatggaatttcaagtgaaaaatgttccttcagaaagaattgcaactcagaagatc

SEQ ID NO: 154344 - DNA, 976 bp, Homo sapiens
  Payload ID: 10330
  Gene Symbol: MPC1
  Gene Name: mitochondrial pyruvate carrier 1
  ENST ID: ENST00000341756
  CDS Start-End: 266-466
aaggcgtggccgggtgtcgtgaggcgggccttcgggctggctcgccgtcggctgccggggggttggccggggtgtcattggctctgggaagcggcagcagaggcagggaccactcggggtctggtgtcggcacagccatggcgggcgcgttggtgcggaaagcggcggactatgtccgaagcaaggatttccgggactacctcatgagtagcacttctggggcccagtagccaactggggtcttcccattgctgccatcaatgatatgaaaaagtctccagagattatcagtgggcggatgacatttgccctctgttgctattctttgacattcatgagatttgcctacaaggtacagcctcggaactggcttctgtttgcatgccacgcaacaaatgaagtagcccagctcatccagggagggcggcttatcaaacacgagatgactaaaacggcatctgcataacaatggaaaaggaagaacaaggtcttgaagggacagcattgccagctgctgctgagtcacagatttcattataaatagcctccctaaggaaaatacactgaatgctatttttactaaccattctatttttatagaaatagctgagagtttctaaaccaactctctgctgccttacaagtattaaatattttacttctttccataaagagtagctcaaaatatgcaattaatttaataatttctgatgatggttttatctgcagtaatatgtatatcatctattagaatttacttaatgaaaaactgaagagaacaaaatttgtaaccactagcacttaagtactcctgattcttaacattgtctttaatgaccacaagacaaccaacagctggccacgtacttaaaattttgtccccactgtttaaaaatgttacctgtgtatttccatgcagtgtatatattgagatgctgtaacttaatggcaataaatgatttaaatatttgttaaa

SEQ ID NO: 154345 - DNA, 962 bp, Homo sapiens
  Payload ID: 10330
  Gene Symbol: MPC1
  Gene Name: mitochondrial pyruvate carrier 1
  Uniprot ID: Q9Y5U8
  ENST ID: ENST00000360961
  CDS Start-End: 123-452
gtcgtgaggcgggccttcgggctggctcgccgtcggctgccggggggttggccggggtgtcattggctctgggaagcggcagcagaggcagggaccactcggggtctggtgtcggcacagccatggcgggcgcgttggtgcggaaagcggcggactatgtccgaagcaaggatttccgggactacctcatgagtacgcacttctggggcccagtagccaactggggtcttcccattgctgccatcaatgatatgaaaaagtctccagagattatcagtgggcggatgacatttgccctctgttgctattctttgacattcatgagatttgcctacaaggtacagcctcggaactggcttctgtttgcatgccacgcaacaaatgaagtagcccagctcatccagggagggcggcttatcaaacacgagatgactaaaacggcatctgcataacaatggaaaaggaagaacaaggtcttgaagggacagcattgccagctgctgctgagtcacagatttcattataaatagcctccctaaggaaaatacactgaatgctatttttactaaccattctatttttatagaaatagctgagagtttctaaaccaactctctgctgccttacaagtattaaatattttacttctttccataaagagtagctcaaaatatgcaattaatttaataatttctgatgatggttttatctgcagtaatatgtatatcatctattagaatttacttaatgaaaaactgaagagaacaaaatttgtaaccactagcacttaagtactcctgattcttaacattgtctttaatgaccacaagacaaccaacagctggccacgtacttaaaattttgtccccactgtttaaaaatgttacctgtgtatttccatgcagtgtatatattgagatgctgtaacttaatggcaataaatgatttaaatatttgttaaa

SEQ ID NO: 154346 - DNA, 1192 bp, Homo sapiens
  Payload ID: 10330
  Gene Symbol: MPC1
  Gene Name: mitochondrial pyruvate carrier 1
  ENST ID: ENST00000621685
  CDS Start-End: 482-682
aaggcgtggccgggtgtcgtgaggcgggccttcgggctggctcgccgtcggctgccggggggttggccggggtgtcattggctctgggaagcggcagcagaggcagggaccactcggggtctggtgtcggcacagccatggcgggcgcgttggtgcggaaagcggcggactatgtccgaagcaaggatttccgggactacctcatgagtaggacaatcagagatgacttggttgtagtgtggaaaccagtagggaccttgggaagctgccaaaccctttctagctctgggctcagctgtaagaactgctgattcctacaggaacacttggacaatccaatacctaaatgttaaccatcaattaacccagtaaacctgcaagatggaaacgaagatttgttctcacgagtttcacgtgattatttaaacacttctggggcccagtagccaactggggtcttcccattgctgccatcaatgatatgaaaaagtctccagagattatcagtgggcggatgacatttgccctctgttgctattctttgacattcatgagatttgcctacaaggtacagcctcggaactggcttctgtttgcatgccacgcaacaaatgaagtagcccagctcatccagggagggcggcttatcaaacacgagatgactaaaacggcatctgcataacaatggaaaaggaagaacaaggtcttgaagggacagcattgccagctgctgctgagtcacagatttcattataaatagcctccctaaggaaaatacactgaatgctatttttactaaccattctatttttatagaaatagctgagagtttctaaaccaactctctgctgccttacaagtattaaatattttacttctttccataaagagtagctcaaaatatgcaattaatttaataatttctgatgatggttttatctgcagtaatatgtatatcatctattagaatttacttaatgaaaaactgaagagaacaaaatttgtaaccactagcacttaagtactcctgattcttaacattgtctttaatgaccacaagacaaccaacagctggccacgtacttaaaattttgtccccactgtttaaaaatgttacctgtgtatttccatgcagtgtatatattgagatgctgtaacttaatggcaataaatgatttaaatatttgttaaa

SEQ ID NO: 154347 - DNA, 977 bp, Homo sapiens
  Payload ID: 10330
  Gene Symbol: MPC1
  Gene Name: mitochondrial pyruvate carrier 1
  ENST ID: ENST00000621630
  CDS Start-End: 138-467
aaggcgtggccgggtgtcgtgaggcgggccttcgggctggctcgccgtcggctgccggggggttggccggggtgtcattggctctgggaagcggcagcagaggcagggaccactcggggtctggtgtcggcacagccatggcgggcgcgttggtgcggaaagcggcggactatgtccgaagcaaggatttccgggactacctcatgagaactcacttctggggcccagtagccaactggggtcttcccattgctgccatcaatgatatgaaaaagtctccagagattatcagtgggcggatgacatttgccctctgttgctattctttgacattcatgagatttgcctacaaggtacagcctcggaactggcttctgtttgcatgccacgcaacaaatgaagtagcccagctcatccagggagggcggcttatcaaacacgagatgactaaaacggcatctgcataacaatggaaaaggaagaacaaggtcttgaagggacagcattgccagctgctgctgagtcacagatttcattataaatagcctccctaaggaaaatacactgaatgctatttttactaaccattctatttttatagaaatagctgagagtttctaaaccaactctctgctgccttacaagtattaaatattttacttctttccataaagagtagctcaaaatatgcaattaatttaataatttctgatgatggttttatctgcagtaatatgtatatcatctattagaatttacttaatgaaaaactgaagagaacaaaatttgtaaccactagcacttaagtactcctgattcttaacattgtctttaatgaccacaagacaaccaacagctggccacgtacttaaaattttgtccccactgtttaaaaatgttacctgtgtatttccatgcagtgtatatattgagatgctgtaacttaatggcaataaatgatttaaatatttgttaaa

SEQ ID NO: 154348 - DNA, 798 bp, Homo sapiens
  Payload ID: 10331
  Gene Symbol: MPC2
  Gene Name: mitochondrial pyruvate carrier 2
  Uniprot ID: O95563
  ENST ID: ENST00000271373
  CDS Start-End: 160-543
ctcagcgcctccgccccggggcccccgctcacccaggtagcgactccgcagccgggacgggtcctccagcccgagggaccttttcctcacgtcccacaacagccagggacgagaacacagccacgctcccacccggctgccaacgatccctcggcggcgatgtcggccgccggtgcccgaggcctgcgggccacctaccaccggctcctcgataaagtggagctgatgctgcccgagaaattgaggccgttgtacaaccatccagcaggtcccagaacagttttcttctgggctccaattatgaaatgggggttggtgtgtgctggattggctgatatggccagacctgcagaaaaacttagcacagctcaatctgctgttttgatggctacagggtttatttggtcaagatactcacttgtaattattccaaaaaattggagtctgtttgctgttaatttctttgtgggggcagcaggagcctctcagctttttcgtatttggagatataaccaagaactaaaagctaaagcacacaaataaaagagttcctgatcacctgaacaatctagatgtggacaaaaccattgggacctagtttattatttggttattgataaagcaaagctaactgtgtgtttagaaggcactgtaactggtagctagttcttgattcaatagaaaaatgcagcaaacttttaataacagtctctctacatgacttaaggaacttatctatggatattagtaacatttttctaccatttgtccgtaataaaccatacttgctcgtatata

SEQ ID NO: 154349 - DNA, 2177 bp, Homo sapiens
  Payload ID: 10331
  Gene Symbol: MPC2
  Gene Name: mitochondrial pyruvate carrier 2
  Uniprot ID: O95563
  ENST ID: ENST00000367846
  CDS Start-End: 200-583
cgccccctcaaccttcgcggggcgcgggccgcagcttttcggttcacagcgggcagggaaagccgcgggaagggtactccaggcgagaggcggacgcgagtcgtcgtggcaggaaaagtgactagctccccttcgttgtcagccagggacgagaacacagccacgctcccacccggctgccaacgatccctcggcggcgatgtcggccgccggtgcccgaggcctgcgggccacctaccaccggctcctcgataaagtggagctgatgctgcccgagaaattgaggccgttgtacaaccatccagcaggtcccagaacagttttcttctgggctccaattatgaaatgggggttggtgtgtgctggattggctgatatggccagacctgcagaaaaacttagcacagctcaatctgctgttttgatggctacagggtttatttggtcaagatactcacttgtaattattccaaaaaattggagtctgtttgctgttaatttctttgtgggggcagcaggagcctctcagctttttcgtatttggagatataaccaagaactaaaagctaaagcacacaaataaaagagttcctgatcacctgaacaatctagatgtggacaaaaccattgggacctagtttattatttggttattgataaagcaaagctaactgtgtgtttagaaggcactgtaactggtagctagttcttgattcaatagaaaaatgcagcaaacttttaataacagtctctctacatgacttaaggaacttatctatggatattagtaacatttttctaccatttgtccgtaataaaccatacttgctcgtatataccccctgcctccttctgttccagtcagccaacatatgtacataaaagaacacacaaattcaagaagttggaagattaaattatctgcttatttagtgtaggatggtcaggtagctagctataagtgaaaggaaattttgctgaagagactgagaaatgggtagtggaatgactatcaagatgacctcaaactatttaaaaacattttaacttgccatgaagaatcttgatgatttttgtataaatgttgtataaaattcttttacagctacagatttttaaataggatcattgtaaagattaatgagataatgttttaacatagtgcctggtccatgataagtgttaaatttttcaattaccctcagtaactgataatgtagcagaaaatactctatattcagacagacctgaatttgaatcccagctctatgacttatctgttgtgactttttttttttttttttttttgagacagggtctcgctctgtggcccaggctggagtgcagtggcacaatctcggctcactgcaaaccctacctcctgggctcaagtgatcctcctgcctcagcctcccgagcagctgggactacaggcacacaccaccacacccagctaatttttgtatttttgtagaggtagggttttgtcatgttgcccaggctggtctcgaactcctgggctcaggtgatctgcccgcctcgtcctgtcaaagtgctggaatacaggcatgagccaccatacccagcctatgctgtgactttagacaagttaggaaagtacctagcagagtacctgggacataagtaggttttctgtaaatgtttgtgacctttggctccgttgtgaggagagactgagcatacattactccacgctacaaataattaactatctatttgatttgactttcagtgtggagtgcagagctttttttctaaaagtgctaataaagccagtcctcattaaaaatatagtcagatgagtcagcaaagcaagttatttcaaaatttgaagaaatgagacaaaacaactttttgagtaatactataacctatgaaaatttggcagttagcaattgaaaaccttgtactttatcatctgtcccttaaccatggcctaccattgaggagaaaagattagagagcttgacataggccacaatgaagaggttctgaagagtcaaactattattgctttcatttcataaaccacactgttaaattcatttgtgtgtttggcatgggtgtgcacacatgtgtttcctaggttaagcatttaggaaaaacattatgaaatatgacatagacacaaaaaagtttattaaaaatttatgtga

SEQ ID NO: 154350 - DNA, 645 bp, Homo sapiens
  Payload ID: 10331
  Gene Symbol: MPC2
  Gene Name: mitochondrial pyruvate carrier 2
  ENST ID: ENST00000458574
  CDS Start-End: 331-645
ccgggcctccagggcgcagcgttagatggcggtggcagcagcggcgcctgggcccctgaagcccggccgcacccgggccggagctcgcctcatactctccttcttagactaaccagaacatccaaagatcagcaacagtctcctccctcagcccccctccaacaggaggaggcggaggcggaggcgatggcgactcctccctctcctcgtcctggataccctccccgccaaccctttctcgcgagatgacgaccaccctggggactgaggctgccagggacgagaacacagccacgctcccacccggctgccaacgatccctcggcggcgatgtcggccgccggtgcccgaggcctgcgggccacctaccaccggctcctcgataaagtggagctgatgctgcccgagaaattgaggccgttgtacaaccatccagcaggtcccagaacagttttcttctgggctccaattatgaaatgggggttggtgtgtgctggattggctgatatggccagacctgcagaaaaacttagcacagctcaatctgctgttttgatggctacagggtttatttggtcaagatactcacttgtaattattccaaaaaattggagtctgtttgctgttaatttctttgtgggggca

SEQ ID NO: 154351 - DNA, 1490 bp, Homo sapiens
  Payload ID: 10332
  Gene Symbol: MRPL1
  Gene Name: mitochondrial ribosomal protein L1
  Uniprot ID: Q9BYD6
  ENST ID: ENST00000315567
  CDS Start-End: 330-1307
gtcgctctgagtacacttgcaggatcaaaaaagaaaaagaataagaaggaaggattaaaataatcacagcatcgccaacaggatcgtattttcccgaaggtggttaaccagccataccggaaccacgaaacacacagggtcctgggcaacacggaggactaacagtaacaccgccacgccggcagcaaagctcattttggtccccgccccgttcctctttctctttttaactccttccctctttgcggattctagaacggaacctttttttaattcttcccagtagaaacgtaggaacaatttcgtgaacgcaatccggagtgcccaacatggcggcggccgtaaggtgcatgggtagagccttgatacatcatcaaaggcatagcctttccaagatggtttatcagacatcactttgttcttgttctgtaaacatccgagtgcccaacagacattttgctgctgctacaaagtctgcaaagaaaacaaaaaaaggtgctaaagaaaaaacaccagatgagaaaaaagatgaaatagaaaaaataaaagcatatccctatatggaaggcgaacctgaggatgatgtctatttaaaacgcttatacccgagacagatatatgaggtggagaaagctgttcacttacttaagaaatttcaaattcttgactttactagtccaaagcaaagtgtttatcttgatttgacactggatatggcactgggaaagaagaaaaacgtggagccatttaccagtgttcttagtttgccatacccatttgcttccgaaatcaataaagttgctgtatttacagagaatgcatcagaggtcaaaatagcggaagaaaatggagctgcatttgcaggaggcactagtctgatacagaagatttgggatgatgaaattgttgcagacttttacgtagctgttccagaaataatgcctgaacttaatcgattaaggaagaaactgaataaaaaatatccaaagctttctcgaaattccattggccgtgacatccccaaaatgcttgaattatttaaaaatggacatgaaattaaggtagatgaagaaagggagaactttctccagaccaaaatagcaacattggatatgtcaagtgaccagatagctgccaatctgcaagcagttattaatgaagtttgtaggcacagaccgctgaatttgggtccctttgtggtacgtgctttccttcgtagttcaacaagtgaaggtttattactgaagattgatccattgttgcctaaagaagtaaaaaatgaagaaagtgaaaaagaagatgcctaaatgtggtgaattgtgaaattactttcagtggtttaagaagcaatggagaaaatgataatacagcataatttttacatttgatgtcttgttattgatcatacttgaaagtgaactttaacattgaaaaatcgtacagtcatttcaagaataagaaaataaaattttctctttgtctgaacctgc

SEQ ID NO: 154352 - DNA, 898 bp, Homo sapiens
  Payload ID: 10332
  Gene Symbol: MRPL1
  Gene Name: mitochondrial ribosomal protein L1
  ENST ID: ENST00000502384
  CDS Start-End: 1-694
aaggtctgcaaagaaaacaaaaaaaggtgctaaagaaaaaacaccagatgagaaaaaagatgaaatagaaaaaataaaagcatatccctatatggaaggcgaacctgaggatgatgtctatttaaaacgcttatacccgagacagatatatgaggtggagaaagctgttcacttacttaagaaatttcaaattcttgactttactagtccaaagcaaagtgtttatcttgatttgacactggatatggcactgggaaagaagaaaaacgtggagccatttaccagtgttcttagtttgccatacccatttgcttccgaaatcaataaagttgctgtatttacagagaatgcatcagaggtcaaaatagcggaagaaaatggagctgcatttgcaggaggcactagtctgatacagaagatttgggatgatgaaattgttgcagacttttacgtagctgttccagaaataatgcctgaacttaatcgattaaggaagaaactgaataaaaaatatccaaagctttctcgaaattccattggccgtgacatccccaaaatgcttgaattatttaaaaatggacatgaaattaaggtagatgaagaaagggagaactttctccagaccaaaatagcaacagtccctttgtggtacgtgctttccttcgtagttcaacaagtgaaggtttattactgaagattgatccattgttgcctaaagaagtaaaaaatgaagaaagtgaaaaagaagatgcctaaatgtggtgaattgtgaaattactttcagtggtttaagaagcaatggagaaaatgataatacagcataatttttacatttgatgtcttgttattgatcatacttgaaagtgaactttaacattgaaaaatcgtacagtcattt

SEQ ID NO: 154353 - DNA, 2013 bp, Homo sapiens
  Payload ID: 10333
  Gene Symbol: MRPL10
  Gene Name: mitochondrial ribosomal protein L10
  Uniprot ID: Q7Z7H8
  ENST ID: ENST00000290208
  CDS Start-End: 454-1269
caagtgagctgcccaccttggcctcccaaagtgttgggattacaggcgtgagccaccacacccagcaaaatttctaacaagctctcaaatgatgctgatgttgctggttggggtggaggtggggcataccttgagagccactagattagaccaggggttggcgtattatggcagggccagtcactgtgttttataaaattctattggtacatagtttctgctgtctctttaaatattgtctgtggctgcttttggcagagttgagcattagagacagattacatgggccccaaacttaaaatatttactgtttgaccattttaagaaaaagtttatttaaccttatcccctttttctttctctctctctctctctctttccttccttccttccttccttctttttttttctgagacggagtcttactctgtgcccaggctagagtgcagtggcatgatctcggctcactgcaacctccacctcccgggttcaagcgattctcctgcctcagcctctcaagtagctgggattacaggccggctgcctaccctccagactgtccgctatggctccaaggctgttacccgccaccgtcgtgtgatgcactttcagcggcagaagctgatggctgtgactgaatatatccccccgaaaccagccatccacccatcatgcctgccatctcctcccagccccccacaggaggagataggcctcatcaggcttctccgccgggagatagcagcagttttccaggacaaccgaatgatagccgtctgccagaatgtggctctgagtgcagaggacaagcttcttatgcgacaccagctgcggaaacacaagatcctgatgaaggtcttccccaaccaggtcctgaagcccttcctggaggattccaagtaccaaaatctgctgcccctttttgtggggcacaacatgctgctggtcagtgaagagcccaaggtcaaggagatggtacggatcttaaggactgtgccattcctgccgctgctaggtggctgcattgatgacaccatcctcagcaggcagggctttatcaactactccaagctccccagcctgcccctggtgcagggggagcttgtaggaggcctcacctgcctcacagcccagacccactccctgctccagcaccagcccctccagctgaccaccctgttggaccagtacatcagagagcaacgcgagaaggattctgtcatgtcggccaatgggaagccagatcctgacactgttccggactcgtagccagcctgtttagccagccctgcgcataaatacactctgcgttattggctgtgctctcctcaatgggacatgtggaagaacttggggtcggggagtgtgtttgtcacttggttttcactagtaatgatattgtcaggtatagggccacttggagatgcagaggattccatttcagatgtcagtcaccggcttcgtccttagttttcccaacttgggacgtgataggagcaaagtctctccattctccaggtccaaggcagagatcctgaaaagatagggctattgtcccctgcctccttggtcactgcctcttgctgcacgggctcctgagcccacccccttggggcacaacctgccactgccacagtagctcaaccaagcagttgtgctgagaatggcacctggtgagagcctgctgtgtgccaggctttgtgctgagtgctgtacatgtattagttcctttactgctgaccacattgtacccatttcacagagaaggagcagagaaattaagtggcttgctcaaggtcatgcagttagtaagtggcagaacagggacttgaaccaagccctctgctctgaagaccgcgtcctgaatttcttcactagagcttcctcatcaggttacccagaagtgggtcccatccaccatccaggtgtgcttggatgttagttctccaccctcgaggtgtacgctgtgaaaagtttgggagcactgctttataataaaatgaaatatattct

SEQ ID NO: 154354 - DNA, 1725 bp, Homo sapiens
  Payload ID: 10333
  Gene Symbol: MRPL10
  Gene Name: mitochondrial ribosomal protein L10
  Uniprot ID: Q7Z7H8
  ENST ID: ENST00000351111
  CDS Start-End: 7-792
gtggagatggctgcggccgtggcggggatgctgcgagggggtctcctgccccaggcgggccggctgcctaccctccagactgtccgctatggctccaaggctgttacccgccaccgtcgtgtgatgcactttcagcggcagaagctgatggctgtgactgaatatatccccccgaaaccagccatccacccatcatgcctgccatctcctcccagccccccacaggaggagataggcctcatcaggcttctccgccgggagatagcagcagttttccaggacaaccgaatgatagccgtctgccagaatgtggctctgagtgcagaggacaagcttcttatgcgacaccagctgcggaaacacaagatcctgatgaaggtcttccccaaccaggtcctgaagcccttcctggaggattccaagtaccaaaatctgctgcccctttttgtggggcacaacatgctgctggtcagtgaagagcccaaggtcaaggagatggtacggatcttaaggactgtgccattcctgccgctgctaggtggctgcattgatgacaccatcctcagcaggcagggctttatcaactactccaagctccccagcctgcccctggtgcagggggagcttgtaggaggcctcacctgcctcacagcccagacccactccctgctccagcaccagcccctccagctgaccaccctgttggaccagtacatcagagagcaacgcgagaaggattctgtcatgtcggccaatgggaagccagatcctgacactgttccggactcgtagccagcctgtttagccagccctgcgcataaatacactctgcgttattggctgtgctctcctcaatgggacatgtggaagaacttggggtcggggagtgtgtttgtcacttggttttcactagtaatgatattgtcaggtatagggccacttggagatgcagaggattccatttcagatgtcagtcaccggcttcgtccttagttttcccaacttgggacgtgataggagcaaagtctctccattctccaggtccaaggcagagatcctgaaaagatagggctattgtcccctgcctccttggtcactgcctcttgctgcacgggctcctgagcccacccccttggggcacaacctgccactgccacagtagctcaaccaagcagttgtgctgagaatggcacctggtgagagcctgctgtgtgccaggctttgtgctgagtgctgtacatgtattagttcctttactgctgaccacattgtacccatttcacagagaaggagcagagaaattaagtggcttgctcaaggtcatgcagttagtaagtggcagaacagggacttgaaccaagccctctgctctgaagaccgcgtcctgaatttcttcactagagcttcctcatcaggttacccagaagtgggtcccatccaccatccaggtgtgcttggatgttagttctccaccctcgaggtgtacgctgtgaaaagtttgggagcactgctttataataaaatgaaatatattctacttcctttattttgtggtttacacggttgtcctccctctaaacttactctcaggggcttctctgtcatctgactttcctcactcttgcttcccttcctaggaaaatcctcttcccctatacctgttcccacaaatggcatcccgcgcatgcttgccctattaaaggcagctgacagctgtacccacta

SEQ ID NO: 154355 - DNA, 612 bp, Homo sapiens
  Payload ID: 10333
  Gene Symbol: MRPL10
  Gene Name: mitochondrial ribosomal protein L10
  ENST ID: ENST00000423147
  CDS Start-End: 13-159
cttccggtggagatggctgcggccgtggcggggatgctgcgagggggtctcctgccccaggcgggtaaggagtggcccaggtcctcacggcgtgtcttgcggccgctctctagtcctcatctgccctcctctactactgattcttcccataatctctgaccccagctagatcgctggcctccttaccccgtccagttccttgtgactcgactggctagagtgcagtggcatgatctcggctcactgcaacctccacctcccgggttcaagcgattctcctgcctcagcctctcaagtagctgggattacaggccggctgcctaccctccagactgtccgctatggctccaaggctgttacccgccaccgtcgtgtgatgcactttcagcggcagaagctgatggctgtgactgaatatatccccccgaaaccagccatccacccatcatgcctgccatctcctcccagccccccacaggaggagataggcctcatcaggcttctccgccgggagatagcagcagttttccaggacaaccgaatgatagccgtctgccagaatgtggctctgagtgcagaggacaagcttcttatgcgacaccagctgcggaa

SEQ ID NO: 154356 - DNA, 1622 bp, Homo sapiens
  Payload ID: 10333
  Gene Symbol: MRPL10
  Gene Name: mitochondrial ribosomal protein L10
  Uniprot ID: Q7Z7H8
  ENST ID: ENST00000414011
  CDS Start-End: 92-907
ttccgtccattcttccggtggagatggctgcggccgtggcggggatgctgcgagggggtctcctgccccaggcgggctagagtgcagtggcatgatctcggctcactgcaacctccacctcccgggttcaagcgattctcctgcctcagcctctcaagtagctgggattacaggccggctgcctaccctccagactgtccgctatggctccaaggctgttacccgccaccgtcgtgtgatgcactttcagcggcagaagctgatggctgtgactgaatatatccccccgaaaccagccatccacccatcatgcctgccatctcctcccagccccccacaggaggagataggcctcatcaggcttctccgccgggagatagcagcagttttccaggacaaccgaatgatagccgtctgccagaatgtggctctgagtgcagaggacaagcttcttatgcgacaccagctgcggaaacacaagatcctgatgaaggtcttccccaaccaggtcctgaagcccttcctggaggattccaagtaccaaaatctgctgcccctttttgtggggcacaacatgctgctggtcagtgaagagcccaaggtcaaggagatggtacggatcttaaggactgtgccattcctgccgctgctaggtggctgcattgatgacaccatcctcagcaggcagggctttatcaactactccaagctccccagcctgcccctggtgcagggggagcttgtaggaggcctcacctgcctcacagcccagacccactccctgctccagcaccagcccctccagctgaccaccctgttggaccagtacatcagagagcaacgcgagaaggattctgtcatgtcggccaatgggaagccagatcctgacactgttccggactcgtagccagcctgtttagccagccctgcgcataaatacactctgcgttattggctgtgctctcctcaatgggacatgtggaagaacttggggtcggggagtgtgtttgtcacttggttttcactagtaatgatattgtcaggtatagggccacttggagatgcagaggattccatttcagatgtcagtcaccggcttcgtccttagttttcccaacttgggacgtgataggagcaaagtctctccattctccaggtccaaggcagagatcctgaaaagatagggctattgtcccctgcctccttggtcactgcctcttgctgcacgggctcctgagcccacccccttggggcacaacctgccactgccacagtagctcaaccaagcagttgtgctgagaatggcacctggtgagagcctgctgtgtgccaggctttgtgctgagtgctgtacatgtattagttcctttactgctgaccacattgtacccatttcacagagaaggagcagagaaattaagtggcttgctcaaggtcatgcagttagtaagtggcagaacagggacttgaaccaagccctctgctctgaagaccgcgtcctgaatttcttcactagagcttcctcatcaggttacccagaagtgggtcccatccaccatccaggtgtgcttggatgttagttctccaccctcgaggtgtacgctgtgaaaagtttgggagca

SEQ ID NO: 154357 - DNA, 1576 bp, Homo sapiens
  Payload ID: 10333
  Gene Symbol: MRPL10
  Gene Name: mitochondrial ribosomal protein L10
  ENST ID: ENST00000421763
  CDS Start-End: 20-166
gtccattcttccggtggagatggctgcggccgtggcggggatgctgcgagggggtctcctgccccaggcgggtaaggagtggcccaggtcctcacggcgtgtcttgcggccgctctctagtcctcatctgccctcctctactactgattcttcccataatctctgaccccagctagatcgctggcctccttaccccgtccagttccttgtgactcgactggccggctgcctaccctccagactgtccgctatggctccaaggctgttacccgccaccgtcgtgtgatgcactttcagcggcagaagctgatggctgtgactgaatatatccccccgaaaccagccatccacccatcatgcctgccatctcctcccagccccccacaggaggagataggcctcatcaggcttctccgccgggagatagcagcagttttccaggacaaccgaatgatagccgtctgccagaatgtggctctgagtgcagaggacaagcttcttatgcgacaccagctgcggaaacacaagatcctgatgaaggtcttccccaaccaggtcctgaagcccttcctggaggattccaagtaccaaaatctgctgcccctttttgtggggcacaacatgctgctggtcagtgaagagcccaaggtcaaggagatggtacggatcttaaggactgtgccattcctgccgctgctaggtggctgcattgatgacaccatcctcagcaggcagggctttatcaactactccaagctccccagcctgcccctggtgcagggggagcttgtaggaggcctcacctgcctcacagcccagacccactccctgctccagcaccagcccctccagctgaccaccctgttggaccagtacatcagagagcaacgcgagaaggattctgtcatgtcggccaatgggaagccagatcctgacactgttccggactcgtagccagcctgtttagccagccctgcgcataaatacactctgcgttattggctgtgctctcctcaatgggacatgtggaagaacttggggtcggggagtgtgtttgtcacttggttttcactagtaatgatattgtcaggtatagggccacttggagatgcagaggattccatttcagatgtcagtcaccggcttcgtccttagttttcccaacttgggacgtgataggagcaaagtctctccattctccaggtccaaggcagagatcctgaaaagatagggctattgtcccctgcctccttggtcactgcctcttgctgcacgggctcctgagcccacccccttggggcacaacctgccactgccacagtagctcaaccaagcagttgtgctgagaatggcacctggtgagagcctgctgtgtgccaggctttgtgctgagtgctgtacatgtattagttcctttactgctgaccacattgtacccatttcacagagaaggagcagagaaattaagtggcttgctcaaggtcatgcagttagtaagtggcagaacagggacttgaaccaagccctctgctctgaagaccgcgtcctgaatttcttcactagagcttcctcatca

SEQ ID NO: 154358 - DNA, 1605 bp, Homo sapiens
  Payload ID: 10334
  Gene Symbol: MRPL11
  Gene Name: mitochondrial ribosomal protein L11
  Uniprot ID: Q9Y3B7
  ENST ID: ENST00000310999
  CDS Start-End: 95-673
gtgaggacccttgacctctggcccaagatggtggcgcccagagcttcgctcttgctgctcccctgaggtgaactgaagccagcagccccgcatcatgtcaaagctcggccgggccgcccggggcctcaggaagcccgaggtcggcggtgtgatccgggcgatcgtgcgggcaggcctggccatgcccgggcccccactaggcccagtgctgggtcagagaggcgtttccatcaaccagttttgcaaggagttcaatgagaggacaaaggacatcaaggaaggcattcctctgcctaccaagattttagtgaagcctgacaggacatttgaaattaagattggacagcccactgtttcctacttcctgaaggcagcagctgggattgaaaagggggcccggcaaacagggaaagaggtggcaggcctggtgaccttgaagcatgtgtatgagattgcccgcatcaaagctcaggatgaggcatttgccctgcaggatgtacccctgtcgtctgttgtccgctccatcatcgggtctgcccgttctctgggcattcgcgtggtgaaggacctcagttcagaagagcttgcagctttccagaaggaacgagccatcttcctggctgctcagaaggaggcagatttggctgcccaagaagaagctgccaagaagtgacccttgccccaccaactcccagatttcaaaggaggtagttgcaaaagctgtgcccaaggggaggaaggaggtcacaccaatatgatgatggttttcatgactttgaatgatatatttttgtacatctagctgtatcgaggcatcaggcctgaataaacatcctttcttacccactgtcatcttctatcttgggacctcagggaagggaaccagtactggtggtagccaatatgggcagacattaggaaattggggtcttcatactgcttctcagatgtgcaaactgaggttcagccaagcaaagtaacttgcccaggtccttttttttcttttttaagttataattttgttttattgcccaggttctgaattggtgccagaggtaggaatagaacccaggccttctcatttgaaatcctgtgttcttcccctccccagggtgggaactatggttgctagggctgaggtgtattgcttacttcttccatcaaaaatctcttttatctctgaacaacttgccacctctgcagaaacaagtccctgtggagatctcagttcagccccaggcagggttactacatggagtacccagatcccaggggctacttcaggcccttctactaagctcctgaccctggctctgggtcagatgttggctgaacatgaactattgtagggctgacagctacagaccacagaaagagcaaagcttcagtaggttcctgcctgatggagaagtcctcgggaagcccttggccttctatttcctcattgtcctttcagagaagagagcaggagttgggggagaaaggagattcgcatttactgaccatctgttatgtgctagacacttcattttacactgagaaaatatggaaagcatagataaacacctaaaagaaaataaaaacctcatgttatcccaccaccca

SEQ ID NO: 154359 - DNA, 922 bp, Homo sapiens
  Payload ID: 10334
  Gene Symbol: MRPL11
  Gene Name: mitochondrial ribosomal protein L11
  Uniprot ID: Q9Y3B7
  ENST ID: ENST00000329819
  CDS Start-End: 81-626
cctctggcccaagatggtggcgcccagagcttcgctcttgctgctcccctgaggtgaactgaagccagcagccccgcatcatgtcaaagctcggccgggccgcccggggcctcaggaagcccgaggtcggcggtgtgatccgggcgatcgtgcgggcaggcctggccatgcccgggcccccactaggcccagtgctgggtcagagaggcgtttccatcaaccagttttgcaaggagttcaatgagaggacaaaggacatcaaggaaggcattcctctgcctaccaagattttagtgaagcctgacaggacatttgaaattaagattggacagcccactgtttcctacttcctgaaggcagcagctgggattgaaaagggggcccggcaaacagggaaagaggtggcaggcctggtgaccttgaagcatgtgtatgagattgcccgcatcaaagctcaggatgaggcatttgccctgcaggatgtacccctgtcgtctgttgtccgctccatcatcgggtctgcccgttctctgggcattcgcgtggtgaaggaacgttgttctgcaaatgttctaagaaatggaaagatctccatgaaggatccaagtgggagaagttcagtgtgacctgggtctgtcgtcctagagcctcagttcagaagagcttgcagctttccagaaggaacgagccatcttcctggctgctcagaaggaggcagatttggctgcccaagaagaagctgccaagaagtgacccttgccccaccaactcccagatttcaaaggaggtagttgcaaaagctgtgcccaaggggaggaaggaggtcacaccaatatgatgatggttttcatgactttgaatgatatatttttgtacatctagctgtatcgaggcatcaggcctgaataaacatcctttctta

SEQ ID NO: 154360 - DNA, 1527 bp, Homo sapiens
  Payload ID: 10334
  Gene Symbol: MRPL11
  Gene Name: mitochondrial ribosomal protein L11
  Uniprot ID: Q9Y3B7
  ENST ID: ENST00000430466
  CDS Start-End: 95-595
gtgaggacccttgacctctggcccaagatggtggcgcccagagcttcgctcttgctgctcccctgaggtgaactgaagccagcagccccgcatcatgtcaaagctcggccgggccgcccggggcctcaggaagcccgagagaggcgtttccatcaaccagttttgcaaggagttcaatgagaggacaaaggacatcaaggaaggcattcctctgcctaccaagattttagtgaagcctgacaggacatttgaaattaagattggacagcccactgtttcctacttcctgaaggcagcagctgggattgaaaagggggcccggcaaacagggaaagaggtggcaggcctggtgaccttgaagcatgtgtatgagattgcccgcatcaaagctcaggatgaggcatttgccctgcaggatgtacccctgtcgtctgttgtccgctccatcatcgggtctgcccgttctctgggcattcgcgtggtgaaggacctcagttcagaagagcttgcagctttccagaaggaacgagccatcttcctggctgctcagaaggaggcagatttggctgcccaagaagaagctgccaagaagtgacccttgccccaccaactcccagatttcaaaggaggtagttgcaaaagctgtgcccaaggggaggaaggaggtcacaccaatatgatgatggttttcatgactttgaatgatatatttttgtacatctagctgtatcgaggcatcaggcctgaataaacatcctttcttacccactgtcatcttctatcttgggacctcagggaagggaaccagtactggtggtagccaatatgggcagacattaggaaattggggtcttcatactgcttctcagatgtgcaaactgaggttcagccaagcaaagtaacttgcccaggtccttttttttcttttttaagttataattttgttttattgcccaggttctgaattggtgccagaggtaggaatagaacccaggccttctcatttgaaatcctgtgttcttcccctccccagggtgggaactatggttgctagggctgaggtgtattgcttacttcttccatcaaaaatctcttttatctctgaacaacttgccacctctgcagaaacaagtccctgtggagatctcagttcagccccaggcagggttactacatggagtacccagatcccaggggctacttcaggcccttctactaagctcctgaccctggctctgggtcagatgttggctgaacatgaactattgtagggctgacagctacagaccacagaaagagcaaagcttcagtaggttcctgcctgatggagaagtcctcgggaagcccttggccttctatttcctcattgtcctttcagagaagagagcaggagttgggggagaaaggagattcgcatttactgaccatctgttatgtgctagacacttcattttacactgagaaaatatggaaagcatagataaacacctaaaagaaaataaaaacctcatgttatcccaccaccca

SEQ ID NO: 154361 - DNA, 506 bp, Homo sapiens
  Payload ID: 10334
  Gene Symbol: MRPL11
  Gene Name: mitochondrial ribosomal protein L11
  ENST ID: ENST00000528272
  CDS Start-End: 1-192
gagattgcccgcatcaaagctcaggatgaggcatttgccctgcaggatgtacccctgtcgtctgttgtccgctccatcatcgggtctgcccgttctctgggcattcgcgtggtgaaggaacgttgttctgcaaatgttctaagaaatggaaagatctccatgaaggatccaagtgggagaagttcagtgtgacctgggtctgtcgtcctagaggcaagtggagaatgcctcagttcagaagagcttgcagctttccagaaggaacgagccatcttcctggctgctcagaaggaggcagatttggctgcccaagaagaagctgccaagaagtgacccttgccccaccaactcccagatttcaaaggaggtagttgcaaaagctgtgcccaaggggaggaaggaggtcacaccaatatgatgatggttttcatgactttgaatgatatatttttgtacatctagctgtatcgaggcatcaggcctgaataaacatcctttcttaccca

SEQ ID NO: 154362 - DNA, 812 bp, Homo sapiens
  Payload ID: 10334
  Gene Symbol: MRPL11
  Gene Name: mitochondrial ribosomal protein L11
  ENST ID: ENST00000534488
  CDS Start-End: 73-300
ccaagatggtggcgcccagagcttcgctcttgctgctcccctgaggtgaactgaagccagcagccccgcatcatgtcaaagctcggccgggccgcccggggcctcaggaagcccgaggtcggcggtgtgatccgggcgatcgtgcgggcaggcctggccatgcccgggcccccactaggcccagtgctgggtcagagaggcgtttccatcaaccagttttgcaaggagttcaatgagaggacaaaggacatcaaggaaggcattcctctgcctaccaagattttagtgaaggacatttgaaattaagattggacagcccactgtttcctacttcctgaaggcagcagctgggattgaaaagggggcccggcaaacagggaaagaggtggcaggcctggtgaccttgaagcatgtgtatgagattgcccgcatcaaagctcaggatgaggcatttgccctgcaggatgtacccctgtcgtctgttgtccgctccatcatcgggtctgcccgttctctgggcattcgcgtggtgaaggacctcagttcagaagagcttgcagctttccagaaggaacgagccatcttcctggctgctcagaaggaggcagatttggctgcccaagaagaagctgccaagaagtgacccttgccccaccaactcccagatttcaaaggaggtagttgcaaaagctgtgcccaaggggaggaaggaggtcacaccaatatgatgatggttttcatgactttgaatgatatatttttgtacatctagctgtatcgaggcatcaggcctgaataaacatcctttctta

SEQ ID NO: 154363 - DNA, 1028 bp, Homo sapiens
  Payload ID: 10335
  Gene Symbol: MRPL12
  Gene Name: mitochondrial ribosomal protein L12
  Uniprot ID: P52815
  ENST ID: ENST00000333676
  CDS Start-End: 146-742
cggctagagcgtcatttccggctcgaatgcccggcagccgtggcggctagagcgttcctccccagctcgaatgcccggcggccgaggcggctagagcgtcgcctcctcccggggaaccgcgtgtgaccttccagcccgcggaccgatgctgccggcggccgctcgccccctgtgggggccttgccttgggcttcgggccgctgcgttccgccttgccaggcgacaggtgccatgtgtctgtgccgtgcgacatatgaggagcagcggccatcagaggtgtgaggccctcgctggtgcacccctggataacgcccccaaggagtacccccccaagatacagcagctggtccaggacatcgccagcctcactctcttggaaatctcagacctcaacgagctcctgaagaaaacgttgaagatccaggatgtcgggcttgtgccgatgggtggtgtgatgtctggggctgtccctgctgcagcagcccaggaggcggtggaagaagatatccccatagcgaaagaacggacacatttcaccgtccgcctgaccgaggcgaagcccgtggacaaagtgaagctgatcaaggaaatcaagaactacatccaaggcatcaacctcgtccaggcaaagaagctggtggagtccctgccccaggaaatcaaagccaatgtcgccaaagctgaggcggagaagatcaaggcggccctggaggcggtgggcggcaccgtggttctggagtagcctccagctcggaggacttgtgttcaggggtcctgggccccgggcgaggtcccgccctcccgtggtcactggctccgcccccagcaccaggcgcccagtggagccgtttgggagaattgcctgcgccacgcagcggggccggacaggccgcacagacctactgtggcgggagggaggggcggctgctgcctggtgacggcacccggaggcccaccaggacgcgccaccggtgaatgtgcctctggtggctgctgagaaaaatacactgtgcagctcagtgtgtgga

SEQ ID NO: 154364 - DNA, 885 bp, Homo sapiens
  Payload ID: 10335
  Gene Symbol: MRPL12
  Gene Name: mitochondrial ribosomal protein L12
  ENST ID: ENST00000541223
  CDS Start-End: 15-551
cagcccgcggaccgatgctgccggcggccgctcgccccctgtgggggccttgccttgggcttcgggccgctgcgttccgccttgccaggcgacaggtgccatgtgtctgtgccgtgcgacatatgaggagcagcggccatcagaggtgtgaggccctcgctggtgcacccctggataacgcccccaaggagtacccccccaagatacagcagctggtccaggacatcgccagcctcactctcttggaaatctcagacctcaacgagctcctgaagaaaacgttgaagatccaggatgtcgggcttgtgccgatgggtggtgtgatgtctggggctgtccctgctgcagcagcccaggaggcggtggaagaagatatccccatagcgaaagaacggacacatttcaccgtccgcctgaccgaggcgaagcccgtggacaaagtgaagctgatcaaggaaatcaagaactacatcaaggcatcaacctcgtccaggcaaagaagctggtggagtccctgcccaggaaatcaaagccaatgtcgccaaagctgaggcggagaagatcaaggcggccctggaggcggtgggcggcaccgtggttctggagtagcctccagctcggaggacttgtgttcaggggtcctgggccccgggcgaggtcccgccctcccgtggtcactggctccgcccccagcaccaggcgcccagtggagccgtttgggagaattgcctgcgccacgcagcggggccggacaggccgcacagacctactgtggcgggagggaggggcggctgctgcctggtgacggcacccggaggcccaccaggacgcgccaccggtgaatgtgcctctggtggctgctgagaaaaatacactgtgcagctc

SEQ ID NO: 154365 - DNA, 1086 bp, Homo sapiens
  Payload ID: 10336
  Gene Symbol: MRPL13
  Gene Name: mitochondrial ribosomal protein L13
  Uniprot ID: Q9BYD1
  ENST ID: ENST00000306185
  CDS Start-End: 293-829
gtttaggtcggctggaaattatgtcctccgtcggttttccgcagtttttccaccaagcgagatatttttgggagttattccctaaataactgcattatatgctcctttcatgacgaaattgctgccgtggagaagactggaggaaactcgaggaagagggagaagccgacaagtgctcgacgggctaggaactgtcctgcttgggtgttagcgtttcccgccgggccagtaaggctgagtgacccggcgtggctactaggagaaggacgtacggtcctgctagtagaggaatatgtcgagtttctctagggcgccccagcaatgggccacttttgctagaatatggtatctcttagatgggaaaatgcagccacctggcaaacttgctgctatggcatctataagacttcagggattacataaacctgtgtaccatgcactgagtgactgtggggatcatgttgttataatgaacacaagacacattgcattttctggaaacaaatgggaacaaaaagtatactcttcgcatactggctacccaggtggatttagacaagtaacagctgctcagcttcacctgagggatccagtggcaattgtaaaactagctatttatggcatgctgccaaaaaaccttcacagaagaacaatgatggaaaggttgcatctttttccagatgagtatattccagaagatattcttaagaatttagtagaggagcttcctcaaccacgaaaaatacctaaacgtctagatgagtacacacaagaagaaatagacgccttcccaagattgtggactccacctgaagattatcggctataagagaataagaattgcagaaaataacagtgaagtgattgaaactttcttctgatgagtttctctaacctacaggatggagtaaaacaactgctacagttcagcacctgttttatgtgccgaatcactgtggggaaaggtcaggaaggtatagtccttcaataggaaattgtaattaaaatataattttatagaaccatttttatgtaatctgatttgaatgttatagttgataataataaaatcacttacttggttga

SEQ ID NO: 154366 - DNA, 703 bp, Homo sapiens
  Payload ID: 10336
  Gene Symbol: MRPL13
  Gene Name: mitochondrial ribosomal protein L13
  ENST ID: ENST00000521648
  CDS Start-End: 1-144
tatattccagaagatattcttaagaatttagtagaggagcttcctcaaccacgaaaaatacctaaacgtctagatgagtacacacaagaagaaatagacgccttcccaagattgtggactccacctgaagattatcggctataagagaataagaattgcagaaaataacagtgaagtgattgaaactttcttctgatgagtttctctaacctacaggatggagtaaaacaactgctacagttcagcacctgttttatgtgccgaatcactgtggggaaaggtcaggaagatcccttctgcttactatgacattacccagagccacggcggacagtggtgagagtgcagcagactcactggcactggcaggtgctcatgtctcatgcatatgcaaggagcttctgggttctgtctcagggtactcatgccaagacagcctccgagattgaaagttaacaccctgagaaacaaggctcaaccacaaggattcaggaatcagtgaaggaaagcttcaacctcccatcctctaggggacagttctaagaaggatcttctcacttctcagaagtcaaggtagaattgaatccccactgcctatagctgctgctgataatgcacctttaggttggcttttccttgttccctgtctcatttgtgctgctccctcactgctatttcctttagtcacttttcaaataaactg

SEQ ID NO: 154367 - DNA, 1418 bp, Homo sapiens
  Payload ID: 10336
  Gene Symbol: MRPL13
  Gene Name: mitochondrial ribosomal protein L13
  ENST ID: ENST00000518696
  CDS Start-End: 309-485
atttccggttcccttcgtttaggtcggctggaaattatgtcctccgtcggttttccgcagtttttccaccaagcgagatatttttgggagttattccctaaataactgcattatatgctcctttcatgacgaaattgctgccgtggagaagactggaggaaactcgaggaagagggagaagccgacaagtgctcgacgggctaggaactgtcctgcttgggtgttagcgtttcccgccgggccagtaaggctgagtgacccggcgtggctactaggagaaggacgtacggtcctgctagtagaggaatatgtcgagtttctctagggcgccccagcaatgggccacttttgctagaatatggtatctcttagatgggaaaatgcagccacctggcaaacttgctgctatggcatctataagacttcagggattacataaacctgtgtaccatgcactgactacccaggtggatttagacaagtaacagctgctcagcttcacctgagggatccagtggcaattgtaaaactagctatttatggcatgctgccaaaaaaccttcacagaagaacaatgatggaaaggttgcatctttttccagatgagtatattccagaagatattcttaagaatttagtagaggagcttcctcaaccacgaaaaatacctaaacgtctagatgagtacacacaagaagaaatagacgccttcccaagattgtggactccacctgaagattatcggctataagagaataagaattgcagaaaataacagtgaagtgattgaaactttcttctgatgagtttctctaacctacaggatggagtaaaacaactgctacagttcagcacctgttttatgtgccgaatcactgtggggaaaggtcaggaaggtatagtccttcaataggaaattgtaattaaaatataattttatagaaccatttttatgtaatctgatttgaatgttatagttgataataataaaatcacttacttggttgactatttagtgttgcatttaatgataaaaaacagaccctgtgtatagaattgcagttacacattccaaaaatgcctctccatgcagattttctcaagtttgcaggtcactattcttgtcccttgtgaacaagctctaccttcacttttcatttcagtggctttttttatctaacttgtcatccatctaaattcatatttgcagcttagtagggtaaagtttgccctgaaatatttataaactgctatctttttctgtgtcccatatagcctcttggccccacaatgacaccagaatacataatgcctgtctgctcgttagaaatccctcttccctgccagtgattctgtttgtagactctccacactgttttcccatatctgtcctgttggcttccattcatctctgtact

SEQ ID NO: 154368 - DNA, 633 bp, Homo sapiens
  Payload ID: 10336
  Gene Symbol: MRPL13
  Gene Name: mitochondrial ribosomal protein L13
  ENST ID: ENST00000518918
  CDS Start-End: 191-633
gtcgagtttctctagggcgccccaggtgagctcggactcttatggcttgatggggttcattatactggcagaaggagagcgttggttccggcagattaagtagtgaagctggggcggcagggaagccgagaccctcggccaagagcaatgggccacttttgctagaatatggtatctcttagatgggaaaatgcagccacctggcaaacttgctgctatggcatctataagacttcagggattacataaacctgtgtaccatgcactgagtgactgtggggatcatgttgttataatgaacacaagacacattgcattttctggaaacaaatgggaacaaaaagtatactcttcgcatactggctacccaggtggatttagacaagtaacagctgctcagcttcacctgagggatccagtggcaattgtaaaactagctatttatggcatgctgccaaaaaaccttcacagaagaacaatgatggaaaggttgcatctttttccagatgagtatattccagaagatattcttaagaatttagtagaggagcttcctcaaccacgaaaaatacctaaacgtctagatgagtacacacaagaagaaatagacgccttcccaagattgtggactcc

SEQ ID NO: 154369 - DNA, 959 bp, Homo sapiens
  Payload ID: 10337
  Gene Symbol: MRPL14
  Gene Name: mitochondrial ribosomal protein L14
  Uniprot ID: Q6P1L8
  ENST ID: ENST00000372014
  CDS Start-End: 133-570
atcgcgtccgccgggctgggcctggcgcgcaggcgctaggaagaggccgcgtggggcgaaggcggcgcttggctggtggggcccgcggcgggattttcccgggcggcgagagcggatctatcttgggatcccatggctttctttactgggctctggggccccttcacctgtgtaagcagagtgctgagccatcactgtttcagcaccactgggagtctgagtgcgattcagaagatgacgcgggtacgagtggtggacaacagtgccctggggaacagcccataccatcgggctcctcgctgcatccatgtctataagaagaatggagtgggcaaggtgggcgaccagatactactggccatcaagggacagaagaaaaaggcgctcattgtggggcactgcatgcctggcccccgaatgacccccagattcgactccaacaacgtggtcctcattgaggacaacgggaaccctgtggggacacgaattaagacacccatccccaccagcctgcgcaagcgggaaggcgagtattccaaggtgctggccattgctcagaactttgtgtgagttgagcccaggcctctggttgcaggactcgtgaatggagcagttctgagaaccacccttttgctaagggagcttgggagccacatggctgctcccttcacactgggtaacagtgtagtatcctgtgagagaataaatgtattcatttatgtgtttttccagagctttctgggatgtgggaaaataaattacactgaagcagttgaaaggtggcttacccgagtctggccacacggggtagcattctttacatggagcagccttggtgccagggtctgagcccttgcttttctggtttggaccctataagttcatccaggactgtcaggccctggaaaactgaggtacacaccaaatgccaatttataaatgtaccatggctctaacca

SEQ ID NO: 154370 - DNA, 1147 bp, Homo sapiens
  Payload ID: 10338
  Gene Symbol: MRPL15
  Gene Name: mitochondrial ribosomal protein L15
  Uniprot ID: Q9P015
  ENST ID: ENST00000260102
  CDS Start-End: 75-965
acaaagcagcccccgagaccacgtggcctccgagcagctcagggcgcccttgaaagttcttggatctgcgggttatggccggtcccttgcagggcggtggggcccgggccctggacctactccggggcctgccgcgtgtgagcctggccaacttaaagccgaatcccggctccaagaaaccggagagaagaccaagaggtcggagaagaggtagaaaatgtggcagaggccataaaggagaaaggcaaagaggaacccggccccgcttgggctttgagggaggccagactccattttacatccgaatcccaaaatacgggtttaacgaaggacatagtttcagacgccagtataagcctttgagtctcaatagactgcagtatcttattgatttgggtcgtgttgatcctagtcaacctattgacttaacccagcttgtcaatgggagaggtgtgaccatccagccacttaaaagggattatggtgtccagctggttgaggagggtgctgacacctttacggcaaaagttaatattgaagtacagttggcttcagaactagctattgctgccattgaaaaaaatggtggtgttgttactacagccttctatgatccaagaagtctggacattgtatgcaaacctgttccattctttcttcgtggacaacccattccaaaaagaatgcttccaccagaagaactggtaccatattacactgatgcaaagaaccgtgggtacctggcggatcctgccaaatttcctgaagcacgacttgaactcgccaggaagtatggttatatcttacctgatatcactaaagatgaactcttcaaaatgctctgtactaggaaggatccaaggcagattttctttggtcttgctccaggatgggtggtgaatatggccgataagaaaatcctaaaacctacagatgaaaatctccttaagtattatacctcatgaattcccgtccaaggaagcagagttgttaaagagtactggaataggggctgaaggatctatattcccttattgcattttccttatgtataattttccagatggtgatgttacttttcagtgtactcatatgtctcattttcatctaaaattaaatggcaggaaacaaggactgcatagagaaa

SEQ ID NO: 154371 - DNA, 601 bp, Homo sapiens
  Payload ID: 10338
  Gene Symbol: MRPL15
  Gene Name: mitochondrial ribosomal protein L15
  ENST ID: ENST00000519831
  CDS Start-End: 8-601
gcgggttatggccggtcccttgcagggcggtggggcccgggccctggacctactccggggcctgccgcgtgtgagcctggccaacttaaagccgaatcccggctccaagaaaccggagagaagaccaagaggtcggagaagaggtagaaaatgtggcagaggccataaaggagaaaggcaaagaggaacccggccccgcttgggctttgagggaggccagactccattttacatccgaatcccaaaatacgggtttaacgaaggacatagtttcagacgccagtataagcctttgagtctcaatagactgcagtatcttattgatttgggtcgtgttgatcctagtcaacctattgacttaacccagcttgtcaatgggagaggtgtgaccatccagccacttaaaagggattatggtgtccagctggttgaggagggtgctgacacctttacggcaaaagttaatattgaagtacagttggcttcagaactagctattgctgccattgaaaaaaatggtggtgttgttactacagccttctatgatccaagaagtctgggtaagtttgttccacggtcattttcttctttctctctttgt

SEQ ID NO: 154372 - DNA, 853 bp, Homo sapiens
  Payload ID: 10338
  Gene Symbol: MRPL15
  Gene Name: mitochondrial ribosomal protein L15
  ENST ID: ENST00000522521
  CDS Start-End: 1-714
caggagagaagaccaagaggtcggagaagaggccagactccattttacatccgaatcccaaaatacgggtttaacgaaggacatagtttcagacgccagtataagcctttgagtctcaatagactgcagtatcttattgatttgggtcgtgttgatcctagtcaacctattgacttaacccagcttgtcaatgggagaggtgtgaccatccagccacttaaaagggattatggtgtccagctggttgaggagggtgctgacacctttacggcaaaagttaatattgaagtacagttggcttcagaactagctattgctgccattgaaaaaaatggtggtgttgttactacagccttctatgatccaagaagtctggacattgtatgcaaacctgttccattctttcttcgtggacaacccattccaaaaagaatgcttccaccagaagaactggtaccatattacactgatgcaaagaaccgtgggtacctggcggatcctgccaaatttcctgaagcacgacttgaactcgccaggaagtatggttatatcttacctgatatcactaaagatgaactcttcaaaatgctctgtactaggaaggatccaaggcagattttctttggtcttgctccaggatgggtggtgaatatggccgataagaaaatcctaaaacctacagatgaaaatctccttaagtattatacctcatgaattcccgtccaaggaagcagagttgttaaagagtactggaataggggctgaaggatctatattcccttattgcattttccttatgtataattttccagatggtgatgttacttttcagtgtactcatatgtctcatttt

SEQ ID NO: 154373 - DNA, 1182 bp, Homo sapiens
  Payload ID: 10339
  Gene Symbol: MRPL16
  Gene Name: mitochondrial ribosomal protein L16
  Uniprot ID: Q9NX20
  ENST ID: ENST00000300151
  CDS Start-End: 215-970
actcaacctcccccggaactcaacccccgtcgctcgagtttctttcgcttccgtcgggactctgcggagtggacccgagtgaacacaacttccggccccactgagcggtgtcctgagccgattacagctaggtagtggagcgccgctgcttacctgggtgcaggagacagccggagtcgctgggggagctccgcgccgccggacgcccgtgaccatgtggaggctgctggctcgcgctagtgcgccgctcctgcgggtgcccttgtcagattcctgggcactcctccccgccagtgctggcgtaaagacactgctcccagtaccaagttttgaagatgtttccattcctgaaaaacccaagcttagatttattgaaagggcaccacttgtgccaaaagtaagaagagaacctaaaaatttaagtgacatacggggaccttccactgaagctacggagtttacagaaggcaattttgcaatcttggcattgggtggtggctacctgcattggggccactttgaaatgatgcgcctgacaatcaaccgctctatggaccccaagaacatgtttgccatatggcgagtaccagcccctttcaagcccatcactcgcaaaagtgttgggcatcgcatggggggaggcaaaggtgctattgaccactacgtgacacctgtgaaggctggccgccttgttgtagagatgggtgggcgttgtgaatttgaagaagtgcaaggtttccttgaccaggttgcccacaagttgcccttcgcagcaaaggctgtgagccgcgggactctagagaagatgcgaaaagatcaagaggaaagagaacgtaacaaccagaacccctggacatttgagcgaatagccactgccaacatgctgggcatacggaaagtactgagcccatatgacttgacccacaaggggaaatactggggcaagttctacatgcccaaacgtgtgtagtgagtgtaggagataactgtatataggctactgaaagaaggattctgcatttctattcccctcagcctacccactgaagtctttgggtagctcttaagccataactaaggagcagcatttgagtagatttctgaaaaacaatgttatttgttgatttaaaaagaaaactgtatttttattaaataaaatttaaacatcacttcaggatataa

SEQ ID NO: 154374 - DNA, 574 bp, Homo sapiens
  Payload ID: 10339
  Gene Symbol: MRPL16
  Gene Name: mitochondrial ribosomal protein L16
  ENST ID: ENST00000534340
  CDS Start-End: 316-574
gcggtggctcacgcctttaatagcagcactttgggaggccgaggcgggcgaatcacttgagattcctgggcactcctccccgccagtgctggcgtaaagacactgctcccagtaccaagttttgaagatgtttccattcctgaaaaacccaagcttagatttattgaaagggcaccacttgtgccaaaagtaagaagagaacctaaaaatttaagtgacatacggggaccttccactgaagctacggagtttacagaaggcaattttgcaatcttggcattgggtggtggctacctgcattggggccactttgaaatgatgcgcctgacaatcaaccgctctatggaccccaagaacatgtttgccatatggcgagtaccagcccctttcaagcccatcactcgcaaaagtgttgggcatcgcatggggggaggcaaaggtgctattgaccactacgtgacacctgtgaaggctggccgccttgttgtagagatgggtgggcgttgtgaatttgaagaagtgcaaggtttccttgaccaggttgcccacaagttgcccttcgcagcaaaggctg

SEQ ID NO: 154375 - DNA, 1969 bp, Homo sapiens
  Payload ID: 10340
  Gene Symbol: MRPL17
  Gene Name: mitochondrial ribosomal protein L17
  Uniprot ID: Q9NRX2
  ENST ID: ENST00000288937
  CDS Start-End: 106-633
accacgctccgagctaaggcgcatgcgttccctgaaattgccgccaccggctctaccttccagtttccagttccggcctccaaggggcgggcagaagttggaaacatgcggctgtcggtcgctgcagcgatctcccatggccgcgtatttcgccgtatgggcctcggtcccgagtcccgcatccatctgttgcggaacttgctcacagggctggtgcggcacgaacgcatcgaggcaccatgggcgcgtgtggacgaaatgaggggctacgcggagaagctcatcgactatgggaagctgggagacactaacgaacgagccatgcgcatggctgacttctggctcacagagaaggatttgatcccaaagctgtttcaagtactggcccctcggtacaaagatcaaactgggggctacacaagaatgctgcagatcccaaatcggagtttggatcgggccaagatggcagtgatcgagtataaagggaattgcctcccacccctgcctctgcctcgcagagacagccaccttacactcctaaaccagctgctgcagggtttgcggcaggacctcaggcaaagccaggaagcaagcaaccacagctcccacacagctcaaacaccagggatttaactggatctgaagagtctgcagcccttaatcagtacccatgatcacaggcctttggagcacttttactctctgagaagaactggagctagagatgtaaaatggacagtcttgatggggttgagaaccttctggggagccagatgaccctctctttgcacaatagataaaagtctttatatgaatatatataaatttatttattttttccttcctgtgggatttctggagaatgagaattatccaaatgctcagtctacctgagatagtaaattcatggcttatgcttctggtccttaaatttgggttatttttggttagtgcaattttgtttttcttaatgccagtttacatgggaatgcatcctataattccaaatgttgccagaggtggttgtgttttgacatctggtctcctagagatgagtgcttgggatttcttagagaaagattacttcctgacaggggtaggggagtgacaatctgcaagtgaaacttccttaaacaatctagtaccctgcgaaccttcaggggatactgcaatcagtcctctgttttgaggcaggatcacacattaccttaatgtgttcccttcaaccccctgaatgggcctgggaggagaggacccaagaactcagatgttccaccagtttggccaaaggggtggagacattcagcagaggatgttgggctccaggataagctccttcctcttggtgaggggaaggggtaagaaagagggtctatgcgagagaaggattaggaaattaaacctcctaggaatttcctggaagtttttattgttgtcaaatctggcctctctgggaacccagaaaagggaaatccggcttcagaatgtgagaagctgggagcccctttcttggcacagccaggctgccgttcccttgggttcagaggctttagtagggtagtagttatggaaggacttagaaaggagccatcagtcttggtccaaacacttgatagcagtgcctgataattgccatatccccagtaaagtgggtagaagagattttatcttaggctctatcttctgagtgtatttggcccactgaacccatccactgtctgagataataagtaagagtaagggtaaagggatcactggtgtagcagacatggcttcagtgacagaacgaactattctggtgctaatttagctgtagctgccttagtctgatactcatctactcccaacagagctctttatctctttttctctactatggtttgttcttcacactatagccagaaagctcttatattttaaatgaaatatagtagacactcaaaacatttatgaaataaagctacaactc

SEQ ID NO: 154376 - DNA, 448 bp, Homo sapiens
  Payload ID: 10340
  Gene Symbol: MRPL17
  Gene Name: mitochondrial ribosomal protein L17
  ENST ID: ENST00000532203
  CDS Start-End: 21-448
ggcgggcagaagttggaaacatgcggctgtcggtcgctgcagcgatctcccatggccgcgtatttcgccgtatgggcctcggtcccgagtcccgcatccatctgttgcggaacttgctcacagggctggtgcggcacgaacgcatcgaggcaccatgggcgcgtgtggacgaaatgaggggctacgcggagaaggagaaggatttgatcccaaagctgtttcaagtactggcccctcggtacaaagatcaaactgggggctacacaagaatgctgcagatcccaaatcggagtttggatcgggccaagatggcagtgatcgagtataaagggaattgcctcccacccctgcctctgcctcgcagagacagccaccttacactcctaaaccagctgctgcagggtttgcggcaggacctcaggcaaagccaggaagcaagcaaccacag

SEQ ID NO: 154377 - DNA, 978 bp, Homo sapiens
  Payload ID: 10341
  Gene Symbol: MRPL18
  Gene Name: mitochondrial ribosomal protein L18
  Uniprot ID: Q9H0U6
  ENST ID: ENST00000367034
  CDS Start-End: 123-665
ggagagtttggggatctacagcagccaaaggcttgtccctgactttatatggctgctcctggcgagcgactgagtcgtccgtgaggaaaaagaggcgaggcttttccgagatcgtctcagcgatggcgcttcggtcgcggttttgggggttgttctcggtttgcaggaaccctgggtgcaggttcgcagccctgtcaaccagctccgagccggcagcgaaacctgaagtggaccctgtggaaaatgaagctgtcgccccagaattcaccaaccggaacccccggaacctggagcttttatctgtagccaggaaagagcggggctggcggacggtgtttccctcccgtgagttctggcacaggttgcgagttataaggactcagcatcatgtagaagcacttgtggagcatcagaatggcaaggttgtggtttcggcctccactcgtgagtgggctattaaaaagcacctttatagtaccagaaatgtggtggcttgtgagagtataggacgagtgctggcacagagatgcttagaggcgggaatcaacttcatggtctaccaaccaaccccgtgggaggcagcctcagactcgatgaaacgactacaaagtgccatgacagaaggtggtgtggttctacgggaacctcagagaatctatgaataaatggaagcattaattgttttgaacatgtaaatataaatctgtcagccactacagccatcaaaagagagcatctggaagaacagccagcttggaagttttacagcaataatgttgcagtggaatattatttgtagttaaggtcatcctcctcccctttctgtttttttaaatcaagaactacgttctgcccctctcttgggcttcagaagcatctaagaaaagcagtcatcaattataattaactttcaaagggcaagtcagaagttgtttataaattacaaaataaaggcatattatgaactcttattttctg

SEQ ID NO: 154378 - DNA, 693 bp, Homo sapiens
  Payload ID: 10342
  Gene Symbol: MRPL19
  Gene Name: mitochondrial ribosomal protein L19
  ENST ID: ENST00000358788
  CDS Start-End: 15-536
gtgagctagctggcatggcggcctgcattgcagcggggcactgggctgcaatgggcctaggccggagtttccaagccgccaggactctgctccccccgccggcctctatcgcctgcagggtccacgcggggcctgtccggcagcagagcactgggccttccgagcccggtgcgttccaaccgccgccgaaaccggtcatcgtggacaagcaccgccccgtggaaccggaacgcaggttcttgagtcctgaattcattcctcgaaggggaagaacagatcctctgaaatttcaaatagaaagaaaagatatgttagaaaggagaaaagtactccacattccagagttctatgttggaagtattcttcgtgttactacagctgacccatatgccagtggaaaaatcagccagtttctggggatttgcattcagagatcaggaagaggacttggagctactttcatccttaggaatgttatcgaaggacaagggccagtgtatattcataatcctgaaagatggctgcctgggccatgagaacacaaatcagatcactgaacagagaaaagtaccttcgagattcaatctcttctaaaatccactgagttttttcatctactgagaagtttccacttgtggatgtctcatctttgcctgttaataaataaaattgacttcatactacaaattctca

SEQ ID NO: 154379 - DNA, 3479 bp, Homo sapiens
  Payload ID: 10342
  Gene Symbol: MRPL19
  Gene Name: mitochondrial ribosomal protein L19
  Uniprot ID: P49406
  ENST ID: ENST00000393909
  CDS Start-End: 26-904
gtagtcttgacgtgagctagctggcatggcggcctgcattgcagcggggcactgggctgcaatgggcctaggccggagtttccaagccgccaggactctgctccccccgccggcctctatcgcctgcagggtccacgcggggcctgtccggcagcagagcactgggccttccgagcccggtgcgttccaaccgccgccgaaaccggtcatcgtggacaagcaccgccccgtggaaccggaacgcaggttcttgagtcctgaattcattcctcgaaggggaagaacagatcctctgaaatttcaaatagaaagaaaagatatgttagaaaggagaaaagtactccacattccagagttctatgttggaagtattcttcgtgttactacagctgacccatatgccagtggaaaaatcagccagtttctggggatttgcattcagagatcaggaagaggacttggagctactttcatccttaggaatgttatcgaaggacaaggtgtcgagatttgctttgaactttataatcctcgggtccaggagattcaggtggtcaaattagagaaacggctggatgatagcttgctatacttacgagatgcccttcctgaatatagcacttttgatgtgaatatgaagccagtagtacaagagcctaaccaaaaagttcctgttaatgagctgaaagtaaaaatgaagcctaagccctggtctaaacgctgggaacgtccaaattttaatattaaaggaatcagatttgatctttgtttaactgaacagcaaatgaaagaagctcagaagtggaatcagccatggcttgaatttgatatgatgagggaatatgatacttcaaaaattgaagctgcaatatggaaggaaattgaagcgtcgaaaaggtcttgattctgagaatgaatttggttagttgcagaagatacattggctctaagaggatatattttgagaccaatttaatttcatttataagaacatagtaattaagtgaactaagcattcattgttttattaatactttttttctaaaataaaacttgtacaccagtttattactctaaaaagagaattacacatgccaaatggaccaatgtccatttgcttattggaggcaaagctacaatagaagtcagagcatcaccagaatggtctttaatgagcatggaacctgagcaaagggaataggtgggatgaattttttttttaattgtgaaacaattcataagcacaatatgatttacagaataataaacattcatgtacccactatcaggttaagaaatagaacatttattaatatgtaggaatgttaagaaataaaacatttaataagatctcagaagactccagtaaatctgcaattgtatctctctcctttttaaatgtaaatatcatcttgacttgttaattattcccttgcatttcttttagtttactgccaacacatatattcttcaacaatatatttaattttgaaaaacctgaaaaaaaaaacctgttagcaagtataaaggggcagtattactattattgcatgaaggcttcaagggaaacgttacagtctttgggtcatagtctggcttcagcttcctctgagagtttacagaggccaattttgagcaaattcatggctaaggttatgagtgagttctgctaaacagaaggctcaccacaaggtatctggcaggattatactgggtagctggatgttgcagaaatgtggttagaggaagtaaactgttttttgatgctcacagcatgatgaatcaaactctgtatcttaggattaggttaaaacaatacctttggtatgatatgagtgttgttgctgatccatgcagcatggattggaaagctggggtataagcacacatgctaaagaaaaacatgtaatttggtccatactcacctggatatactgttcctcaggttaaaaaatacagtactatcctaaatcttgaaggcaactctcagcctatccattgagttaccttcagatctgccctctggttcctagctgtcttgggactaacttctttcctgcgctcagctgttttctggattccatgttttccattttattgagtactaacttgttttgctgcagcacatcctttggtagcttctagaggaagtttgtgtggaggtaaaatttttgagaccttgcatgtctcatgtttgattgatactttatacgtttaggtaggaggtaattttccttcaggactttaaaaatattgttgctccattttctttgtttctattgttgtattgagaaatccaatgccattttgatttccccatcataaatttcatgatgatgtgtcttggtgtgggtctatatttatccattgtattgggttttaggtgaacccttccagatagtaactcatttctgtcagttctgggaaacacttagcattggttgatgatttattctctgctgctttgttctcccaactattatttggatgttggatatccagcactgggtatctattttcttacctccctcccttgaccccagtctctgttttttagctctttagctcaatcttccaactctttgctattgtattttaaaatcttaagaccccttcttgatttgtagaagttccttttcttacaaccaaaaagcctttatctatggatttgttcacagataaggggtattcaatatagtgtatttttttttcatttaaaattgtttgcgcatctatttcctccaaatttctttctgtatttattttttgttgtctatatttcagacttttccaggatatctgataatctttggctgtcttcttatggttgaaagagggactaaaaagcttggaaagcctttgggttgtgggaaggggctgtctttaggattatctgaatgggcttttttgggagtcccctcctccacatgaatattttggttttgtcagattccctagaatagaggcttccaatctccttcctggaggggtctgtccaggaaggagattgtctaggggtctgtcagacagcagctttcagctacttccttgatctttttcactaatgattatatagtcatctaactactgtcaacaagtaatagatatcctatccttcacttgtttagattatttgctgagataacctctcaaaagaacctctcaaaataaaaggttaacaagagcctatatcttatatttttcttctctttatcttgttagaagatagctattaaaacctgttctttttctgtcttgataaacacacttcaatcttggtagaatggtagatgggacagtatattttaggacctaaagctctgcaaatgtatgatcagcttgtaagtacaggtgctcaaaaacatgtaaacaatcatgctttttactctgtaggaatatctttaaaattcttgtgaatttttccccagaagtaaagcaaatcttcccccagaaataaaattaaatgtgcataatctaaa

SEQ ID NO: 154380 - DNA, 1076 bp, Homo sapiens
  Payload ID: 10342
  Gene Symbol: MRPL19
  Gene Name: mitochondrial ribosomal protein L19
  Uniprot ID: P49406
  ENST ID: ENST00000409374
  CDS Start-End: 6-884
ctggcatggcggcctgcattgcagcggggcactgggctgcaatgggcctaggccggagtttccaagccgccaggactctgctccccccgccggcctctatcgcctgcagggtccacgcggggcctgtccggcagcagagcactgggccttccgagcccggtgcgttccaaccgccgccgaaaccggtcatcgtggacaagcaccgccccgtggaaccggaacgcaggttcttgagtcctgaattcattcctcgaaggggaagaacagatcctctgaaatttcaaatagaaagaaaagatatgttagaaaggagaaaagtactccacattccagagttctatgttggaagtattcttcgtgttactacagctgacccatatgccagtggaaaaatcagccagtttctggggatttgcattcagagatcaggaagaggacttggagctactttcatccttaggaatgttatcgaaggacaaggtgtcgagatttgctttgaactttataatcctcgggtccaggagattcaggtggtcaaattagagaaacggctggatgatagcttgctatacttacgagatgcccttcctgaatatagcacttttgatgtgaatatgaagccagtagtacaagagcctaaccaaaaagttcctgttaatgagctgaaagtaaaaatgaagcctaagccctggtctaaacgctgggaacgtccaaattttaatattaaaggaatcagatttgatctttgtttaactgaacagcaaatgaaagaagctcagaagtggaatcagccatggcttgaatttgatatgatgagggaatatgatacttcaaaaattgaagctgcaatatggaaggaaattgaagcgtcgaaaaggtcttgattctgagaatgaatttgccgggggccatcaagtataagaccacaggaccacgtgattcataaagaactactgtcaaaactagggccgccattaccaacatgtgaccttgagaaggcaatcaacgctgagagcttcattcctctgatacataaagatttataatcacctttgagtttgaagataacttggatt

SEQ ID NO: 154381 - DNA, 475 bp, Homo sapiens
  Payload ID: 10342
  Gene Symbol: MRPL19
  Gene Name: mitochondrial ribosomal protein L19
  ENST ID: ENST00000453233
  CDS Start-End: 1-240
aaagttcctgttaatgagctgaaagtaaaaatgaagcctaagccctggtctaaacgctgggaacgtccaaattttaatattaaaggaatcagatttgatctttgtttaactgaacagcaaatgaaagaagctcagaagtggaatcagccatggcttgaatttgatatgatgagggaatatgatacttcaaaaattgaagctgcaatatggaaggaaattgaagcgtcgaaaaggtcttgattctgagaatgaatttggtaccttcgagattcaatctcttctaaaatccactgagttttttcatctactgagaagtttccacttgtggatgtctcatctttgcctgttaataaataaaattgacttcatactacaaattctcaaaagaaaaaagtaaaatgctttgaaaataaaggtaatatcatggatgtataaacatatgcatatgtaaatacataaatatgcttaaattttg

SEQ ID NO: 154382 - DNA, 744 bp, Homo sapiens
  Payload ID: 10342
  Gene Symbol: MRPL19
  Gene Name: mitochondrial ribosomal protein L19
  ENST ID: ENST00000476622
  CDS Start-End: 315-744
tggagatcagaggcaaccccagcgttggtcccccgtgggacgccgggttgggggagattgcggggctctgcgggatctcagggttggcacgagagttctgacctccgtcgtccgctcccgcaggggtccacgcggggcctgtccggcagcagagcactgggccttccgagcccggtgcgttccaaccgccgccgaaaccggtcatcgtggacaagcaccgccccgtggaaccggaacgcaggttcttgagtcctgaattcattcctcgaaggggaagaacagatcctctgaaatttcaaatagaaagaaaagatatgttagaaaggagaaaagtactccacattccagagttctatgttggaagtattcttcgtgttactacagctgacccatatgccagtggaaaaatcagccagtttctggggatttgcattcagagatcaggaagaggacttggagctactttcatccttaggaatgttatcgaaggacaaggtgtcgagatttgctttgaactttataatcctcgggtccaggagattcaggtggtcaaattagagaaacggctggatgatagcttgctatacttacgagatgcccttcctgaatatagcacttttgatgtgaatatgaagccagtagtacaagagcctaaccaaaaagttcctgttaatgagctgaaagtaaaaatgaagcctaagccctggtctaaacgctgggaacgtccaaattttaatattaaag

SEQ ID NO: 154383 - DNA, 359 bp, Homo sapiens
  Payload ID: 10342
  Gene Symbol: MRPL19
  Gene Name: mitochondrial ribosomal protein L19
  ENST ID: ENST00000492255
  CDS Start-End: 1-175
ggtcaaattagagaaacggctggatgatagcttgctatacttacgagatgcccttcctgaatatagcacttttgatgtgaatatgaagccagtagtacaagagcctaaccaaaaagttcctgttaatgagccgggggccatcaagtataagaccacaggaccacgtgattcataaagaactactgtcaaaactagggccgccattaccaacatgtgaccttgagaaggcaatcaacgctgagagcttcattcctctgatacataaagatttataatcacctttgagtttgaagataacttggattaagtaaccataataaattctaataaaatattggttgtcctttccctctactaaa

SEQ ID NO: 154384 - DNA, 899 bp, Homo sapiens
  Payload ID: 10343
  Gene Symbol: MRPL2
  Gene Name: mitochondrial ribosomal protein L2
  ENST ID: ENST00000230413
  CDS Start-End: 14-691
gggtgtcgtgctgatggccctgtgcgcactgacccgcgctctgcgctctctgaacctggcgcccccgaccgtcgccgcccctgccccgagtctgttccccgccgcccagatgatgaacaatggcctcctccaacagccctctgccttgatgttgctcccctgccgcccagttcttacttctgtggcccttaatgccaactttgtgtcctggaagagtcgtaccaagtacaccattacaccagtgaagatgaggaagtctgggggccgagaccacacaggccgaatccgggtgcatggtattggcgggggccacaagcaacgttatcgaatgattgactttctgcgtttccggcctgaggagaccaagtcaggaccctttgaggagaaggttatccaagtccgctatgatccctgtaggtcagcagacatagctctggttgctgggggcagccggaaacgctggatcatcgccacagaaaacatgcaggctggagatacaatcttgaactctaaccacataggccgaatggcagttgctgctcgggaaggggatgcgcatcctcttggggctctgcctgtggggaccctcatcaacaacgtggaaagtgagccaggccggggtgcccaatatatccgagctgcaggtgctggaaacgtgcgtagcaacagtaggccgagtatccaacgttgatcataacaaacgggtcattggcaaggcaggtcgcaaccgctggctgggcaagaggcctaacagtgggcggtggcaccgcaaggggggctgggctggccgaaagattcggccactaccccccatgaagagttacgtgaagctgccttctgcttctgcccaaagctgatatccctgtactctaataaaatgccccccccccccgttttaa

SEQ ID NO: 154385 - DNA, 1588 bp, Homo sapiens
  Payload ID: 10343
  Gene Symbol: MRPL2
  Gene Name: mitochondrial ribosomal protein L2
  Uniprot ID: Q5T653
  ENST ID: ENST00000388752
  CDS Start-End: 426-1343
ttttggaggctggagttttgtaaggttggttggagggggtttgttcatctttctggtagtgcgagaataagagatggcagagaccttaaccttcagccccaggataccctcaaagactcacctgcaatctgccggtgtggctgccgctcttgccggtactgcccctttaaatccatgatggctgccgctcgaggcaattgttttgacgggtctgggggggcggggcctgtttcctagtcacgcgacattagagctgcccgcggattggctctcacggcgttcaggtaggaaaggaggtgtgtatccagcttgggctccagttttctgcccgcctccttttacgttattgcggagcgacggcgccggacagtcaacgtcatctaggagcaccgagcagcttggctaaaagtaagggtgtcgtgctgatggccctgtgcgcactgacccgcgctctgcgctctctgaacctggcgcccccgaccgtcgccgcccctgccccgagtctgttccccgccgcccagatgatgaacaatggcctcctccaacagccctctgccttgatgttgctcccctgccgcccagttcttacttctgtggcccttaatgccaactttgtgtcctggaagagtcgtaccaagtacaccattacaccagtgaagatgaggaagtctgggggccgagaccacacaggccgaatccgggtgcatggtattggcgggggccacaagcaacgttatcgaatgattgactttctgcgtttccggcctgaggagaccaagtcaggaccctttgaggagaaggttatccaagtccgctatgatccctgtaggtcagcagacatagctctggttgctgggggcagccggaaacgctggatcatcgccacagaaaacatgcaggctggagatacaatcttgaactctaaccacataggccgaatggcagttgctgctcgggaaggggatgcgcatcctcttggggctctgcctgtggggaccctcatcaacaacgtggaaagtgagccaggccggggtgcccaatatatccgagctgcagggacgtgtggtgtgctactgcggaaggtgaatggcacagccattatccagctgccctctaagaggcagatgcaggtgctggaaacgtgcgtagcaacagtaggccgagtatccaacgttgatcataacaaacgggtcattggcaaggcaggtcgcaaccgctggctgggcaagaggcctaacagtgggcggtggcaccgcaaggggggctgggctggccgaaagattcggccactaccccccatgaagagttacgtgaagctgccttctgcttctgcccaaagctgatatccctgtactctaataaaatgccccccccccccgttttaatctgttactgtggttttgttttgggtgttttttgttttttttgttgttgttttttttttgcgggggaggggatggtacagactaaacgtggggaaaagaagtaaaaagtgtggaagagaaagtacaggacactgggtctgtccccaccccaattcccttacaagtaatggagccggggatggaaataaatgacgtccaaggtc

SEQ ID NO: 154386 - DNA, 905 bp, Homo sapiens
  Payload ID: 10343
  Gene Symbol: MRPL2
  Gene Name: mitochondrial ribosomal protein L2
  ENST ID: ENST00000487429
  CDS Start-End: 41-325
agcaccgagcagcttggctaaaagtaagggtgtcgtgctgatggccctgtgcgcactgacccgcgctctgcgctctctgaacctggcgcccccgaccgtcgccgcccctgccccgagtctgttccccgccgcccaggtaatccatcttacccgggaagaaggctgcttccattcgggctgccggagatggggtctgcgggcatgcgaggcgggagttgcgagtctggtcaggagtcatgcagatgatgaacaatggcctcctccaacagccctctgccttgatgttgctcccctgccgcccagttcttacttctgtggcccttaatgccaactttgtgtcctggaagagtcgtaccaagtacaccattacaccagtgaagatgaggaagtctgggggccgagaccacacaggtgggaacaaggacagggggatttaagcagtcaaaaggaaaaacatgttaagaccctagacttgtatattgacacacttgtaccttgtaaggcagaggaatgtaattaaaaagcacttatttggctccttttgcatgtagtatgtgtacaggagtcagagagtagaatacaaagcaataggtaattggtctatgcttctaaagacaatttgggtaattgaagaaaatgggccatacacaggaagtgccatgacattttccttcatacccttcaaaaatttataacaggctgggtaaggtggctcacgactgtaatcccagcattttgggaggccgaggcgggcagatcacctgacgtcacaagtttaagaccaggctggccaacatggcaaaacctcatctctactaaaactttaaaaattggtcaggcgcagtggctcacgcctgtaatcccaacactttgagaggccaaggcaggcagatcacttgaggcca

SEQ ID NO: 154387 - DNA, 689 bp, Homo sapiens
  Payload ID: 10343
  Gene Symbol: MRPL2
  Gene Name: mitochondrial ribosomal protein L2
  ENST ID: ENST00000468957
  CDS Start-End: 58-348
agtcaacgtcatctaggagcaccgagcagcttggctaaaagtaagggtgtcgtgctgatggccctgtgcgcactgacccgcgctctgcgctctctgaacctggcgcccccgaccgtcgccgcccctgccccgagtctgttccccgccgcccagatgatgaacaatggcctcctccaacagccctctgccttgatgttgctcccctgccgcccagttcttacttctgtggcccttaatgccaactttgtgtcctggaagagtcgtaccaagtacaccattacaccagtgaagatgaggaagtctgggggccgagaccacacaggtgggaacaaggacagggggatttaagcagtcaaaaggaaaaacatgttaagaccctagacttgtatattgacacacttgtaccttgtaaggcagaggaatgtaattaaaaagcacttatttggctccttttgcatgtagtatgtgtacaggagtcagagagtagaatacaaagcaataggtaattggtctatgcttctaaagacaatttgggtaattgaagaaaatgggccatacacaggaagtgccatgacattttccttcatacccttcaaaaatttataacaggctgggtaaggtggctcacgactgtaatcccagcattttgggaggccgaggcgggcagatcacctgacgtcacaagttta

SEQ ID NO: 154388 - DNA, 570 bp, Homo sapiens
  Payload ID: 10343
  Gene Symbol: MRPL2
  Gene Name: mitochondrial ribosomal protein L2
  ENST ID: ENST00000489623
  CDS Start-End: 54-365
aacgtcatctaggagcaccgagcagcttggctaaaagtaagggtgtcgtgctgatggccctgtgcgcactgacccgcgctctgcgctctctgaacctggcgcccccgaccgtcgccgcccctgccccgagtctgttccccgccgcccagatgatgaacaatggcctcctccaacagccctctgccttgatgttgctcccctgccgcccagttcttacttctgtggcccttaatgccaactttgtgtcctggaagagtcgtaccaagtacaccattacaccagtgaagatgaggaagtctgggggccgagaccacacaggtgctggaaacgtgcgtagcaacagtaggccgagtatccaacgttgatcataacaaacgggtcattggcaaggcaggtcgcaaccgctggctgggcaagaggcctaacagtgggcggtggcaccgcaaggggggctgggctggccgaaagattcggccactaccccccatgaagagttacgtgaagctgccttctgcttctgcccaaagctgatatccctgtactctaataaaatgccccccccccccgttt

SEQ ID NO: 154389 - DNA, 721 bp, Homo sapiens
  Payload ID: 10344
  Gene Symbol: MRPL20
  Gene Name: mitochondrial ribosomal protein L20
  Uniprot ID: Q9BYC9
  ENST ID: ENST00000344843
  CDS Start-End: 97-546
cggaagcgctcgtgaccaccatttccgacccgggcaagatggcagcggcgctgcgcgtgcgttgttgagtgttcgggacgccggcctgcaggcgccatggtcttcctcaccgcgcagctctggctgcggaatcgcgtcaccgaccgctactttcggatccaggaggtgctgaagcacgccaggcacttccggggaaggaaaaatcgctgctacaggttggcggtcagaaccgtgattcgagcctttgtgaaatgcaccaaagcccgatacctgaagaaaaagaacatgaggaccctctggattaatcgaattacagctgctagccaggaacatggactgaagtatccagcgctcattgggaatttagttaagtgccaggtggagctcaacaggaaagtcctagcggatctggccatctacgagccaaagactttcaaatctttggctgccttggccagtaggaggcgacacgaaggatttgctgctgccttgggggatgggaaggaacctgaaggcattttttccagagtggtgcagtaccactgaggactgttgctgtattgattaggaaaagagacagagtaatttgcagtttgtttgatttatacttttgtttatctacaacccaataacagacatgagggatggccctgtctctctgggacagagcctcacagatgatgtccatgttttgtgtgaatgaaactcaaacactcttcag

SEQ ID NO: 154390 - DNA, 588 bp, Homo sapiens
  Payload ID: 10344
  Gene Symbol: MRPL20
  Gene Name: mitochondrial ribosomal protein L20
  ENST ID: ENST00000492508
  CDS Start-End: 1-201
cgctgctacaggttggcggtcagaaccgtgattcgagcctttgtgaaatgcaccaaagcccgatacctgaagaaaaagaacatgaggaccctctggattaatcgaattacagctgctagccaggaacatggactgaagtatccagcgctcattgggaatttagttaaggcacttccaggttggcttaaagggttaccctaggccagcagtcagctcagtcagggtggtgaccaaggaccctgaacaaggtgtttggttccccgggccgacatcaggactggagtccagcctccctgcagattccacaggtgcttccctcacccgtgtccacatttatccttcagcatcctgcctggaagtcctctgctgtgccacccagataggattctcctaggccttccctccccccaggcgagtgtgcagctgggttcttcctgagccagcgccgcaaccacgcggagccggagtgtgtgtctcacactgacagcaggttctgattcattcttttttcagtgccaggtggagctcaacaggaaagtcctagcggatctggccatctacgagccaaagactttcaaatctttggct

SEQ ID NO: 154391 - DNA, 1049 bp, Homo sapiens
  Payload ID: 10344
  Gene Symbol: MRPL20
  Gene Name: mitochondrial ribosomal protein L20
  Uniprot ID: Q9BYC9
  ENST ID: ENST00000482352
  CDS Start-End: 74-541
tccgacccgggcaagatggcagcggcgctgcgcgtgcgttgttgagtgttcgggacgccggcctgcaggcgccatggtcttcctcaccgcgcagctctggctgcggaatcgcgtcaccgaccgctactttcggatccaggaggtgctgaagcacgccaggcacttccggggaaggaaaaatcgctgctacaggttggcggtcagaaccgtgattcgagcctttgtgaaatgcaccaaagcccgatacctgaagaaaaagaacatgaggaccctctggattaatcgaattacagctgctagccaggaacatggactgaagtatccagcgctcattgggaatttagttaaggtatgggtgagtatgtgggtcccactgaaattctggacatctgcagaaaccatcatgcggggcgtggtggtgcttcctgtagtcccagctaatcaggaggctgaggccagaggatccctggagactgacttctgggctgtagtttgctatgctgatggggtgtccatgttaagtgtggtatcaatatggtgacctcttgggagcaagggaccaccacgttgcctaaggaggggtgaaccagcccaggctggaaacggagcaggtcacaattcccatgttgatgagtgatgagattgtgcctaggaatagtgccagcaacagcctgggcaacatagtgagaccactctctacaaaaaaataaaatttgctgggtgtggtggtacagagacatgtaatgtcagctactgaggagtctgaagcagggggatcactttgagcccccaggagtttgaagctgcagtgagctatgatggtaccactgcactctagcctaggtgagagcaggaccccgtctgacagaataaagaaagccatggctgggcagggtggctcaggcctgtgatcccagcactttgggaggctgaggtgggcaggagatggagactagcctggccaacgtggtgaaaccctgtctctactaaaaatacaaaaattagccaggtgtggtggcgggcacctagaattccagctactctggagg

SEQ ID NO: 154392 - DNA, 683 bp, Homo sapiens
  Payload ID: 10345
  Gene Symbol: MRPL21
  Gene Name: mitochondrial ribosomal protein L21
  Uniprot ID: Q7Z2W9
  ENST ID: ENST00000362034
  CDS Start-End: 11-628
ggctgcggccatggcagcatcttccctgacggtcaccttagggcggctggcgtccgcgtgcagccacagcatcctgagaccttcggggcccggagcagcctccctttggtctgcttctcgaaggttcaattcacagagcacttcatatctaccaggatatgttcctaaaacatccctgagttcaccaccttggccagaagttgttctgccagacccagttgaggagaccagacaccatgcagaggtcgtgaagaaggtgaatgagatgatcgtcacggggcagtatggcaggctctttgccgtggtgcactttgccagccgccagtggaaggtgacctctgaagacctgatcttaattggaaatgaactagaccttgcgtgtggagagagaattcgactggagaaggtcctgctggttggggcagacaacttcacgctgcttggcaagccactcctcggaaaggatcttgttcgagtagaagccacagtcattgaaaagacagaatcatggccaagaatcattatgagattcaggaaaaggaaaaacttcaagaagaaaagaatcgtcacgaccccgcagactgtcctccggataaacagcattgagattgctccgtgtttgttgtgattaccgagttaatacttacaaaaggataaaaataaactcctgcttcccaaggaga

SEQ ID NO: 154393 - DNA, 662 bp, Homo sapiens
  Payload ID: 10345
  Gene Symbol: MRPL21
  Gene Name: mitochondrial ribosomal protein L21
  Uniprot ID: Q7Z2W9
  ENST ID: ENST00000450904
  CDS Start-End: 245-607
accttagggcggctggcgtccgcgtgcagccacagcatcctgagaccttcggggcccggagcagcctccctttggtctgcttctcgaaggttcaattcacagagcacttcatatctaccagggtaatatcaaaatatatgttcctaaaacatccctgagttcaccaccttggccagaagttgttctgccagacccagttgaggagaccagacaccatgcagaggtcgtgaagaaggtgaatgagatgatcgtcacggggcagtatggcaggctctttgccgtggtgcactttgccagccgccagtggaaggtgacctctgaagacctgatcttaattggaaatgaactagaccttgcgtgtggagagagaattcgactggagaaggtcctgctggttggggcagacaacttcacgctgcttggcaagccactcctcggaaaggatcttgttcgagtagaagccacagtcattgaaaagacagaatcatggccaagaatcattatgagattcaggaaaaggaaaaacttcaagaagaaaagaatcgtcacgaccccgcagactgtcctccggataaacagcattgagattgctccgtgtttgttgtgattaccgagttaatacttacaaaaggataaaaataaactcctgcttcccaaggaga

SEQ ID NO: 154394 - DNA, 654 bp, Homo sapiens
  Payload ID: 10345
  Gene Symbol: MRPL21
  Gene Name: mitochondrial ribosomal protein L21
  ENST ID: ENST00000544567
  CDS Start-End: 5-115
ggccatggcagcatcttccctgacggtcaccttagggcggctggcgtccgcgtgcagccacagcatcctgagaccttcggggcccggagcagatatgttcctaaaacatccctgagttcaccaccttggccagaagttgttctgccagacccagttgaggagaccagacaccatgcagggggtggagcaggggctgggccgccagcagtgaggtgctcacaaggggtgctggctgtcaggtccaccctagggccccaccaccaggagctgcacatcacactgcagcgcgtgggggagcaggtgagggtgactgcccacccacccgccttcccctgcagaggtcgtgaagaaggtgaatgagatgatcgtcacggggcagtatggcaggctctttgccgtggtgcactttgccagccgccagtggaaggtgacctctgaagacctgatcttaattggaaatgaactagaccttgcgtgtggagagagaattcgactggagaaggtcctgctggttggggcagacaacttcacgctgcttggcaagccactcctcggaaaggatcttgttcgagtagaagccacagtcattgaaaagacagaatcatggccaagaatcattatgagattcaggaaaaggaaaaacttcaagaagaa

SEQ ID NO: 154395 - DNA, 764 bp, Homo sapiens
  Payload ID: 10345
  Gene Symbol: MRPL21
  Gene Name: mitochondrial ribosomal protein L21
  ENST ID: ENST00000541279
  CDS Start-End: 18-470
cggccgaggctgcggccatggcagcatcttccctgacggtcaccttagggcggctggcgtccgcgtgcagccacagcatcctgagaccttcggggcccggagcagcctccctttggtctgcttctcgaaggttcaattcacagagcacttcatatctaccaggatatgttcctaaaacatccctgagttcaccaccttggccagaagttgttctgccagacccagttgaggagaccagacaccatgcagaggtcgtgaagaaggtgaatgagatgatcgtcacggggcagtatggcaggctctttgccgtggtgcactttgccagccgccagtggaaggtgacctctgaagacctgatcttaattggaaatgaactagaccttgcgtgtggagagagaattcgactggagaaggtcctgctggttggggcagacaacttcacgctgcttggcaagccactcctcgggtaatggctgtgaagtgctgggctttgtctggggctccagggctggacatgcagacagtggtcacagtgcaattaggccagaaaggatcttgttcgagtagaagccacagtcattgaaaagacagaatcatggccaagaatcattatgagattcaggaaaaggaaaaacttcaagaagaaaagaatcgtcacgaccccgcagactgtcctccggataaacagcattgagattgctccgtgtttgttgtgattaccgagttaatacttacaaaaggataaaaataaactcctgcttccc

SEQ ID NO: 154396 - DNA, 555 bp, Homo sapiens
  Payload ID: 10345
  Gene Symbol: MRPL21
  Gene Name: mitochondrial ribosomal protein L21
  ENST ID: ENST00000541265
  CDS Start-End: 23-172
gtttccggccgaggctgcggccatggcagcatcttccctgacggtcaccttagggcggctggcgtccgcgtgcagccacagcatcctgagaccttcggggcccggagcagcctccctttggtctgcttctcgaaggttcaattcacagagcacttcatatctaccagggtaatatcaaaatatatgttcctaaaacatccctgagttcaccaccttggccagaagttgttctgccagacccagttgaggagaccagacaccatgcagaggtcgtgaagaaggtgaatgagatgatcgtcacggggcagtatggcaggctctttgccgtggtgcactttgccagccgccagtggaaggtgacctctgaagacctgatcttaattggaaatgaactagaccttgcgtgtggagagagaattcgactggagaaggtgagaccaccgagcttctctggatattcagggactcagccaccaagtcctgctggttggggcagacaacttcacgctgcttggcaagccactcctcggaaaggatcttgttcgagtagaagcc

SEQ ID NO: 154397 - DNA, 2283 bp, Homo sapiens
  Payload ID: 10345
  Gene Symbol: MRPL21
  Gene Name: mitochondrial ribosomal protein L21
  ENST ID: ENST00000565125
  CDS Start-End: 26-175
tccgtttccggccgaggctgcggccatggcagcatcttccctgacggtcaccttagggcggctggcgtccgcgtgcagccacagcatcctgagaccttcggggcccggagcagcctccctttggtctgcttctcgaaggttcaattcacagagcacttcatatctaccagggtaatatcaaaatatatgttcctaaaacatccctgagttcaccaccttggccagaagttgttctgccagacccagttgaggagaccagacaccatgcagaggtcgtgaagaaggtgaatgagatgatcgtcacggggcagtatggcaggctctttgccgtggtgcactttgccagccgccagtggaaggtgacctctgaagacctgatcttaattggaaatgaactagaccttgcgtgtggagagagaattcgactggagaaggtcctgctggttggggcagacaacttcacgctgcttggcaagccactcctcgggtaatggctgtgaagtgctgggctttgtctggggctccagggctggacatgcagacagtggtcacagtgcaattaggccagaaaggatcttgttcgagtagaagccacagtcattgaaaagacagaatcatggccaagaatcattatgagattcaggaaaaggaaaaacttcaagaagaaaagaagtaagttagagaaagtaccgctgggccctgttgcacggtgctggttgcccaggcgcatgcggacggagggtgtggggcacgtgggtctcgggacaggaagcccaggcaggtctcaacctggctgccactgcccacttgccaccctcatcctagagggagcacccagagggtccagcctcgctccccttctcctccacgctccacgcgtgaccccacctcgctccccttctcctccacgctccgcacgtgaccccacctcgctccccttctcctccaccctccgcgcgtgaccccacctcgctccccttctcctccaccctccgcgcatgaccccacctcgctccccttctcctccaccctccgcgcgtgaccccacctcgctccccttctcctccaccctccgcgcgtgaccccacctcgctccccttctcctccaccctccgcgcgtgaccccacctcgctccccttctcctccaccctccgcgcgtgaccccacctcgctccccttctcctccaccctccgcgcgtgaccccacctcgctccccttctcctccaccctccgcgcgtgaccccacctcgctccccttctcctccaccctccgcgcgtgaccccacctcgctccccttctcctccaccctccgcgcgtgaccccacctcgctccccttctcctccaccctccgcgcgtgacccacctcgctccccttctcctccaccctccgcgcgtgaacccacctcgctccccttctcctccaccctccgcgcgtgaacccacctcgctccccttctccaccctccacgcgtgaccccacctcgctccccttctcctccaccctccacgcatgaccccactttgttccaacccatgacgcctagcactgtccccaaagcagcagtgaatccgcaagcaggtgtagggctgtcctagcaggtctgcactgaggacatcccccatagtgggcatcctgagggatggcacccacggggcatgggccacatagctgagcggctgcagaattctgtccctcacagctcttgctataactgcagttgccggcctaaaccaccaacagtgggcatagttaaatatacccagaatactggtattggctgtcaccttagagtcatctgggtaggggagcctctcatgtaccttctgacacttccaggtagcctcaaggtcactcaggtggggccatcctcccacgcactccagaagtcacagcatagacagtgtgggaggagaggtgaggtgccagcgcagggcactcctggccatgaggcgtctggtgtcccagcctctgcacctgccaacagagtgaacgaacaagctagcgaggcagtcagtgcacacctggagataaacacggccatgtgcagcaggggacgttgccggggtcgcgctggctggggagggctgtgtgcagagcccctgctgtaactgatgacaacagtcagggtctgtggtcaagcctgtgacatcctttctttcagtcgtcacgaccccgcagactgtcctccggataaacagcattgagattgctccgtgtttgttgtgattaccgagttaatacttacaaaaggataaaaataaactcctgcttcccaagg

SEQ ID NO: 154398 - DNA, 932 bp, Homo sapiens
  Payload ID: 10345
  Gene Symbol: MRPL21
  Gene Name: mitochondrial ribosomal protein L21
  ENST ID: ENST00000567045
  CDS Start-End: 237-824
gcggctggcgtccgcgtgcagccacagcatcctgagaccttcggggcccggagcagcctccctttggtctgcttctcgaaggttcaattcacagagcacttcatatctaccagggtaatatcaaaatatatgttcctaaaacatccctgagttcaccaccttggccagaagttgttctgccagacccagttgaggagaccagacaccatgcagaggtcgtgaagaaggtgaatgagatgatcgtcacggggcagtatggcaggctctttgccgtggtgcactttgccagccgccagtggaaggtgacctctgaagacctgatcttaattggaaatgaactagaccttgcgtgtggagagagaattcgactggagaaggtcctgctggttggggcagacaacttcacgctgcttggcaagccactcctcggaaaggatcttgttcgagtagaagccacagtcattgaaaagacagaatcatggccaagaatcattatgagattcaggaaaaggaaaaacttcaagaagaaaagaagtaagttagagaaagtaccgctgggccctgttgcacggtgctggttgcccaggcgcatgcggacggagggtgtggggcacgtgggtctcgggacaggaagcccaggcaggtctcaacctggctgccactgcccacttgccaccctcatcctagagggagcacccagagggtccagcctcgctccccttctcctccacgctccacgcgtgaccccacctcgctccccttctcctccacgctccgcacgtgaccccacctcgctccccttctcctccaccctccgcgcgtgaccccacctcgctccccttctcctccaccctccgcgcatgaccccacctcgctccccttctcctccaccctccgcgcgtgaccccacctcgctccccttctcctccacc

SEQ ID NO: 154399 - DNA, 3035 bp, Homo sapiens
  Payload ID: 10346
  Gene Symbol: MRPL22
  Gene Name: mitochondrial ribosomal protein L22
  Uniprot ID: Q9NWU5
  ENST ID: ENST00000265229
  CDS Start-End: 141-521
gtagcgggagggcgaaagatggcggcggcagtactgggacagttgggtgcgttatggatacataacctgaggagccgggggaagctggccttggggaaatctaccactgtcgaagacaaataaaatatagcaaagacaagatgtggtatttggcaaaattgatacgaggaatgtctattgaccaggctttggctcagttggaattcaatgacaaaaaaggggccaaaataattaaagaggttctcttagaagcacaagatatggcagtgagagaccataacgtggaattcaggtccaatttatatatagctgagtccacctcaggacgaggccagtgcctgaaacgcatccgctaccatggcagaggtcgctttgggatcatggagaaggtttattgccattattttgtgaagttggtggaagggcccccacctccacctgagccaccaaagacggcagttgcccatgccaaagagtatattcagcagcttcgcagccggaccatcgttcacactctatgatgaggagattcagactccacagtgtatatattttgccatttattttctaaaaataaacaaaaattgaaggcaaatgctttttatgatttctcattgaattattgaaacagtgtataactgctagttgtaaatgaatatttataaggctttgcccatttcttttgagcctctgggcatatttgtatgcatttgcgacttggaaggggaaatcagctttaaacatagtaacagactatatttcaaaaggcttttggagtaactttgaaagggaatgttaactttccaactagtgtcctgcaggtggctgttttgatactggacttgaatacagtgttatgaggtaagaaaattgcttttatttcacttaattttctcttgggaccatgggaagttagagtggctgcatgttgtttcattacagtattttagggtgttcagtggtaccgtttttcctttcactgttggcacaggccagtgagtcaaaaattatattttcctttactgttttagcagtaactcgaaactacaggagtttattagatatacgaatctaaaactccaaaaacctttaactttgaaaattttcttttggttaagcaaagcctgtttttatttcttcttccaacagtgctttatattgtttggatatcttgtttaggattgatttatttttcagggtaaattcaattactgagagaggaattgaaccaatctcagcattgcattctaaaatggggcagtaggtggcactcaaccttttattagcagaaaattgttagtttcaaattagagtgttcaacactgcttccctctcattcatacacgtcttcattaagaagaagtactctttgtctacagccctagtccaacttttgcatgcaaaagaagaatcgaggatgcttgcttgttaatgcagacttctgggccccaccccaatgattcaattcactaggtcttatggggggctggtttcagaaatctatgttttaaacaaacacttccaggtaattctgttgtaggggactacgctttgagaatacggctttaggagaatgaaaaaatgtagttttattgccatgttttaagatggcattaataatagttactgtttactgggaacttgttatttgcaagctctgtgctagtattttacataattcttcacaacatcctgaaaatgtagcttttgttttaccactttacaaaggaataaaccgaagcacacagaattcaaataactatcacaagtcacacagcatgtaaatattggggctatgattgaaaggtttctaaagtagctggttctgcataccttttgagtatacagctgggtttttgtgtctctccagttaacctaatgcatgggtaaaaagacatcaggggtcagtggaataaaccaaggtgtaggacagattcattctgggtcctaagctgttgtagcatggagtcagggaaataacactggaatattaaaaggtaaccttcattctagtctgtgcattctcattagccagaaagaagactggataggtctcttcccttgctggcctccatttcattcatttatgaaacaagagactcaatgttctctgtagaaaaccttttttagaatcacttgaagaatttgtttaaaaatgcaaattcctgggctctactctcagactaagtgaatcagaagctttggtgtgggagaccatggaacctgcagttttaataaatgccccagtgatttgcatgttggagaattatcacaccaggtcactgtgctctcatgtggtggggatgctccacgattgctcttggagttgtgacttccttgggtgtgactaaagccaggtggtgccatggacatcataaatataaattatgtaagtgaaggcactgcttcagtcaggctgtaaaagctattttgaaagtggtaaggaaaaagtaggattgtaatgaagaaaatttccttcccaggttaagccttcatttggaactgcttccagtacgttacaaaaagtaataatagctaacctgtgtcactgactgtatctggtactattttaagcactatatatacattatctcaatgaatctttcccattgtgacatccggctagttttcgtggctaagagtgtactttctaacatccatgaacattgtggtccccacctgaagtttcactttgcatgttcagtgatatggtttggctctgtgttcccacccaatcttatctcaaattgtaatccccatgtgtccagggagggacctgtaatccccacctagtgacggagggaggtgattgatgatgggtgtggtgtaccccatgctgttctcgtgatagtgagtgggttctcatgagatctgatggttttataagtgtttgaaagttccctcttcactcgctgtcttgcctgctgccatgtaaaatgtgcctacttcaccctctgccatgattgtaagtttcctgaggcctccccagccatgcagaactttgacacaattaaatgtcttttctttataaatta

SEQ ID NO: 154400 - DNA, 784 bp, Homo sapiens
  Payload ID: 10346
  Gene Symbol: MRPL22
  Gene Name: mitochondrial ribosomal protein L22
  ENST ID: ENST00000439747
  CDS Start-End: 17-715
agcgggagggcgaaagatggcggcggcagtactgggacagttgggtaaggatttcttagtggttaagcgacagaagggagtcgagatggaatctgagttgacggcttgtgttgatgttgcaggtgcgttatggatacataacctgaggagccgggggaagctggccttgggtgttttacctcaatcatatatccacacaagtgcttctcttgacatttctcgaaaatgggagaagaagaataaaattgtttatcctccacaactgcctggagaacctcggagaccagcagaaatctaccactgtcgaagacaaataaaatatagcaaagacaagatgtggtatttggcaaaattgatacgaggaatgtctattgaccaggctttggctcagttggaattcaatgacaaaaaaggggccaaaataattaaagaggttctcttagaagcacaagatatggcagtgagagaccataacgtggaattcaggtccaatttatatatagctgagtccacctcaggacgaggccagtgcctgaaacgcatccgctaccatggcagaggtcgctttgggatcatggagaaggtttattgccattattttgtgaagttggtggaagggcccccacctccacctgagccaccaaagacggcagttgcccatgccaaagagtatattcagcagcttcgcagccggaccatcgttcacactctatgatgaggagattcagactccacagtgtatatattttgccatttattttctaaaaataaacaaaaattgaag

SEQ ID NO: 154401 - DNA, 3162 bp, Homo sapiens
  Payload ID: 10346
  Gene Symbol: MRPL22
  Gene Name: mitochondrial ribosomal protein L22
  ENST ID: ENST00000522038
  CDS Start-End: 10-648
gggcgaaagatggcggcggcagtactgggacagttgggtgcgttatggatacataacctgaggagccgggggaagctggccttggggcttctttcatttcacagtgttttacctcaatcatatatccacacaagtgcttctcttgacatttctcgaaaatgggagaagaagaataaaattgtttatcctccacaactgcctggagaacctcggagaccagcagaaatctaccactgtcgaagacaaataaaatatagcaaagacaagatgtggtatttggcaaaattgatacgaggaatgtctattgaccaggctttggctcagttggaattcaatgacaaaaaaggggccaaaataattaaagaggttctcttagaagcacaagatatggcagtgagagaccataacgtggaattcaggtccaatttatatatagctgagtccacctcaggacgaggccagtgcctgaaacgcatccgctaccatggcagaggtcgctttgggatcatggagaaggtttattgccattattttgtgaagttggtggaagggcccccacctccacctgagccaccaaagacggcagttgcccatgccaaagagtatattcagcagcttcgcagccggaccatcgttcacactctatgatgaggagattcagactccacagtgtatatattttgccatttattttctaaaaataaacaaaaattgaaggcaaatgctttttatgatttctcattgaattattgaaacagtgtataactgctagttgtaaatgaatatttataaggctttgcccatttcttttgagcctctgggcatatttgtatgcatttgcgacttggaaggggaaatcagctttaaacatagtaacagactatatttcaaaaggcttttggagtaactttgaaagggaatgttaactttccaactagtgtcctgcaggtggctgttttgatactggacttgaatacagtgttatgaggtaagaaaattgcttttatttcacttaattttctcttgggaccatgggaagttagagtggctgcatgttgtttcattacagtattttagggtgttcagtggtaccgtttttcctttcactgttggcacaggccagtgagtcaaaaattatattttcctttactgttttagcagtaactcgaaactacaggagtttattagatatacgaatctaaaactccaaaaacctttaactttgaaaattttcttttggttaagcaaagcctgtttttatttcttcttccaacagtgctttatattgtttggatatcttgtttaggattgatttatttttcagggtaaattcaattactgagagaggaattgaaccaatctcagcattgcattctaaaatggggcagtaggtggcactcaaccttttattagcagaaaattgttagtttcaaattagagtgttcaacactgcttccctctcattcatacacgtcttcattaagaagaagtactctttgtctacagccctagtccaacttttgcatgcaaaagaagaatcgaggatgcttgcttgttaatgcagacttctgggccccaccccaatgattcaattcactaggtcttatggggggctggtttcagaaatctatgttttaaacaaacacttccaggtaattctgttgtaggggactacgctttgagaatacggctttaggagaatgaaaaaatgtagttttattgccatgttttaagatggcattaataatagttactgtttactgggaacttgttatttgcaagctctgtgctagtattttacataattcttcacaacatcctgaaaatgtagcttttgttttaccactttacaaaggaataaaccgaagcacacagaattcaaataactatcacaagtcacacagcatgtaaatattggggctatgattgaaaggtttctaaagtagctggttctgcataccttttgagtatacagctgggtttttgtgtctctccagttaacctaatgcatgggtaaaaagacatcaggggtcagtggaataaaccaaggtgtaggacagattcattctgggtcctaagctgttgtagcatggagtcagggaaataacactggaatattaaaaggtaaccttcattctagtctgtgcattctcattagccagaaagaagactggataggtctcttcccttgctggcctccatttcattcatttatgaaacaagagactcaatgttctctgtagaaaaccttttttagaatcacttgaagaatttgtttaaaaatgcaaattcctgggctctactctcagactaagtgaatcagaagctttggtgtgggagaccatggaacctgcagttttaataaatgccccagtgatttgcatgttggagaattatcacaccaggtcactgtgctctcatgtggtggggatgctccacgattgctcttggagttgtgacttccttgggtgtgactaaagccaggtggtgccatggacatcataaatataaattatgtaagtgaaggcactgcttcagtcaggctgtaaaagctattttgaaagtggtaaggaaaaagtaggattgtaatgaagaaaatttccttcccaggttaagccttcatttggaactgcttccagtacgttacaaaaagtaataatagctaacctgtgtcactgactgtatctggtactattttaagcactatatatacattatctcaatgaatctttcccattgtgacatccggctagttttcgtggctaagagtgtactttctaacatccatgaacattgtggtccccacctgaagtttcactttgcatgttcagtgatatggtttggctctgtgttcccacccaatcttatctcaaattgtaatccccatgtgtccagggagggacctgtaatccccacctagtgacggagggaggtgattgatgatgggtgtggtgtaccccatgctgttctcgtgatagtgagtgggttctcatgagatctgatggttttataagtgtttgaaagttccctcttcactcgctgtcttgcctgctgccatgtaaaatgtgcctacttcaccctctgccatgattgtaagtttcctgaggcctccccagccatgcagaactttgacacaattaaatgtcttttctttataaatta

SEQ ID NO: 154402 - DNA, 511 bp, Homo sapiens
  Payload ID: 10346
  Gene Symbol: MRPL22
  Gene Name: mitochondrial ribosomal protein L22
  ENST ID: ENST00000519059
  CDS Start-End: 1-117
gagatggaatctgagttgacggcttgtgttgatgttgcaggtgcgttatggatacataacctgaggagccgggggaagctggccttggggaaatctaccactgtcgaagacaaataaaatatagcaaagacaagatgtggtatttggcaaaattgatacgaggaatgtctattgaccaggctttggctcagttggaattcaatgacaaaaaaggggccaaaataattaaagaggttctcttagaagcacaagatatggcagtgagagaccataacgtggaattcaggtccaatttatatatagctgagtccacctcaggacgaggccagtgcctgaaacgcatccgctaccatggcagaggtcgctttgggatcatggagaaggtttattgccattattttgtgaagttggtggaagggcccccacctccacctgagccaccaaagacggcagttgcccatgccaaagagtatattcagcagcttcgcagccggaccatcgttcacactct

SEQ ID NO: 154403 - DNA, 3176 bp, Homo sapiens
  Payload ID: 10346
  Gene Symbol: MRPL22
  Gene Name: mitochondrial ribosomal protein L22
  Uniprot ID: Q9NWU5
  ENST ID: ENST00000523037
  CDS Start-End: 42-662
ggcgcttgaactcggcggcttccgtagcgggagggcgaaagatggcggcggcagtactgggacagttgggtgcgttatggatacataacctgaggagccgggggaagctggccttgggtgttttacctcaatcatatatccacacaagtgcttctcttgacatttctcgaaaatgggagaagaagaataaaattgtttatcctccacaactgcctggagaacctcggagaccagcagaaatctaccactgtcgaagacaaataaaatatagcaaagacaagatgtggtatttggcaaaattgatacgaggaatgtctattgaccaggctttggctcagttggaattcaatgacaaaaaaggggccaaaataattaaagaggttctcttagaagcacaagatatggcagtgagagaccataacgtggaattcaggtccaatttatatatagctgagtccacctcaggacgaggccagtgcctgaaacgcatccgctaccatggcagaggtcgctttgggatcatggagaaggtttattgccattattttgtgaagttggtggaagggcccccacctccacctgagccaccaaagacggcagttgcccatgccaaagagtatattcagcagcttcgcagccggaccatcgttcacactctatgatgaggagattcagactccacagtgtatatattttgccatttattttctaaaaataaacaaaaattgaaggcaaatgctttttatgatttctcattgaattattgaaacagtgtataactgctagttgtaaatgaatatttataaggctttgcccatttcttttgagcctctgggcatatttgtatgcatttgcgacttggaaggggaaatcagctttaaacatagtaacagactatatttcaaaaggcttttggagtaactttgaaagggaatgttaactttccaactagtgtcctgcaggtggctgttttgatactggacttgaatacagtgttatgaggtaagaaaattgcttttatttcacttaattttctcttgggaccatgggaagttagagtggctgcatgttgtttcattacagtattttagggtgttcagtggtaccgtttttcctttcactgttggcacaggccagtgagtcaaaaattatattttcctttactgttttagcagtaactcgaaactacaggagtttattagatatacgaatctaaaactccaaaaacctttaactttgaaaattttcttttggttaagcaaagcctgtttttatttcttcttccaacagtgctttatattgtttggatatcttgtttaggattgatttatttttcagggtaaattcaattactgagagaggaattgaaccaatctcagcattgcattctaaaatggggcagtaggtggcactcaaccttttattagcagaaaattgttagtttcaaattagagtgttcaacactgcttccctctcattcatacacgtcttcattaagaagaagtactctttgtctacagccctagtccaacttttgcatgcaaaagaagaatcgaggatgcttgcttgttaatgcagacttctgggccccaccccaatgattcaattcactaggtcttatggggggctggtttcagaaatctatgttttaaacaaacacttccaggtaattctgttgtaggggactacgctttgagaatacggctttaggagaatgaaaaaatgtagttttattgccatgttttaagatggcattaataatagttactgtttactgggaacttgttatttgcaagctctgtgctagtattttacataattcttcacaacatcctgaaaatgtagcttttgttttaccactttacaaaggaataaaccgaagcacacagaattcaaataactatcacaagtcacacagcatgtaaatattggggctatgattgaaaggtttctaaagtagctggttctgcataccttttgagtatacagctgggtttttgtgtctctccagttaacctaatgcatgggtaaaaagacatcaggggtcagtggaataaaccaaggtgtaggacagattcattctgggtcctaagctgttgtagcatggagtcagggaaataacactggaatattaaaaggtaaccttcattctagtctgtgcattctcattagccagaaagaagactggataggtctcttcccttgctggcctccatttcattcatttatgaaacaagagactcaatgttctctgtagaaaaccttttttagaatcacttgaagaatttgtttaaaaatgcaaattcctgggctctactctcagactaagtgaatcagaagctttggtgtgggagaccatggaacctgcagttttaataaatgccccagtgatttgcatgttggagaattatcacaccaggtcactgtgctctcatgtggtggggatgctccacgattgctcttggagttgtgacttccttgggtgtgactaaagccaggtggtgccatggacatcataaatataaattatgtaagtgaaggcactgcttcagtcaggctgtaaaagctattttgaaagtggtaaggaaaaagtaggattgtaatgaagaaaatttccttcccaggttaagccttcatttggaactgcttccagtacgttacaaaaagtaataatagctaacctgtgtcactgactgtatctggtactattttaagcactatatatacattatctcaatgaatctttcccattgtgacatccggctagttttcgtggctaagagtgtactttctaacatccatgaacattgtggtccccacctgaagtttcactttgcatgttcagtgatatggtttggctctgtgttcccacccaatcttatctcaaattgtaatccccatgtgtccagggagggacctgtaatccccacctagtgacggagggaggtgattgatgatgggtgtggtgtaccccatgctgttctcgtgatagtgagtgggttctcatgagatctgatggttttataagtgtttgaaagttccctcttcactcgctgtcttgcctgctgccatgtaaaatgtgcctacttcaccctctgccatgattgtaagtttcctgaggcctccccagccatgcagaactttgacacaattaaatgtcttttctttataaatta

SEQ ID NO: 154404 - DNA, 693 bp, Homo sapiens
  Payload ID: 10346
  Gene Symbol: MRPL22
  Gene Name: mitochondrial ribosomal protein L22
  ENST ID: ENST00000614620
  CDS Start-End: 7-693
cgaaagatggcggcggcagtactgggacagttgggtgcgttatggatacataacctgaggagccgggggaagctggccttgggtgttttacctcaatcatatatccacacaagtgcttctcttgacatttctcgaaaatgggagaagaagaataaaattgtttatcctccacaactgcctggagaacctcggagaccagcagaaatctaccactgtcgaagacaaataaaatatagcaaagacaagatgtggtatttggcaaaattgatacgaggaatgtctattgaccaggctttggctcagttggaattcaatgacaaaaaaggggccaaaataattaaagaggttctcttagaagcacaagatatggcagtgagagaccataacgtggaattcaggtccaatttatatatagctgagtccacctcaggacgaggccagtgcctgaaacgcatccgctaccatggcagaggtcgctttgggatcatggagaaggtttattgccattattttgtgaagttggtggaagggcccccacctccacctgagccaccaaagacggcagttgcccatgccaaagagtatattcagcagttcgcagccggaccatcgttcacactctatgatgaggagattcagactccacagtgtatatattttgccatttattttctaaaaataaacaaaaattga

SEQ ID NO: 154405 - DNA, 919 bp, Homo sapiens
  Payload ID: 10347
  Gene Symbol: MRPL23
  Gene Name: mitochondrial ribosomal protein L23
  ENST ID: ENST00000381514
  CDS Start-End: 23-514
cccggaagcgcgcgtggccgccatggcgcggaatgtggtgtaccccctgtaccggctgggtggcccacaacttcgggtgttccgaaccaacttcttcattcagctggtgcggcccggtgtggcccagcccgaggacaccgtgcagttccggatccccatggaaatgacaagggtggacctcaggaattacctcgagggcatctataacgtgcccgtggctgctgtgcggacacgggtgcagcatggctctaacaagagaagagatcacagaaacgtgaggatcaagaagccggactacaaggtcgcctacgtgcagctggtgccgcaccctcggtccctgcctctctgtctccagcaccgctcacagctccgcacccccagaattccctgcattgtcgcctttgcgtcttggggccctgggagcaagcacgatgcctgcagtgccctgtgcgtggtggccagggcctgggctgcggtgtacgtgagtgcccgtctcatctccgtagccggctaagagtcctttcaaggccaagaattcttctctttgaccacatttccacccctccgcctgccctaggatgctctccatagtggacgctgcactttgccatggcatgccgggtggacaggactgctggggcccccgtgttccagcctctcctgcgcctccagatacggctgcttcctgggtctgggtgtctgaggggacgtccctcaaggttcccacccagctcagcctgtcaggagccgcaccctgcgaggcctgagaccacaccatgccgggtggggacacacgggccctgagtgacctgttgggcatctgcgttcaccaccccaccctgtctgagatcatccccagcaccagtccccccaaatcgcttcattatttctttgtaaatagggctttttctagtcaaaa

SEQ ID NO: 154406 - DNA, 643 bp, Homo sapiens
  Payload ID: 10347
  Gene Symbol: MRPL23
  Gene Name: mitochondrial ribosomal protein L23
  Uniprot ID: Q16540
  ENST ID: ENST00000381519
  CDS Start-End: 86-547
gggggcgctgtgccaggcggcggccgtgcggggcgggcgcgctgctccttccgcctcgcggaccccggaagcgcgcgtggccgccatggcgcggaatgtggtgtaccccctgtaccggctgggtggcccacaacttcgggtgttccgaaccaacttcttcattcagctggtgcggcccggtgtggcccagcccgaggacaccgtgcagttccggatccccatggaaatgacaagggtggacctcaggaattacctcgagggcatctataacgtgcccgtggctgctgtgcggacacgggtgcagcatggctctaacaagagaagagatcacagaaacgtgaggatcaagaagccggactacaaggtcgcctacgtgcagctggcccatggacagaccttcacgttcccagatctgtttcccgagaaagacgagagccctgaaggcagcgctgccgacgacctctacagcatgctcgaggaggagaggcagcagaggcagagcagcgacccgcggcggggcggcgtccccagctggttcgggctgtgacggggtggccagcagggacgcgccccaggtgggcagctgtggcagagcagtcccgacacctaaataaaagtcttgctgcaggagaaagagccggaa

SEQ ID NO: 154407 - DNA, 551 bp, Homo sapiens
  Payload ID: 10347
  Gene Symbol: MRPL23
  Gene Name: mitochondrial ribosomal protein L23
  ENST ID: ENST00000397294
  CDS Start-End: 20-520
ggaagcgcgcgtggccgccatggcgcggaatgtggtgtaccccctgtaccggctgggtggcccacaacttcgggtgttccgaaccaacttcttcattcagctggtgcggcccggtgtggcccagcccgaggacaccgtgcagttccggatccccatggaaatgacaagggtggacctcaggaattacctcgagggcatctataacgtgcccgtggctgctgtgcggacacgggtgcagcatggctctaacaagagaagagatcacagaaacgtgaggatcaagaagccggactacaaggtcgcctacgtgcagctgccctcccagacacccagcaaggagcaaaatggccagggcagcaccctctgtttccggagcagctgcagcaaggggtggtcaacctgggggaccagggaccccagacccgcttggagtcctgtgggtggccgcattcccaggaaggctggatccggaggaccggccaacaggatcgctcaggatggacgtcttctactcaagtaagaccttggcagccttggtcggctccatagtc

SEQ ID NO: 154408 - DNA, 613 bp, Homo sapiens
  Payload ID: 10347
  Gene Symbol: MRPL23
  Gene Name: mitochondrial ribosomal protein L23
  ENST ID: ENST00000397297
  CDS Start-End: 32-607
ctcgcggaccccggaagcgcgcgtggccgccatggcgcggaatgtggtgtaccccctgtaccggctgggtggcccacaacttcgggtgttccgaaccaacttcttcattcagctggtgcggcccggtgtggcccagcccgaggacaccgtgcagttccggatccccatggaaatgacaagggtggacctcaggaattacctcgagggcatctataacgtgcccgtggctgctgtgcggacacgggtgcagcatggctctaacaagagaagagatcacagaaacgtgaggatcaagaagccggactacaaggtcgcctacgtgcagctgccctcccagacacccagcaaggagcaaaatggccagggcagcaccctctgtttccggagcagctgcagcaaggggtggtcaacctgggggaccagggaccccagacccgcttggagtcctgtgggtggccgcattcccaggaaggctggatccggaggaccggccaacaggatcgctcaggatggacgtcttctactcaagaacctcaggcccagagtccccaggagggagcagccggcaacacggtttccgctgtggagacggggcgtcctggcttgagttcac

SEQ ID NO: 154409 - DNA, 736 bp, Homo sapiens
  Payload ID: 10347
  Gene Symbol: MRPL23
  Gene Name: mitochondrial ribosomal protein L23
  Uniprot ID: Q16540
  ENST ID: ENST00000397298
  CDS Start-End: 86-547
gggggcgctgtgccaggcggcggccgtgcggggcgggcgcgctgctccttccgcctcgcggaccccggaagcgcgcgtggccgccatggcgcggaatgtggtgtaccccctgtaccggctgggtggcccacaacttcgggtgttccgaaccaacttcttcattcagctggtgcggcccggtgtggcccagcccgaggacaccgtgcagttccggatccccatggaaatgacaagggtggacctcaggaattacctcgagggcatctataacgtgcccgtggctgctgtgcggacacgggtgcagcatggctctaacaagagaagagatcacagaaacgtgaggatcaagaagccggactacaaggtcgcctacgtgcagctggcccatggacagaccttcacgttcccagatctgtttcccgagaaagacgagagccctgaaggcagcgctgccgacgacctctacagcatgctcgaggaggagaggcagcagaggcagagcagcgacccgcggcggggcggcgtccccagctggttcgggctgtgacggggtggccagcagggacgcgccccaggtgggcagctgtggcagagcagcgacccgcggcggggcggcatccccagctggttcgggccgtgacggggcggccagcagggacgcgccccaggtgggcagctgtggcagagcagtcccgacacctaaataaaagtcttgctgcaggagaaagagccggaa

SEQ ID NO: 154410 - DNA, 805 bp, Homo sapiens
  Payload ID: 10347
  Gene Symbol: MRPL23
  Gene Name: mitochondrial ribosomal protein L23
  ENST ID: ENST00000429295
  CDS Start-End: 1-355
gtaccccctgtaccggctgggtggcccacaacttcgggtgttccgaaccaacttcttcattcagctggtgcggcccggtgtggcccagcccgaggacaccgtgcagttccggatccccatggaaatgacaagggtggacctcaggaattacctcgagggcatctataacgtgcccgtggctgctgtgcggacacgggtgcagcatggctctaacaagagaagagatcacagaaacgtgaggatcaagaagccggactacaaggtcgcctacgtgcagctggtccccaaggagcagtatcccctccttctcgtgaacccgagccacatgctgtggcctgggctggggcttggctgacacggacatattctgaactctcagcagaagatgtaagaccagttaattggcagagccggtcctgatttatcaactgccgcacgtgcatgtttcttcgcccatggacagaccttcacgttcccagatctgtttcccgagaaagacgagagccctgaaggcagcgctgccgacgacctctacagcatgctcgaggaggagaggcagcagaggcagagcagcgacccgcggcggggcggcgtccccagctggttcgggctgtgacggggtggccagcagggacgcgccccaggtgggcagctgtggcagagcagcgacccgcggcggggcggcatccccagctggttcgggccgtgacggggcggccagcagggacgcgccccaggtgggcagctgtggcagagcagtcccgacacctaaataaaagtcttgctgcaggagaaagagccggaa

SEQ ID NO: 154411 - DNA, 883 bp, Homo sapiens
  Payload ID: 10348
  Gene Symbol: MRPL24
  Gene Name: mitochondrial ribosomal protein L24
  Uniprot ID: Q96A35
  ENST ID: ENST00000361531
  CDS Start-End: 138-788
atgtgctgaaaatccgaagtgccgcggaaagtggaggtgagggccgcccgccctagaggtgcccgtccgagaggcagagctgacaaggaaggtttcgagcgttttgctggcaaagggatttcttacaacctccaggcatgcgtctttctgccctgctggccttggcatccaaggtcactctgcccccccattaccgctatgggatgagccccccaggctctgttgcagacaagaggaagaaccccccatggatcaggcggcgcccagtggttgtggaacccatctctgatgaagactggtatctgttctgtggggacacggtggagatcctagaaggcaaggatgccgggaagcagggcaaagtggttcaagttatccggcagcgaaactgggtggtcgtgggagggctgaacacacattaccgctacattggcaagaccatggattaccggggaaccatgatccctagtgaagcccccttgctccaccgccaggtcaaacttgtggatcctatggacaggaaacccactgagatcgagtggagatttactgaagcaggagagcgggtacgagtctccacacgatcagggagaattatccctaaacccgaatttcccagagctgatggcatcgtccctgaaacgtggattgatggccccaaagacacatcagtggaagatgctttagaaagaacctatgtgccctgtctaaagacactgcaggaggaggtgatggaggccatggggatcaaggagacccggaaatacaagaaggtctattggtattgagcctggggcagagcagctcctccccaacttctgtcccagccttgaaggctgaggcacttctttttcagatgccaataaagagcactttatgagtc

SEQ ID NO: 154412 - DNA, 883 bp, Homo sapiens
  Payload ID: 10348
  Gene Symbol: MRPL24
  Gene Name: mitochondrial ribosomal protein L24
  Uniprot ID: Q96A35
  ENST ID: ENST00000368211
  CDS Start-End: 140-790
agaaagtcgacgggcgtggcgggggaggggacgctgagggcccatgtgctgaaaatccgaagtgccgcggaaagtggagagctgacaaggaaggtttcgagcgttttgctggcaaagggatttcttacaacctccaggcatgcgtctttctgccctgctggccttggcatccaaggtcactctgcccccccattaccgctatgggatgagccccccaggctctgttgcagacaagaggaagaaccccccatggatcaggcggcgcccagtggttgtggaacccatctctgatgaagactggtatctgttctgtggggacacggtggagatcctagaaggcaaggatgccgggaagcagggcaaagtggttcaagttatccggcagcgaaactgggtggtcgtgggagggctgaacacacattaccgctacattggcaagaccatggattaccggggaaccatgatccctagtgaagcccccttgctccaccgccaggtcaaacttgtggatcctatggacaggaaacccactgagatcgagtggagatttactgaagcaggagagcgggtacgagtctccacacgatcagggagaattatccctaaacccgaatttcccagagctgatggcatcgtccctgaaacgtggattgatggccccaaagacacatcagtggaagatgctttagaaagaacctatgtgccctgtctaaagacactgcaggaggaggtgatggaggccatggggatcaaggagacccggaaatacaagaaggtctattggtattgagcctggggcagagcagctcctccccaacttctgtcccagccttgaaggctgaggcacttctttttcagatgccaataaagagcactttatgag

SEQ ID NO: 154413 - DNA, 514 bp, Homo sapiens
  Payload ID: 10348
  Gene Symbol: MRPL24
  Gene Name: mitochondrial ribosomal protein L24
  ENST ID: ENST00000412846
  CDS Start-End: 219-514
atgtgctgaaaatccgaagtgccgcggaaagtggaggtgagggccgcccgccctagaggtgcccgtccgagaggcaggtgcgggaagagcctatccttttccctggccatggctcagtcgcctccccagggtttatttgcaccggaagtttggagcggagctgacaaggaaggtttcgagcgttttgctggcaaagggatttcttacaacctccaggcatgcgtctttctgccctgctggccttggcatccaaggtcactctgcccccccattaccgctatgggatgagccccccaggctctgttgcagacaagaggaagaaccccccatggatcaggcggcgcccagtggttgtggaacccatctctgatgaagactggtatctgttctgtggggacacggtggagatcctagaaggcaaggatgccgggaagcagggcaaagtggttcaagttatccggcagcgaaactgggtggtcgtgggagggctgaacacacattaccgctacattgg

SEQ ID NO: 154414 - DNA, 448 bp, Homo sapiens
  Payload ID: 10348
  Gene Symbol: MRPL24
  Gene Name: mitochondrial ribosomal protein L24
  ENST ID: ENST00000420938
  CDS Start-End: 245-448
cttgtctgtaaaagggactttacgatgcatctggcaacctcaccttcctcactgggcaatgtgaagaccaaatgccggcaatgaaattcccagcattaggtttgtcatatagtagtcctctctaagcatttgttgaatactcacaggaacacttaggccagtcagcattaattgaaaataacagagctgacaaggaaggtttcgagcgttttgctggcaaagggatttcttacaacctccaggcatgcgtctttctgccctgctggccttggcatccaaggtcactctgcccccccattaccgctatgggatgagccccccaggctctgttgcagacaagaggaagaaccccccatggatcaggcggcgcccagtggttgtggaacccatctctgatgaagactggtatctgttctgtggggacacggtggagatcctagaaggcaag

SEQ ID NO: 154415 - DNA, 990 bp, Homo sapiens
  Payload ID: 10348
  Gene Symbol: MRPL24
  Gene Name: mitochondrial ribosomal protein L24
  ENST ID: ENST00000434558
  CDS Start-End: 472-990
agatctgacattttgtaactagatcggctactagcattggaagggcccacgtttcatcccttcctctagaaagcctaccggcagtttttgaatctgccctgcccccactccagcagagaaggacagggagagcattggcggtagccctgtctggaaagggcggccctttgccttgaacaggaagccacaaccacctagaaaatggagccttcttctctagaaactacaattcccagcggcctccacgcagagcatgcgcgggaatgtgccaggcgggccagccgaaccagcttgcctttcgattcccgacatgcttcatggtgtgttccggtttccttgatttcctacccccgccaaacttcctgtttccagctttctagcggcggactacaactcccagcatgctgagagagctgacaaggaaggtttcgagcgttttgctggcaaagggatttcttacaacctccaggcatgcgtctttctgccctgctggccttggcatccaaggtcactctgcccccccattaccgctatgggatgagccccccaggctctgttgcagacaagaggaagaaccccccatggatcaggcggcgcccagtggttgtggaacccatctctgatgaagactggtatctgttctgtggggacacggtggagatcctagaaggcaaggatgccgggaagcagggcaaagtggttcaagttatccggcagcgaaactgggtggtcgtgggagggctgaacacacattaccgctacattggcaagaccatggattaccggggaaccatgatccctagtgaagcccccttgctccaccgccaggtcaaacttgtggatcctatggacaggaaacccactgagatcgagtggagatttactgaagcaggagagcgggtacgagtctccacacgatcagggagaattatccctaaacccgaatttcccagagctgatggcatcgtccctgaaacgtggattgatggc

SEQ ID NO: 154416 - DNA, 716 bp, Homo sapiens
  Payload ID: 10349
  Gene Symbol: MRPL27
  Gene Name: mitochondrial ribosomal protein L27
  Uniprot ID: Q9P0M9
  ENST ID: ENST00000225969
  CDS Start-End: 45-491
cggaagtagaaacttttcgagaccggaagtgagtgatcgaaagcatggcgtcggtggtgttggcgctgaggacccggacagccgttacatccttgctaagccccactccggctacagctcttgctgtcagatacgcatccaagaagtcgggtggtagctccaaaaacctcggtggaaagtcatcaggcagacgccaaggcattaagaaaatggaaggtcactatgttcatgctgggaacatcattgcaacacagcgccatttccgctggcacccaggtgcccatgtgggtgttgggaagaataaatgtctgtatgccctggaagaggggatagtccgctacactaaggaggtctacgtgcctcatcccagaaacacggaggctgtggatctgatcaccaggctgcccaagggtgctgtgctctacaagacttttgtccacgtggttcctgccaagcctgagggcaccttcaaactggtagctatgctttgatgtcctgttgaggccatcggacagagactggagcccaggtgacaggagatggtgataccagaagtcaagggttggggtggcgacacggcctcccgaggaagaggtctgcttgatggtgactctgcaggagactctgaagtgactgctgggaaaccctttgggagacctgacctggggccaaaaataaagtgagccagcgtcatgaacgcatgctatttagggaca

SEQ ID NO: 154417 - DNA, 2441 bp, Homo sapiens
  Payload ID: 10349
  Gene Symbol: MRPL27
  Gene Name: mitochondrial ribosomal protein L27
  ENST ID: ENST00000442592
  CDS Start-End: 38-322
agaaacttttcgagaccggaagtgagtgatcgaaagcatggcgtcggtggtgttggcgctgaggacccggacagccgttacatccttgctaagccccactccggctacagctcttgctgtcagatacgcatccaagaagtcgggtggtagctccaaaaacctcggtggaaagtcatcaggcagacgccaaggcattaagaaaatggaaggtcactatgttcatgctgggaacatcattgcaacacagcgccatttccgctggcacccaggtgcccatgtgagttgctccgttgctgcccccctttttccttttctaggttgacctctccttgcccctaagcatggtaataacagttgcatgtattgagtgcttaccaaatggcaagcattgtgctgattcccatgcctacacgatctcatttcttccttaccacatccctgtaagtaaggtgaaatgccagagacctagacggggtggaaggagcaagtgactgctgggatttgcaccaggtctgcctaactcccagatcactatgatttgccctggtgttgcattggcctggtattcttggttctcctttctaaccctcagttcttggaggacaagatacctggtgatttaaaatattattttagtcttgggaaactaatttcaatttattagtttttcattattctaagacttcttcctttgtataaacttacttgcagatggttgaaagatagcttgaatttaatgaaatagaattcagtgtgccaggagttaggttcataccaggtggggatttcagtttcagcaagttggcatcatttttatagggtaggacagttctttgttacagagacataacgatactgtactctccacattattttaaatattagttgcctttgtaaacagtttcccctcccccacccctttttcgataattttagtaggtacaaaaaggttgatagtaacctgtatttatttcaaagatgctaatttgtatgtgaattgattatgtatgtagtagctttttaccttttagaacttaagacattagatgtgtggctatgtcaacaataataatcaaagctaacacattttgagctagacagtattctaggccctttatgattgttgagcattaatcctcaaaatgaccctgtaaaatagttaatattatccccatttgacagacgaaaaaatagaggcacagtgaagtaacttgcctaagaccacacaggagtaagtagcagtgctggtatttgaaccaggcatcctggctccagagcccattcttttaatcagagagacagagaataatgctggactacctgggtaaaatttgccacacacccagcctgaagttctaaaagaaaaagctaaaaaatatggttaaaaactgtatatacaacacagtttaatctctctgcttcatatttcacatctgaaaagtggcgttggaaataatacctctttcactaggtgagaattaaatgacttaatgtgtattaaagggcttacatgggtattagctaatgcagtagtatgattgttttattagcatatgcattatccatatagctttggtttatattttccatagagcctaaactttatagatcactatctaaatgaaaatttacatcaaactagtgttttaatatgacagttctagtgttgtttaagtctaagtgaagatttagggcatcttcctgggttttgggatttgtgcagtgtggcttctgaccagctgcatagacatggctccaggtaacagtccctgggactgagcagtggcccatgttggctgttggagctttcttttccctcatttgttatgagtcaataaagaagcagaaggtttggacgtgctagccagtgggaaagggaacctgagatggagctctctgatcaccctttcagccccagggcccggctctgtgtgagaagtctgtcccaaaattctgggacggaccacctcgctgaccagctgaccagctgaccaggtctgtgtgttgcaggtgggtgttgggaagaataaatgtctgtatgccctggaagaggggatagtccgctacactaaggaggtctacgtgcctcatcccagaaacacggaggctgtggatctgatcaccaggctgcccaagggtgctgtgctctacaagacttttgtccacgtggttcctgccaagcctgagggcaccttcaaactggtagctatgctttgatgtcctgttgaggccatcggacagagactggagcccaggtgacaggagatggtgataccagaagtcaagggttggggtggcgacacggcctcccgaggaagaggtctgcttgatggtgactctgcaggagactctgaagtgactgctgggaaaccctttgggagacctgacctggggccaaaaataaagtgagccagcgtcatgaacgcatgctatttagggac

SEQ ID NO: 154418 - DNA, 732 bp, Homo sapiens
  Payload ID: 10349
  Gene Symbol: MRPL27
  Gene Name: mitochondrial ribosomal protein L27
  ENST ID: ENST00000507088
  CDS Start-End: 216-497
ggtggagccgtgagtgagggcgtttgaagagcacttgtctttctcctgcctcagcagcacggacgggttccttggcggttggggatttggttacatccttgctaagccccactccggctacagctcttgctgtcagatacgcatccaagaagtcgggtggtagctccaaaaacctcggtggaaagtcatcaggcagacgccaaggcattaagaaaatggaaggtcactatgttcatgctgggaacatcattgcaacacagcgccatttccgctggcacccaggtgcccatgtgggtgttgggaagaataaatgtctgtatgccctggaagaggggatagtccgctacactaaggaggtctacgtgcctcatcccagaaacacggaggctgtggatctgatcaccaggctgcccaagggtgctgtgctctacaagacttttgtccacgtggttcctgccaagcctgagggcaccttcaaactggtagctatgctttgatgtcctgttgaggccatcggacagagactggagcccaggtgacaggagatggtgataccagaagtcaagggttggggtggcgacacggcctcccgaggaagaggtctgcttgatggtgactctgcaggagactctgaagtgactgctgggaaaccctttgggagacctgacctggggccaaaaataaagtgagccagcgtcatgaacgcatgctatttagggacacacctggatg

SEQ ID NO: 154419 - DNA, 636 bp, Homo sapiens
  Payload ID: 10349
  Gene Symbol: MRPL27
  Gene Name: mitochondrial ribosomal protein L27
  ENST ID: ENST00000508200
  CDS Start-End: 1-409
aagccccactccggctacagctcttgctgtcagatacgcatccaagaagtcgggtggtagctccaaaaacctcggtggaaagtcatcaggcagacgccaaggcattaagaaaatggaaggtcactatgttcatgctgggaacatcattgcaacacagcgccatttccgctggcacccaggtgcccatgtctgtgtgttgcaggtgggtgttgggaagaataaatgtctgtatgccctggaagaggggatagtccgctacactaaggaggtctacgtgcctcatcccagaaacacggaggctgtggatctgatcaccaggctgcccaagggtgctgtgctctacaagacttttgtccacgtggttcctgccaagcctgagggcaccttcaaactggtagctatgctttgatgtcctgttgaggccatcggacagagactggagcccaggtgacaggagatggtgataccagaagtcaagggttggggtggcgacacggcctcccgaggaagaggtctgcttgatggtgactctgcaggagactctgaagtgactgctgggaaaccctttgggagacctgacctggggccaaaaataaagtgagccagcgtcatgaacgcatgctatttagggacaca

SEQ ID NO: 154420 - DNA, 742 bp, Homo sapiens
  Payload ID: 10349
  Gene Symbol: MRPL27
  Gene Name: mitochondrial ribosomal protein L27
  ENST ID: ENST00000503633
  CDS Start-End: 27-281
gagaccggaagtgagtgatcgaaagcatggcgtcggtggtgttggcgctgaggacccggacagccgttacatccttgctaagccccactccggctacagctcttgctgtcagatacgcatccaagaagtcgggtggtagctccaaaaacctcggtggaaagtcatcaggcagacgccaaggcattaagaaaatggaaggtcactatgttcatgctgggaacatcattgcaacacagcgccatttccgctggcacccaggtgcccattggcgttggaaataatacctctttcactaggtctgtgtgttgcaggtgggtgttgggaagaataaatgtctgtatgccctggaagaggggatagtccgctacactaaggaggtctacgtgcctcatcccagaaacacggaggctgtggatctgatcaccaggctgcccaagggtgctgtgctctacaagacttttgtccacgtggttcctgccaagcctgagggcaccttcaaactggtagctatgctttgatgtcctgttgaggccatcggacagagactggagcccaggtgacaggagatggtgataccagaagtcaagggttggggtggcgacacggcctcccgaggaagaggtctgcttgatggtgactctgcaggagactctgaagtgactgctgggaaaccctttgggagacctgacctggggccaaaaataaagtgagccagcgtcatgaacgcatgctatttagggac

SEQ ID NO: 154421 - DNA, 869 bp, Homo sapiens
  Payload ID: 10349
  Gene Symbol: MRPL27
  Gene Name: mitochondrial ribosomal protein L27
  ENST ID: ENST00000511860
  CDS Start-End: 384-665
aaaattagctgggcgtggtggcgtacacctgtaatcccagctacttgggaggctgaggcaggagaatcgcttgaatccgggacgcggaggttgcagggagccaggactatgccattgcactccagcttgggcaacaagagtgaagctccgtctttaaaaaaaaaaaagaaagaaagtcgtgggtgagcctgaaaccgaagcctttctggatgtactgggctccccaagtctgttctggcccctccgtggtgcatgaggttacatccttgctaagccccactccggctacagctcttgctgtcagatacgcatccaagaagtcgggtggtagctccaaaaacctcggtggaaagtcatcaggcagacgccaaggcattaagaaaatggaaggtcactatgttcatgctgggaacatcattgcaacacagcgccatttccgctggcacccaggtgcccatgtgggtgttgggaagaataaatgtctgtatgccctggaagaggggatagtccgctacactaaggaggtctacgtgcctcatcccagaaacacggaggctgtggatctgatcaccaggctgcccaagggtgctgtgctctacaagacttttgtccacgtggttcctgccaagcctgagggcaccttcaaactggtagctatgctttgatgtcctgttgaggccatcggacagagactggagcccaggtgacaggagatggtgataccagaagtcaagggttggggtggcgacacggcctcccgaggaagaggtctgcttgatggtgactctgcaggagactctgaagtgactgctgggaaaccctttgggagacctgacctggggccaaaaataaagtgagccagcgtcatg

SEQ ID NO: 154422 - DNA, 1098 bp, Homo sapiens
  Payload ID: 10350
  Gene Symbol: MRPL28
  Gene Name: mitochondrial ribosomal protein L28
  Uniprot ID: Q13084
  ENST ID: ENST00000199706
  CDS Start-End: 37-807
cggttccggtgggctctgaaccctgaaaggctcgcgatgcctctacacaagtatcccgtgtggctctggaagcggctgcagctgcgggagggcatctgttcccgcctgcccggccactacctgcgctccctggaggaggagcggacgcccactcccgtgcactataggcctcatggggccaagttcaagatcaaccccaagaacgggcagcgggagcgtgtggaggacgtgcccattcccatctactttccccccgaatcccagcgggggttgtggggcggcgagggctggatcctgggccaaatatatgccaacaacgacaagctctccaagaggctgaagaaagtgtggaagccacagctgtttgagcgagagttctacagtgagatcctggacaagaagttcacagtgactgtgaccatgcggaccctggacctcatcgatgaggcttatgggctcgacttttacatcctcaagaccccgaaggaggacctgtgctccaagtttgggatggacctgaagcgagggatgctgctgcggcttgcccggcaggacccccagctgcaccccgaggaccccgagcggcgggcagccatctacgacaagtacaaggaatttgccatcccagaggaggaggcagagtgggtgggcctcacgctggaggaggccattgagaagcagagacttttggaggagaaggaccctgtacccctgttcaagatctatgtggcggagctgatccagcagctgcagcagcaggcactgtcagagccggcggtggtgcagaagagagccagtggccagtgaccacacagctcctccatgcctgaccaacaggcccagctttccctgccaggccctttgcactgaggacacagatcccggggagctgtgagggccaccggtgggcagtgggtggatcctggtttcgtgtgctgcccatgcaccttccagcccggggccagcttggcagggatccccaggaggcctgggccgcccagaggctcctctcaggctgggccccgacgtttgcggcagtgttccttgtgcccgtggggccgggagcgagtaaagtctgggccaggctgtgtgtgtgta

SEQ ID NO: 154423 - DNA, 865 bp, Homo sapiens
  Payload ID: 10350
  Gene Symbol: MRPL28
  Gene Name: mitochondrial ribosomal protein L28
  Uniprot ID: Q13084
  ENST ID: ENST00000389675
  CDS Start-End: 33-803
aaccctgaaaggtgggcgcgggcaggctcgcgatgcctctacacaagtatcccgtgtggctctggaagcggctgcagctgcgggagggcatctgttcccgcctgcccggccactacctgcgctccctggaggaggagcggacgcccactcccgtgcactataggcctcatggggccaagttcaagatcaaccccaagaacgggcagcgggagcgtgtggaggacgtgcccattcccatctactttccccccgaatcccagcgggggttgtggggcggcgagggctggatcctgggccaaatatatgccaacaacgacaagctctccaagaggctgaagaaagtgtggaagccacagctgtttgagcgagagttctacagtgagatcctggacaagaagttcacagtgactgtgaccatgcggaccctggacctcatcgatgaggcttatgggctcgacttttacatcctcaagaccccgaaggaggacctgtgctccaagtttgggatggacctgaagcgagggatgctgctgcggcttgcccggcaggacccccagctgcaccccgaggaccccgagcggcgggcagccatctacgacaagtacaaggaatttgccatcccagaggaggaggcagagtgggtgggcctcacgctggaggaggccattgagaagcagagacttttggaggagaaggaccctgtacccctgttcaagatctatgtggcggagctgatccagcagctgcagcagcaggcactgtcagagccggcggtggtgcagaagagagccagtggccagtgaccacacagctcctccatgcctgaccaacaggcccagctttccctgccaggccctttgcactg

SEQ ID NO: 154424 - DNA, 722 bp, Homo sapiens
  Payload ID: 10350
  Gene Symbol: MRPL28
  Gene Name: mitochondrial ribosomal protein L28
  ENST ID: ENST00000447696
  CDS Start-End: 67-722
aaaggtgggcgcgggcaggtggggtgtgggggggcgccggggcagaaggggaggggcaggctcgcgatgcctctacacaagtatcccgtgtggctctggaagcggctgcagctgcgggagggcatctgttcccgcctgcccggccactacctgcgctccctggaggaggagcggacgcccactcccgtgcactataggcctcatggggccaagttcaagatcaaccccaagaacgggcagcgggagcgtgtggaggacgtgcccattcccatctactttccccccgaatcccagcgggggttgtggggcggcgagggctggatcctgggccaaatatatgccaacaacgacaagctctccaagaggctgaagaaagtgtggaagccacagctgtttgagcgagagttctacagtgagatcctggacaagaagttcacagtgactgtgaccatgcggaccctggacctcatcgatgaggcttatgggctcgacttttacatcctcaagaccccgaaggaggacctgtgctccaagtttgggatggacctgaagcgagggatgctgctgcggcttgcccggcaggacccccagctgcaccccgaggaccccgagcggcgggcagccatctacgacaagtacaaggaatttgccatcccagaggaggaggcagagtgggtgggcctcacgctggaggaggccattgagaagcagagacttttgga

SEQ ID NO: 154425 - DNA, 619 bp, Homo sapiens
  Payload ID: 10350
  Gene Symbol: MRPL28
  Gene Name: mitochondrial ribosomal protein L28
  ENST ID: ENST00000450882
  CDS Start-End: 37-619
cgggtgagagccgggggccggggtagcgggctcgcgatgcctctacacaagtatcccgtgtggctctggaagcggctgcagctgcgggagggcatctgttcccgcctgcccggccactacctgcgctccctggaggaggagcggacgcccactcccgtgcactataggcctcatggggccaagttcaagatcaaccccaagaacgggcagcgggagcgtgtggaggacgtgcccattcccatctactttccccccgaatcccagcgggggttgtggggcggcgagggctggatcctgggccaaatatatgccaacaacgacaagctctccaagaggctgaagaaagtgtggaagccacagctgtttgagcgagagttctacagtgagatcctggacaagaagttcacagtgactgtgaccatgcggaccctggacctcatcgatgaggcttatgggctcgacttttacatcctcaagaccccgaaggaggacctgtgctccaagtttgggatggacctgaagcgagggatgctgctgcggcttgcccggcaggacccccagctgcaccccgaggaccccgagcggcgggcagccatctacgacaagtacaaggaatttg

SEQ ID NO: 154426 - DNA, 800 bp, Homo sapiens
  Payload ID: 10350
  Gene Symbol: MRPL28
  Gene Name: mitochondrial ribosomal protein L28
  ENST ID: ENST00000441883
  CDS Start-End: 79-800
acaggggccggagtgagaaccgggggccggggtagggggtagcgggtgagagccgggggccggggtagcgggctcgcgatgcctctacacaagtatcccgtgtggctctggaagcggctgcagctgcgggagggcatctgttcccgcctgcccggccactacctgcgctccctggaggaggagcggacgcccactcccgtgcactataggcctcatggggccaagttcaagatcaaccccaagaacgggcagcgggagcgtgtggaggacgtgcccattcccatctactttccccccgaatcccagcgggggttgtggggcggcgagggctggatcctgggccaaatatatgccaacaacgacaagctctccaagaggctgaagaaagtgtggaagccacagctgtttgagcgagagttctacagtgagatcctggacaagaagttcacagtgactgtgaccatgcggaccctggacctcatcgatgaggcttatgggctcgacttttacatcctcaagaccccgaaggaggacctgtgctccaagtttgggatggacctgaagcgagggatgctgctgcggcttgcccggcaggacccccagctgcaccccgaggaccccgagcggcgggcagccatctacgacaagtacaaggaatttgccatcccagaggaggaggcagagtgggtgggcctcacgctggaggaggccattgagaagcagagacttttggaggagaaggaccctgtacccctgttcaagatctatgtggcggagctgatccagcagctgcagcagca

SEQ ID NO: 154427 - DNA, 310 bp, Homo sapiens
  Payload ID: 10350
  Gene Symbol: MRPL28
  Gene Name: mitochondrial ribosomal protein L28
  ENST ID: ENST00000429738
  CDS Start-End: 150-296
tccggcaaaggagcacgctgagtgaagaaccgcagttctggcaaacaggactgataaagtaggggtgaggtggggtgactcaggccgggggagcaaccagaggccgtggggagtcggggtaaagttaggatggggaggaggcctgtgtgatgagcagagcaggtgggagaggcgagcagagcaggtgggggaggcgagcagagcttcgaggcctgggccgcccagaggctcctctcaggctgggccccgacgtttgcggcagtgttccttgtgcccgtggggccgggagcgagtaaagtctgggccaggc

SEQ ID NO: 154428 - DNA, 1706 bp, Homo sapiens
  Payload ID: 10351
  Gene Symbol: MRPL3
  Gene Name: mitochondrial ribosomal protein L3
  Uniprot ID: P09001
  ENST ID: ENST00000264995
  CDS Start-End: 149-1195
agagagcatcggccggcgaccgttccggcggccattgcgaaaacttccccacggctactgcgtccacgtggcggtggcgtggggactccctgaaagcagagcggcagggcgcccggaagtcgtgagtcgagtcttcccgggctaatccatgccgggttggaggctgctgacgcaggtcggcgcccaggtgctgggtcgactcggggacggcctgggtgctgccctgggcccggggaacagaacacacatctggctttttgttagaggtcttcatggaaagagtggtacatggtgggatgagcatctttctgaagaaaatgtcccattcattaagcagttggtctctgatgaagataaagcccaattagcaagtaaactgtgtcctctgaaagatgaaccatggcctatacatccttgggaaccaggttcctttagagttggtcttattgccttgaagctgggcatgatgcctttatggaccaaggatggtcaaaagcatgtggtcacattacttcaggtacaagactgtcatgtcttaaaatatacgtcaaaggaaaactgtaatggaaaaatggcaaccctgtctgtaggaggaaaaactgtatcacgttttcgtaaagctacatccatattggaattttaccgggaacttggattgccgccgaaacagacagttaaaatctttaatataacagataatgctgcaattaaaccaggcactcctctttatgctgctcactttcgtccaggacagtatgtggatgtcacagccaaaactattggtaaaggttttcaaggtgtcatgaaaagatggggatttaaaggccagcctgctacgcatggtcaaacgaaaacccacaggagacctggagctgttgcaactggtgatattggcagagtctggcctggaactaaaatgcctggaaaaatgggaaacatatacaggacagaatatggactgaaagtgtggagaataaacacaaagcacaacataatctatgtaaatggctctgtacctggacataaaaattgcttagtaaaggtcaaagattctaaactgcctgcatataaggatctcggtaaaaatctaccattccctacatattttcctgatggagatgaagaggaactgccagaagatttgtatgatgaaaacgtgtgtcagcccggtgcgccttctattacatttgcctaacatctttggacgtggcagaaccttacatattctgtgagcttcgatgagccagagtgatatcataaccaccagaaatcatactctcctttcttagtcacaacaaaatcacacatgtcatctttgtcaagggcataaatatatcattcatacccccattaaattttgttagaaaaattaccacattaaatatatgagttaagtagattggatttgctgaaattggtgttgggcatattagcaaaatattcttaatttgtggactcgattcttttttactacatatttcccaagttatcttaagatgtctgtaaatttaacttttattaaagttttgtcaatctttgtgaaatagtggttgtggaacagtagaaaaccatatggggactatagtgcaacctatttgggtaaagaaaccatttgctaaaatggagaaagtaaatagatttttatttaaattacagaaacatgttaaaggccggacaaaggaaagacaataaaatcataaattatc

SEQ ID NO: 154429 - DNA, 1457 bp, Homo sapiens
  Payload ID: 10351
  Gene Symbol: MRPL3
  Gene Name: mitochondrial ribosomal protein L3
  ENST ID: ENST00000425847
  CDS Start-End: 163-1290
tttctttccgtcgcagagagcatcggccggcgaccgttccggcggccattgcgaaaacttccccacggctactgcgtccacgtggcggtggcgtggggactccctgaaagcagagcggcagggcgcccggaagtcgtgagtcgagtcttcccgggctaatccatgccgggttggaggctgctgacgcaggtcggcgcccaggtgctgggtcgactcggggacggcctgggtgctgccctgggcccggggaacagggtaacgactaacagtttaaatgtgagccttatccgaaggaatgtggggagtgaggaaaaggttggagacctgaaaaaaagaacacacatctggctttttgttagaggtcttcatggaaagagtggtacatggtgggatgagcatctttctgaagaaaatgtcccattcattaagcagttggtctctgatgaagataaagcccaattagcaagtaaactgtgtcctctgaaagatgaaccatggcctatacatccttgggaaccaggttcctttagagttggtcttattgccttgaagctgggcatgatgcctttatggaccaaggatggtcaaaagcatgtggtcacattacttcaggtacaagactgtcatgtcttaaaatatacgtcaaaggaaaactgtaatggaaaaatggcaaccctgtctgtaggaggaaaaactgtatcacgttttcgtaaagctacatccatattggaattttaccgggaacttggattgccgccgaaacagacagttaaaatctttaatataacagataatgctgcaattaaaccaggcactcctctttatgctgctcactttcgtccaggacagtatgtggatgtcacagccaaaactattggtaaaggttttcaaggtgtcatgaaaagatggggatttaaaggccagcctgctacgcatggtcaaacgaaaacccacaggagacctggagctgttgcaactggtgatattggcagagtctggcctggaactaaaatgcctggaaaaatgggaaacatatacaggacagaatatggactgaaagtgtggagaataaacacaaagcacaacataatctatgtaaatggctctgtacctggacataaaaattgcttagtaaaggtcaaagattctaaactgcctgcatataaggatctcggtaaaaatctaccattccctacatattttcctgatggagatgaagaggaactgccagaagatttgtatgatgaaaacgtgtgtcagcccggtgcgccttctattacatttgcctaacatctttggacgtggcagaaccttacatattctgtgagcttcgatgagccagagtgatatcataaccaccagaaatcatactctcctttcttagtcacaacaaaatcacacatgtcatctttgtcaagggcataaatatatcattcatacccccattaaattttgtt

SEQ ID NO: 154430 - DNA, 659 bp, Homo sapiens
  Payload ID: 10351
  Gene Symbol: MRPL3
  Gene Name: mitochondrial ribosomal protein L3
  ENST ID: ENST00000512877
  CDS Start-End: 131-659
accgttccggcggccattgcgaaaacttccccacggctactgcgtccacgtggcggtggcgtggggactccctgaaagcagagcggcagggcgcccggaagtcgtgagtcgagtcttcccgggctaatccatgccgggttggaggctgctgacgcaggtcggcgcccaggtgctgggtcgactcggggacggcctgggtgctgccctgggcccggggaacagaacacacatctggctttttgttagaggtcttcatggaaagagtggtacatggtgggatgagcatctttctgaagaaaatgtcccattcattaagcagttggtctctgatgaagataaagcccaattagcaagtaaactgtgtcctctgaaagatgaaccatggcctatacatccttgggaaccaggttcctttagagttggtcttattgccttgaagctgggcatgatgcctttatggaccaaggatggtcaaaagcatgtggtcacattacttcagaaagctacatccatattggaattttaccgggaacttggattgccgccgaaacagacagttaaaatctttaatataacagataatgctgcaattaaaccaggcactcctctttatgctgctcactttcgtccaggacagtatgtggatgtcacagccaaaa

SEQ ID NO: 154431 - DNA, 848 bp, Homo sapiens
  Payload ID: 10351
  Gene Symbol: MRPL3
  Gene Name: mitochondrial ribosomal protein L3
  ENST ID: ENST00000507669
  CDS Start-End: 384-848
gcggccattgcgaaaacttccccacggctactgcgtccacgtggcggtggcgtggggactccctgaaagcagagcggcagggcgcccggaagtcgtgagtcgagtcttcccgggctaatccatgccgggttggaggctgctgacgcaggtcggcgcccagaacacacatctggctttttgttagaggtcttcatggaaagagtggtacatggtgggatgagcatctttctgaagaaaatgtcccattcattaagcagttggtctctgatgaagataaagcccaattagcaagtaaactgtgtcctctgaaagatgaaccatggcctatacatccttgggaaccaggttcctttagagttggtcttattgccttgaagctgggcatgatgcctttatggaccaaggatggtcaaaagcatgtggtcacattacttcaggtacaagactgtcatgtcttaaaatatacgtcaaaggaaaactgtaatggaaaaatggcaaccctgtctgtaggaggaaaaactgtatcacgttttcgtaaagctacatccatattggaattttaccgggaacttggattgccgccgaaacagacagttaaaatctttaatataacagataatgctgcaattaaaccaggcactcctctttatgctgctcactttcgtccaggacagtatgtggatgtcacagccaaaactattggtaaaggttttcaaggtgtcatgaaaagatggggatttaaaggccagcctgctacgcatggtcaaacgaaaacccacaggagacctggagctgttgcaactggtgatattggcagagtctggcctggaactaaaatgcctggaaaa

SEQ ID NO: 154432 - DNA, 532 bp, Homo sapiens
  Payload ID: 10351
  Gene Symbol: MRPL3
  Gene Name: mitochondrial ribosomal protein L3
  ENST ID: ENST00000510154
  CDS Start-End: 448-532
cattgcgaaaacttccccacggctactgcgtccacgtggcggtggcgtggggactccctgaaagcagagcggcagggcgcccggaagtcgtgagtcgagtcttcccgggctaatccatgccgggttggaggctgctgacgcagggtaacgactaacagtttaaatgtgagccttatccgaaggaatgtggggagtgaggaaaaggttggagacctgaaaaaaagaacacacatctggctttttgttagaggtcttcatggaaagagtggtacatggtgggatgagcatctttctgaagaaaatgtcccattcattaagcagttggtctctgatgaagataaagcccaattagcaagtaaactgtgtcctctgaaagatgaaccatggcctatacatccttgggaaccaggttcctttagagttggtcttattgccttgaagctgggcatgatgcctttatggaccaaggatggtcaaaagcatgtggtcacattacttcaggtacaagactgtcatgtcttaaaatatacgt

SEQ ID NO: 154433 - DNA, 1377 bp, Homo sapiens
  Payload ID: 10351
  Gene Symbol: MRPL3
  Gene Name: mitochondrial ribosomal protein L3
  ENST ID: ENST00000511168
  CDS Start-End: 1-1090
tttctttccgtcgcagagagcatcggccggcgaccgttccggcggccattgcgaaaacttccccacggctactgcgtccacgtggcggtggcgtggggactccctgaaagcagagcggcagggcgcccggaagtcaacacacatctggctttttgttagaggtcttcatggaaagagtggtacatggtgggatgagcatctttctgaagaaaatgtcccattcattaagcagttggtctctgatgaagataaagcccaattagcaagtaaactgtgtcctctgaaagatgaaccatggcctatacatccttgggaaccaggttcctttagagttggtcttattgccttgaagctgggcatgatgcctttatggaccaaggatggtcaaaagcatgtggtcacattacttcaggtacaagactgtcatgtcttaaaatatacgtcaaaggaaaactgtaatggaaaaatggcaaccctgtctgtaggaggaaaaactgtatcacgttttcgtaaagctacatccatattggaattttaccgggaacttggattgccgccgaaacagacagttaaaatctttaatataacagataatgctgcaattaaaccaggcactcctctttatgctgctcactttcgtccaggacagtatgtggatgtcacagccaaaactattggtaaaggttttcaaggtgtcatgaaaagatggggatttaaaggccagcctgctacgcatggtcaaacgaaaacccacaggagacctggagctgttgcaactggtgatattggcagagtctggcctggaactaaaatgcctggaaaaatgggaaacatatacaggacagaatatggactgaaagtgtggagaataaacacaaagcacaacataatctatgtaaatggctctgtacctggacataaaaattgcttagtaaaggtcaaagattctaaactgcctgcatataaggatctcggtaaaaatctaccattccctacatattttcctgatggagatgaagaggaactgccagaagatttgtatgatgaaaacgtgtgtcagcccggtgcgccttctattacatttgcctaacatctttggacgtggcagaaccttacatattctgtgagcttcgatgagccagagtgatatcataaccaccagaaatcatactctcctttcttagtcacaacaaaatcacacatgtcatctttgtcaagggcataaatatatcattcatacccccattaaattttgttagaaaaattaccacattaaatatatgagttaagtagattggatttgctgaaattggtgttgggcatattagcaaaatattcttaatttgtggactcgattcttttttactacatatttcc

SEQ ID NO: 154434 - DNA, 2605 bp, Homo sapiens
  Payload ID: 10352
  Gene Symbol: MRPL30
  Gene Name: mitochondrial ribosomal protein L30
  Uniprot ID: Q8TCC3
  ENST ID: ENST00000338148
  CDS Start-End: 199-684
ctctttctagggactttcctgagtgggagggatttcgccggaacaaaaatgcctcagtttggaggtcgcgctcactgcgacggcaggctttgagtgtagcacttggtagttcttcctctgctctgcttcccttcggaggaaaatttcaggctgaaggtttagcgggtgccgcctctaaagagagcaatcactacacttatggctgggattttgcgcttagtagttcaatggcccccaggcagactacagactgtgacaaaaggtgtggagtctcttatttgtacagattggattcgtcacaaattcaccagatcaagaattccagaaaaagtgtttcaggcctcacctgaagatcatgaaaaatacggtggggatccacagaaccctcataaactgcatattgttaccagaataaaaagtacaagaagacgtccatattgggaaaaagatataataaagatgcttggattagaaaaagcacatacccctcaagttcacaagaatatcccttcagtgaatgcaaaattgaaagtagttaagcatttgataagaatcaagcccttgaagttgccacaaggacttccagcagaggagaacatgtctaacacgtgcctcaaaagcactggggagttagtagtgcagtggcatctgaaacctgtggagcagaaagcacatgagtcctaatgccccagcagcttccgattggaaaatgcaaattgtttttatttaaagatggtgagaaagtgttttcattaaaatatgttttcaaaaccattttcaggccgggcacggtggctcacctgtaatcccagcactttgggaggccaaggcgggcagatcacctgaggtcaagagttcgagaccagcctgaccaacatggagaaacccccatctctactgaaaatacagaattagccaggcatggtggcacatgcctgtaacccagctactcgggaggctgaagcaggagaatcacttgaacccgggaggcagaggttgcagtgagctgagatggtgccactgtactccagcctgggtgataggatgagactccatctcaggggaaaaaaaaaaatttttttttcactgactaaacctgctgcagctctcttttactacagacttggagattttagtttaatttggtttaattctctgtcctttccctttcactgtttcactccaaaacatgtaagaatggcaatgtttgaacatctgcgtttgggtctactgccaccttagcaagcctcattaaccattttataaaaattgcgttagtattgttgttgttgtttttgagacagggtcttgctctgtcacccaagctggaatacagtggcatgatttcagttcactgcagcctcgacctcccaggctcaagtgatcctcccacctcagcctccagagtagctaggactacaggcagtgtgccaccacatccagctaattttttaaagttttttcatagagacagggactcactatgttgtccaagctggtctcaaactcctgggttcaagccatcctcccacctcagcctcccaaaatgctgggattacaggcatgagccactgtacccagccaaaattgttttcttttttaagtgaattcaacaatttctgtgagtggctctttgcatgaacactgtgcaaggtgttggagaaatccaaagctgaccaaaacatggtccccaccttttggagcttacagtctgttctggggaacagagattcagccaaagtcaagaaacactggatgccagctagattatctgttctgtgctttggtgtctataagtacatatgtggatatgggttcattttatccctaaacttagtaccaaaccagcatttaatatctaattataaatctaatttggcctaaactttattattgcacactgcctgaacaaaacctatttgtctctatgtaaattttttcctcatggaacaagggtgtgaaatgaaaatattttaggatttattcaaaaacagactattctgttttcagcttcagaattgttctttgaatcctaaggaacctctgtcaacagttgaggttgctgttgaaaagaaagaagaaggaggcggaaatctctcagggagaattatttcctttcttttctattttagatacctggaggggtggggagaagtaagaattgtaagggaggttcagtagtggggaattctgtgacagctgattgaagatgatgatgaagaacctctgcattctagttaccctttgcttcccttcacctcttgtaaaatttggcttggcaacaatgacattgtcatgcttattgtcccaatatccatcctgtcgtagatcttaatgtttttgatcgttgcgttaaagtggaagtgccacccacagtgaaaccagatcccattaataaataagcttaaaggcaactgcagttttaattccatagttattgaatatccagtgtgtgtaaggcctggaggggagccaaaggacactaacttctaagagctccgtctagttggagagaaacctgtgtgccacaacatacagtgtccttgcttatgtggggtcgaagacatctgtgaaaataaaagcagcctctgctaatttagcgcca

SEQ ID NO: 154435 - DNA, 1497 bp, Homo sapiens
  Payload ID: 10352
  Gene Symbol: MRPL30
  Gene Name: mitochondrial ribosomal protein L30
  Uniprot ID: Q8TCC3
  ENST ID: ENST00000409841
  CDS Start-End: 29-514
gcctctaaagagagcaatcactacacttatggctgggattttgcgcttagtagttcaatggcccccaggcagactacagactgtgacaaaaggtgtggagtctcttatttgtacagattggattcgtcacaaattcaccagatcaagaattccagaaaaagtgtttcaggcctcacctgaagatcatgaaaaatacggtggggatccacagaaccctcataaactgcatattgttaccagaataaaaagtacaagaagacgtccatattgggaaaaagatataataaagatgcttggattagaaaaagcacatacccctcaagttcacaagaatatcccttcagtgaatgcaaaattgaaagtagttaagcatttgataagaatcaagcccttgaagttgccacaaggacttccagcagaggagaacatgtctaacacgtgcctcaaaagcactggggagttagtagtgcagtggcatctgaaacctgtggagcagaaagcacatgagtcctaatgccccagcagcttccgattggaaaatgcaaattgtttttatttaaagatggtgagaaagtgttttcattaaaatatgttttcaaaaccattttcaggccgggcacggtggctcacctcctcccaaaatgctgggattacaggcatgagccactgtacccagccaaaattgttttcttttttaagtgaattcaacaatttctgtgagtggctctttgcatgaacactgtgcaaggtgttggagaaatccaaagctgaccaaaacatggtccccaccttttggagcttacagtctgttctggggaacagagattcagccaaagtcaagaaacactggatgccagctagattatctgttctgtgctttggtgtctataagtacatatgtggatatgggttcattttatccctaaacttagtaccaaaccagcatttaatatctaattataaatctaatttggcctaaactttattattgcacactgcctgaacaaaacctatttgtctctatgtaaattttttcctcatggaacaagggtgtgaaatgaaaatattttaggatttattcaaaaacagactattctgttttcagcttcagaattgttctttgaatcctaaggaacctctgtcaacagttgaggttgctgttgaaaagaaagaagaaggaggcggaaatctctcagggagaattatttcctttcttttctattttagatacctggaggggtggggagaagtaagaattgtaagggaggttcagtagtggggaattctgtgacagctgattgaagatgatgatgaagaacctctgcattctagttaccctttgcttcccttcacctcttgtaaaatttggcttggcaacaatgacattgtcatgcttattgtcccaatatccatcctgtcgtagatcttaatgtttttgatcgttgcgttaaagtggaagtgccacccacagtgaaaccagatcccattaataaataa

SEQ ID NO: 154436 - DNA, 562 bp, Homo sapiens
  Payload ID: 10352
  Gene Symbol: MRPL30
  Gene Name: mitochondrial ribosomal protein L30
  ENST ID: ENST00000409145
  CDS Start-End: 92-397
agttcttcctctgctctgcttcccttcggaggaaaatttcaggctgaaggtttagcgggtgccgcctctaaagagagcaatcactacacttatggctgggattttgcgcttagtagttcaatggcccccaggcagactacagactgtgacaaaaggtgtggagtctcttatttgtacagattggattcgtcacaaattcaccagatcaagaattccagaaaaagtgtttcaggcctcacctgaagatcatgaaaaatacggtggggatccacagaaccctcataaactgcatattgttaccagaataaaaagtacaagaagacgtccatattgggaaaaagatataataaagatgcttggattagaaaaagtatgcaattattttaatcatctttagtgttgtttacattgctttaaattttatacttttaaaactttgcggtatacatttattatttattttgtattacttagggtaatttatttataaatttggcttagaatgaaccttcaatttaacattttactgaaacatggaactatctgcttttcagattgataa

SEQ ID NO: 154437 - DNA, 1035 bp, Homo sapiens
  Payload ID: 10353
  Gene Symbol: MRPL32
  Gene Name: mitochondrial ribosomal protein L32
  Uniprot ID: Q9BYC8
  ENST ID: ENST00000223324
  CDS Start-End: 188-754
tgtggccgatttcctttcatttccccgcccctcacctttcctttactctctatgattggaggagagtcagagctgctccaagagcatgcggggtgttgtagttctaagaagcgaggcttgcccgattctgtgcctgtgcgcatgctgaaagcaggggcgggaccggggcggtcttccagcagggaaaatggcgctggccatgctggtcttggtggtttcgccgtggtctgcggcccggggagtgcttcgaaactactgggagcgactgctacggaagcttccgcagagccggccgggctttcccagtcctccgtggggaccagcattagcagtacagggcccagccatgtttacagagccagcaaatgataccagtggaagtaaagagaattccagccttttggacagtatcttttggatggcagctcccaaaaatagacgcaccattgaagttaaccggtgtaggagaagaaatccgcagaagcttattaaagttaagaacaacatagacgtttgtcctgaatgtggtcacctgaaacagaaacatgtcctttgtgcctactgctatgaaaaggtgtgcaaggagactgcagaaatcagacgacagatagggaagcaagaagggggcccttttaaggctcccaccatagagactgtggtgctgtacacgggagagacaccgtctgaacaagatcagggcaagaggatcattgaacgagacagaaagcgaccatcctggttcacccagaattgacaccaaagatgttaaaagggtaacttcacagtaaatcatttctcctgaaatagaggaagattctttatgttgttgtgcttgtttttaaatcatcagtatagtttaacacattctttctaagcagttttgtgtgggataatttgaagaatatattatgagtaaactccgaaaattttgtttatccaaaggctcaatggattatgtttctattatatacaaggttttaagtaaacataaaatttccagaacaaaaataaaaaatttaaaattcatagcaaaaa

SEQ ID NO: 154438 - DNA, 730 bp, Homo sapiens
  Payload ID: 10353
  Gene Symbol: MRPL32
  Gene Name: mitochondrial ribosomal protein L32
  ENST ID: ENST00000413995
  CDS Start-End: 1-128
aagagaattccagccttttggacagtatcttttggatggcagctcccaaaaatagacgcaccattgaagttaaccggtgtaggagaagaaatccgcagaagcttattaaagttaagtcttcctgttaaagtgaggtggaactagatggtgtatgatgacctcatgtagcctgaacatcctaagaaagttaaaataacaacatagacgtttgtcctgaatgtggtcacctgaaacagaaacatgtcctttgtgcctactgctatgaaaaggtgtgcaaggagactgcagaaatcagacgacagatagggaagcaagaagggggcccttttaaggctcccaccatagagactgtggtgctgtacacgggagagacaccgtctgaacaagatcagggcaagaggatcattgaacgagacagaaagcgaccatcctggttcacccagaattgacaccaaagatgttaaaagggtaacttcacagtaaatcatttctcctgaaatagaggaagattctttatgttgttgtgcttgtttttaaatcatcagtatagtttaacacattctttctaagcagttttgtgtgggataatttgaagaatatattatgagtaaactccgaaaattttgtttatccaaaggctcaatggattatgtttctattatatacaaggttttaagtaaacataaaatttccagaacaaaaataaaaaatttaaaattcatagcaaaaa

SEQ ID NO: 154439 - DNA, 2734 bp, Homo sapiens
  Payload ID: 10353
  Gene Symbol: MRPL32
  Gene Name: mitochondrial ribosomal protein L32
  ENST ID: ENST00000432845
  CDS Start-End: 12-335
cagcagggaaaatggcgctggccatgctggtcttggtggtttcgccgtggtctgcggcccggggagtgcttcgaaactactgggagcgactgctacggaagcttccgcagagccggccgggctttcccagtcctccgtggggaccagcattagcagtacagggcccagccatgtttacagagccagcaaatgataccagtggaagtaaagagaattccagccttttggacagtatcttttggatggcagctcccaaaaatagacgcaccattgaagttaaccggtgtaggagaagaaatccgcagaagcttattaaagttaaggtaatgcattgatttttgtgggtgtgcttttcctcaagtcctccattgaataagctcatggtagattcctatagcctaggaataaattattatcagattatatgtgtctactttcctctggcctaaatgaaatacagtattctcattatatacataatgagaaggctagagcctgctgtcctctagcctgagtattagaaacacagtcaaggaaggagtgagtttggagactgggcaaggaacgaggctgtgaggtgcctacatgacttctgaattgtgagctgtgtcagtcttgagctgtgtgagttttgaactacagatgagtaaacatcctaactatggcagagcctagaattaaagctagaagcagtaggtatactgaatcttgggttttacaagcccttacatatttgttttatttttttatcatttccaacaaaataccatgaaggaaaaccctaagataagtaatataatagctaacaacaattaagtgtctatgatgtatctcagtgccttatgtttattatatctcatcatgtcttatagccctccaaagcaaataagatattcttcattattaggatgaaaaaactgaggcaaaaagaatttgcctgtggtcacacagctatgaagcagtagattttcgagctctgatttttgacctcatgttcttttaaagattttctttgtgttctcctatcctcagacaatttcagattctcctcgctgacaacatggatgtactgtcttcattgatctagtaaagaaaaattacagtgtgtattacctctgatctgttcatgtatggttttaacagttaggatttcagttactgtttacttcatggcgttccacaacagcagcaccatacagatgaaactcgagaacagaaagctgactttcataagcatccacattctgttaagcaaaaccttagaacttaagccagaaagtattattgagtgatggttggggctgaacttaaatgtagaactgaaaaacactttattacttaagacttacagtaattcataaatttgctcaagaggacgtaagattttaggaatgagatcttgcactgatctattatgtgacttccctgatcgcatttattctgaaggaatagttcttatcctgtgcatttattttcttccttgaattattttctgttacatacggtatatagtgtgttatgttgggtactttgatcacgaaaggaagaccagctgactgtgggtgtcttcataccttcagttgtgcatgcaatccagtttccagtagtggagcaaaatgagaatatggttaggcaagtaatatacaagcctctttcttcctttcagaaaaggaaattcttttgttatctgcctcacaaatgttagtatattaatcttatcaagtgtttaaagcttctttaatgatcctgtttagtatttttctttgtattttctttcaaacctacatctagaataagttgataaatcttttagaggttataatgtttctattttatatttaaagttggagatatatatatatctatatctatctctatatatatatatatacacacacatatatatatcattaaaataccctaagaatgtaacatagaaaataattttacattaaggaataatcagtgttcatttttaaaaagaaaaattataccatatacgaaacctgtattctgtacaggaatttgaattacactgtgataaaaagaggaagccaaggaagtcaacttgtaatgttcttatcttgttttccctaagatagattgaaagacaaagggaattcacttttccttggtgtcttatttaagatgctgattgtttgggtcacttcattatgttgacaaattccttatttgatatttagtatttggagttaggggaaatgagtatttcttttttcttttttacataactacaactgctgtgtttaagtaaagataccagattcaggttggctgaattctagttctagtttttctctaattcaaactcagtgttgcttgtcttcagtcttcctgttaaagtgaggtggaactagatggtgtatgatgacctcatgtagcctgaacatcctaagaaagttaaaataacaacatagacgtttgtcctgaatgtggtcacctgaaacagaaacatgtcctttgtgcctactgctatgaaaaggtgtgcaaggagactgcagaaatcagacgacagatagggaagcaagaagggggcccttttaaggctcccaccatagagactgtggtgctgtacacgggagagacaccgtctgaacaagatcagggcaagaggatcattgaacgagacagaaagcgaccatcctggttcacccagaattgacaccaaagatgttaaaagggtaacttcacagtaaatcatttctcctgaaat

SEQ ID NO: 154440 - DNA, 518 bp, Homo sapiens
  Payload ID: 10354
  Gene Symbol: MRPL33
  Gene Name: mitochondrial ribosomal protein L33
  Uniprot ID: O75394
  ENST ID: ENST00000296102
  CDS Start-End: 62-259
gcagttgttgttggttgggggccttttggccggtgacggagactgcccaggtgtggtcaccatgttcctctccgcggtcttctttgccaagagcaagtcaaaaaacattctggtgagaatggtgagcgaagctgggacaggtttctgcttcaacaccaagagaaaccgactgcgggaaaaactgactcttttgcattatgatccagttgtgaaacaaagagtcctcttcgtggaaaagaaaaaaatacgctccctttaaacggtggattgaaaatgactttgatttataaagagaagactgagggcggggatactgattcagaaatcctgtagcgtgtaataaaagaagaggaaatggcatggaatcactgcctcctgtgatttgaaggccattgtgaaggaaaacaatgcagtgaaagaaagttcttcatattaggacagatatcattgcatcacatttatttatctttctgggtatttttatagcccttaataaaaaatattaaaatagcctgtgc

SEQ ID NO: 154441 - DNA, 404 bp, Homo sapiens
  Payload ID: 10354
  Gene Symbol: MRPL33
  Gene Name: mitochondrial ribosomal protein L33
  Uniprot ID: O75394
  ENST ID: ENST00000379666
  CDS Start-End: 62-226
gcagttgttgttggttgggggccttttggccggtgacggagactgcccaggtgtggtcaccatgttcctctccgcggtcttctttgccaagagcaagtcaaatgaaacaaagagtcctcttcgtggaaaagaaaaaaatacgctccctttaaacggtggattgaaaatgactttgatttataaagagaagactgagggcggggatactgattcagaaatcctgtagcgtgtaataaaagaagaggaaatggcatggaatcactgcctcctgtgatttgaaggccattgtgaaggaaaacaatgcagtgaaagaaagttcttcatattaggacagatatcattgcatcacatttatttatctttctgggtatttttatagcccttaataaaaaatattaaaatag

SEQ ID NO: 154442 - DNA, 527 bp, Homo sapiens
  Payload ID: 10354
  Gene Symbol: MRPL33
  Gene Name: mitochondrial ribosomal protein L33
  ENST ID: ENST00000448427
  CDS Start-End: 40-249
cttttggccggtgacggagactgcccaggtgtggtcaccatgttcctctccgcggtcttctttgccaagagcaagtcaaagctgtggttatggtttttggaagaccacagaggtgaaatgtcattttcatcacatcatattaagggcacatatgatcaacatgacttcttactgatggtgttaaccctggtcacctggctaagtggtgatttacaagtcaagttaaaatgtccccagaagtggccttgaaccgaatatctccaatgctctcccctttcatatctagcgtggtccggaatggaaaagtgggactggatgctacaaactgtttgaggataactgacttaaaatctggctgcacatcattgactcctgggcccaactgtgaccgatttaaactgcacataccatatgctggagagacattaaagtgggatatcattttcaatgcccaatacccagaactgcctcccgattttatctttggagaagatgctgaattcctgccagacccctcagctttgcag

SEQ ID NO: 154443 - DNA, 968 bp, Homo sapiens
  Payload ID: 10355
  Gene Symbol: MRPL34
  Gene Name: mitochondrial ribosomal protein L34
  Uniprot ID: Q9BQ48
  ENST ID: ENST00000252602
  CDS Start-End: 226-504
ccggctacctgttggtgtgtatgcagagcatccctgtgccccgcggatatagactggcgcgcctctgttgcgcaggcgcagaactacaacttcagggttttccccaacggcctcttttttgcacgttaggagaaactacatttcccataatcctttgttccagggctggagcggctctgggctccggaatcgcccgcagccggtactgcgggacccactgcggatatggctgtcttggctggatccctgttgggccccacgagtaggtcggcagcgttgctgggtggcaggtggctccagccccgggcctggctggggttcccagacgcctggggcctccccaccccgcagcaggcccggggcaaggctcgcgggaatgagtatcagccgagcaacatcaaacgcaagaacaagcacggctgggtccggcgcctgagcacgccggccggcgtgcaggtcatccttcgccgaatgctcaagggccgcaagtcgctgagccattgaggatcgcgacgcagtcggcgggaccctcatggaagcatcgccctcgcctcggaccttgcctggcgctatttttgcagggagctggggagcaggaacgcctcggacctgagtgctctccatattgtggggttgaagtctggatgggagcttgccaagtccctttttaggctttttaattaggaagcatttcgaacctgcgcaacagaccaaagaacagtacaaagaacatccgtgtacccagtaccctgactaccgactacctacaacccgtccctgccccatcctgagttcttttgaagctgatctcaggcatcggattatttcttctgtaaatatttcagaatgtatctctccaagatgagagctcattaaaagacaattacaaagcttatcacatccaaaagaattatcaataattttgaaatattattaaacgtgtaataaatgttcaaagttccacttgc

SEQ ID NO: 154444 - DNA, 793 bp, Homo sapiens
  Payload ID: 10355
  Gene Symbol: MRPL34
  Gene Name: mitochondrial ribosomal protein L34
  Uniprot ID: Q9BQ48
  ENST ID: ENST00000600434
  CDS Start-End: 351-629
accaagcgatgccccgccggcccagcggctacttcttgtcttctggaggcgccggcagtggctccggtagagccttgggcgagggctcgggctcccagagcaggaattcgtggagcagcgtgttgaccgtctcagggcattccagcatcaccatgtggctgccctcgtcgatgagcttcaggaatgccaggagcaggatctgcagaagacgcagggctcaaggagagaatgaggccacttggtagtggtcaagccctggggaccaagccttccatggaggggttcttgggctggagcggctctgggctccggaatcgcccgcagccggtactgcgggacccactgcggatatggctgtcttggctggatccctgttgggccccacgagtaggtcggcagcgttgctgggtggcaggtggctccagccccgggcctggctggggttcccagacgcctggggcctccccaccccgcagcaggcccggggcaaggctcgcgggaatgagtatcagccgagcaacatcaaacgcaagaacaagcacggctgggtccggcgcctgagcacgccggccggcgtgcaggtcatccttcgccgaatgctcaagggccgcaagtcgctgagccattgaggatcgcgacgcagtcggcgggaccctcatggaagcatcgccctcgcctcggaccttgcctggcgctatttttgcagggagctggggagcaggaacgcctcggacctgagtgctctccatattgtggggttgaagtctggatgggagcttgccaagtccctttt

SEQ ID NO: 154445 - DNA, 603 bp, Homo sapiens
  Payload ID: 10355
  Gene Symbol: MRPL34
  Gene Name: mitochondrial ribosomal protein L34
  ENST ID: ENST00000602206
  CDS Start-End: 22-132
actgcgggacccactgcggatatggctgtcttggctggatccctgttgggccccacgagtaggctcgcgggaatgagtatcagccgagcaacatcaaacgcaagaacaagcacggctgggtccggcgcctgagcacgccggccggcgtgcaggtcatccttcgccgaatgctcaagggccgcaagtcgctgagccattgaggatcgcgacgcagtcggcgggaccctcatggaagcatcgccctcgcctcggaccttgcctggcgctatttttgcagggagctggggagcaggaacgcctcggacctgagtgctctccatattgtggggttgaagtctggatgggagcttgccaagtccctttttaggctttttaattaggaagcatttcgaacctgcgcaacagaccaaagaacagtacaaagaacatccgtgtacccagtaccctgactaccgactacctacaacccgtccctgccccatcctgagttcttttgaagctgatctcaggcatcggattatttcttctgtaaatatttcagaatgtatctctccaagatgagagctcattaaaagacaattacaaagcttatcacatccaaaa

SEQ ID NO: 154446 - DNA, 555 bp, Homo sapiens
  Payload ID: 10355
  Gene Symbol: MRPL34
  Gene Name: mitochondrial ribosomal protein L34
  Uniprot ID: Q9BQ48
  ENST ID: ENST00000594999
  CDS Start-End: 131-409
ggtgtctagggcctggagatgggaccagctgcctgcctgccccctaccccaggttgggcgccgctaagggctggagcggctctgggctccggaatcgcccgcagccggtactgcgggacccactgcggatatggctgtcttggctggatccctgttgggccccacgagtaggtcggcagcgttgctgggtggcaggtggctccagccccgggcctggctggggttcccagacgcctggggcctccccaccccgcagcaggcccggggcaaggctcgcgggaatgagtatcagccgagcaacatcaaacgcaagaacaagcacggctgggtccggcgcctgagcacgccggccggcgtgcaggtcatccttcgccgaatgctcaagggccgcaagtcgctgagccattgaggatcgcgacgcagtcggcgggaccctcatggaagcatcgccctcgcctcggaccttgcctggcgctatttttgcagggagctggggagcaggaacgcctcggacctgagtgctctccatattgtggggttgaagtctggatggga

SEQ ID NO: 154447 - DNA, 863 bp, Homo sapiens
  Payload ID: 10355
  Gene Symbol: MRPL34
  Gene Name: mitochondrial ribosomal protein L34
  ENST ID: ENST00000595444
  CDS Start-End: 33-587
cctcctcctgctgcggctgtgctcaccaagcgatgccccgccggcccagcggctacttcttgtcttctggaggcgccggcagtggctccggtagagccttgggcgagggctcgggctcccagagcaggaattcgtggagcagcgtgttgaccgtctcagggcattccagcatcaccatgtggctgccctcgtcgatgagcttcaggaatgccaggagcaggatctgcagaagacgcagggctcaagggctggagcggctctgggctccggaatcgcccgcagccggtactgcgggacccactgcggatatggctgtcttggctggatccctgttgggccccacgagtaggtcggcagcgttgctgggtggcaggtggctccagccccgggcctggctggggttcccagacgcctggggcctccccaccccgcagcaggcccggggcaaggctcgcgggaatgagtatcagccgagcaacatcaaacgcaagaacaagcacggctgggtccggcgcctgagcacgccggccggcgtgcaggtcatccttcgccgaatgctcaagggccgcaagtcgctgagccattgaggatcgcgacgcagtcggcgggaccctcatggaagcatcgccctcgcctcggaccttgcctggcgctatttttgcagggagctggggagcaggaacgcctcggacctgagtgctctccatattgtggggttgaagtctggatgggagcttgccaagtccctttttaggctttttaattaggaagcatttcgaacctgcgcaacagaccaaagaacagtacaaagaacatccgtgtacccagtaccctgactaccgactacctacaacccgtccctg

SEQ ID NO: 154448 - DNA, 1061 bp, Homo sapiens
  Payload ID: 10356
  Gene Symbol: MRPL35
  Gene Name: mitochondrial ribosomal protein L35
  Uniprot ID: Q9NZE8
  ENST ID: ENST00000254644
  CDS Start-End: 137-649
agatgacattgaataaatgttgagtggacaactttgttcttttcctcttccttgactccgcctccttgctttcccttcattctcttttgctcttgtgcttttaaacccaaagcggccgccgtaggcgaaggtgaagatggctgcctctgcctttgctggtgcagtgagagcagcttcaggaatcctacggcccctgaatattttggcatcttcaacctaccgcaactgtgtcaagaatgcctctcttatttctgcattgtccactggacgttttagtcatattcagacaccagttgtttcctccactcccagacttaccacatctgagagaaacctgacatgtgggcatacctcagtgatccttaatagaatggcccccgtgcttccaagtgtcctgaagctgccagtcagatctctaacatacttcagtgcaagaaaaggcaagagaaagaccgtgaaagctgtcatcgataggtttcttcgacttcattgtggcctttgggtgaggagaaaggctggctataagaaaaaattatggaaaaagacacctgcaaggaagaagcgattgagggaatttgtattctgcaataaaacccagagtaaactcttagataaaatgacgacgtccttctggaagaggcgaaactgacggcaaagccaaccacttagaagccttccacatctttgtcacctgcctggctcctgctctctgatgtacctctgggtagtgagatggaaatggtgcctgcagaagttggggagaaggatacttttgcacagcctccatgatgtctttattgcaaatatggatgacaagggtctctgttacaggggcctcagagcaccttcgtttctcctctagaccagggacaggtgtagagataaggactggcaaccagagcctcagcatccaaagatggactgaagtgggatggctgacaggcacataacttacgggaaagggaatttcatacatacgatttttgttttgtgggtaggagggcttatcatcaacactgattttataatctgacaataaatgtctttcattaaagagttta

SEQ ID NO: 154449 - DNA, 3727 bp, Homo sapiens
  Payload ID: 10356
  Gene Symbol: MRPL35
  Gene Name: mitochondrial ribosomal protein L35
  Uniprot ID: Q9NZE8
  ENST ID: ENST00000337109
  CDS Start-End: 35-601
aaacccaaagcggccgccgtaggcgaaggtgaagatggctgcctctgcctttgctggtgcagtgagagcagcttcaggaatcctacggcccctgaatattttggcatcttcaacctaccgcaactgtgtcaagaatgcctctcttatttctgcattgtccactggacgttttagtcatattcagacaccagttgtttcctccactcccagacttaccacatctgagagaaacctgacatgtgggcatacctcagtgatccttaatagaatggcccccgtgcttccaagtgtcctgaagctgccagtcagatctctaacatacttcagtgcaagaaaaggcaagagaaagaccgtgaaagctgtcatcgataggtttcttcgacttcattgtggcctttgggtgaggagaaaggctggctataagaaaaaattatggaaaaagacacctgcaaggaagaagcgattgagggaatttgtattctgcaataaaacccagagtaaactcttagataaaatgacgacgtccttctggaagaggcgaaactggtacgttgatgatccttatcagaagtatcatgatcgaacaaacctgaaagtatagatcagaagtttcacttgtttctcagttattggatatgtatctttgtgtacatatctttgcaaaaatggataagtacaaaacttgatgtaaattgtaccaatgaatacgtaaacatacagtgacaacattaaacttagaaaagttttaaaacttaatggatcagactttgccagatttggttagggaaacagaaatttagaatggtgcattatttttaacaaatggtattggcttaactagttgtttcagttatgctcttttagttgcaaggaatctcaagtgggacaaacataaaaagactcaaaagctacaagttagctcaagcaatgtgacattatttcaaggatatgtgccagggaattcaggaaccacctcaccaaccccatctcccactcagaaatcacctcccagcctcaggaagagtagaaattgggtggtgctcctcagcaggggaaggtggatgtttaggcttgggctctgcatgcatgtgacttgcttctttttgcattgttaactccattctctctattcaccaacttctctacacagcttttgcatacttacagtttctgttcctttgtaataactttaacttgcacctttgaggttcttttctacatgatgaccttcagctcctgctgctagtctccaattgccaagggaatttaactgggccagactacctttttatactaggtctggttgggtcattgtctagagtagggattggctgtccttaagtcaggagcccgctttgtattagcaggtttgcatgcagcaaaaaaacagttatgtgagcagtttcacttggaggttcacatggggtggcagcacacttaacatctaacacaccaggttcattgtgttcataacacttgtcatttactgtaacaacattttttcataggagagtaaatagcccttcagcatgctcattcatgaaacagaagaggctgtacaagtgaagacaagggctttttatgcaagttttgaaagataggtatttattttttctagagacaggagttttgctctgttgcccaggctggagtgcagtggtgcaatcatagctcattgaagcctcgcactcctgggctcaagtggtcctcctgcctcagcttactgagtaaggatatgtatttcttaaaagttagtttatccacttcagatttcatgttttcatttgtaaggataaacttttcccacaaattttcaacaatcattgtagaaactaagggggagaaagtaatctcagttgttttagaaacgaaaaagttaagcattgtttacttgaagtgggcagggaagcagcactgagtaaagttcaattgagtggttacagtctagggcagtggttcccaactctccgatcagaatcatctgggaagcattttcaaacagcaaagtactttgaaaaccattattaaatagaattatgcatgaattactgtttcagatcctttaatgtggtagttggtaataataagatgaaattcctctgttgttagtaaaattatgaaattgaagttctgcagcatgtcaggccaggattattagggagattcctcgaaactagtgtgtgtttattaaaaggagaaaggataacaatagaatgttctaaaaccagaagtccaagtgcgtgtctacttatgggaccaataaataaagaacagacatttgatttgaggtgaggtaaaagcctgaaacatggaatggcattctgttttgatggattttcatttcttcgcacttctgagacggcaaagccaaccacttagaagccttccacatctttgtcacctgcctggctcctgctctctgatgtacctctgggtagtgagatggaaatggtgcctgcagaagttggggagaaggatacttttgcacagcctccatgatgtctttattgcaaatatggatgacaagggtctctgttacaggggcctcagagcaccttcgtttctcctctagaccagggacaggtgtagagataaggactggcaaccagagcctcagcatccaaagatggactgaagtgggatggctgacaggcacataacttacgggaaagggaatttcatacatacgatttttgttttgtgggtaggagggcttatcatcaacactgattttataatctgacaataaatgtctttcattaaagagtttacctaaatgatgttcgattatatgtataatttataaaatatttatgtatagtttgtttattcaggtatatgtataatttattgaacacctactatgtcccagcatatctacaaaactgggtacatacatactgtctaactgctaatccacatttccagtcttacaaaggacataatgattagttaagccctaatttagatttgaggaaactgaagctgagagagggttaagtaaattacccaaagtacagctaataagacccagaatctcagtctcactccttgggatcctgtgtatttccctgagtcttctaacatatgaaaattcatatctaaatcaacaagtgactgtaatctggtactataaatactaaataaacacttcttcataacactgtaccaattcagcttttaaattttattactttgctttcctgtcctttgccaactcttaacctagttaatcctagttctgttgacattggaccaggctcagtaaataaacgaatggatttccagcctttttttcccatctgttcctgcttttagtcctctgaatctgcttcttttcttactgctgctttattttacagtgattttgtcaaacatagaatacaggactaaaaatgcaaagaaattgggtctgtgtttaattttgatgtttcaaattttgagcttccaagtctttgtggccacccaatgaagtttgagtctgcctgttcagatgtgaaaggtaagggctgcagcaggtttaagggtggcccttcaccaccctgttgtcacctgcacaggcactcccccatttgcagatgaagaaatgttcagagaagaaaaatgatggaccaaacgtctgtttgcacaattgaaactctaccagtggactattctattttcacagctacctagtttctgccgatgatttttttaaatgtgaaataaacagtgatactttcaggtt

SEQ ID NO: 154450 - DNA, 651 bp, Homo sapiens
  Payload ID: 10356
  Gene Symbol: MRPL35
  Gene Name: mitochondrial ribosomal protein L35
  ENST ID: ENST00000409180
  CDS Start-End: 29-562
aaagcggccgccgtaggcgaaggtgaagatggctgcctctgcctttgctggtgcagtgagagcagcttcaggaatcctacggcccctgaatattttggcatcttcaacctaccgcaactgtgtcaagaatgcctctcttatttctgcattgtccactggacgttttagtcatattcagacaccagttgtttcctccactcccagacttaccacatctgagagaaacctgacatgtgggcatacctcagtgatccttaatagaatggcccccgtgcttccaagtgtcctgaagctgccagtcagatctctaacatacttcagtgcaagaaaaggcaagagaaagaccgtgaaagctgtcatcgataggtttcttcgacttcattgtggcctttgggtgaggagaaaggctggctataagaaaaaattatggaaaaagacacctgcaaggaagaagcgattgagggaatttgtattctgcaataaaacccagagtaaactcttagataaaatgacgacgtccttctggaagaggcgaaactggcactcccccatttgcagatgaagaaatgttcagagaagaaaaatgatggaccaaacgtctgtttgcacaattgaaactctaccagtggactattctattttcacagctac

SEQ ID NO: 154451 - DNA, 833 bp, Homo sapiens
  Payload ID: 10356
  Gene Symbol: MRPL35
  Gene Name: mitochondrial ribosomal protein L35
  ENST ID: ENST00000605125
  CDS Start-End: 35-322
aaacccaaagcggccgccgtaggcgaaggtgaagatggctgcctctgcctttgctggtgcagtgagagcagcttcaggaatcctacggcccctgaatattttggcatcttcaacctaccgcaactgtgtcaagaatgcctctcttatttctgcattgtccactggacgttttagtcatattcagacaccagttgtttcctccactcccagacttaccacatctgagagaaacctgacatgtgggcatacctcagtgatccttaataggctggctataagaaaaaattatggaaaaagacacctgcaaggaagaagcgattgagggaatttgtattctgcaataaaacccagagtaaactcttagataaaatgacgacgtccttctggaagaggcgaaactggtacgttgatgatccttatcagaagtatcatgatcgaacaaacctgaaagtatagatcagaagtttcacttgtttctcagttattggatatgtatctttgtgtacatatctttgcaaaaatggataagtacaaaacttgatgtaaattgtaccaatgaatacgtaaacatacagtgacaacattaaacttagaaaagttttaaaacttaatggatcagactttgccagatttggttagggaaacagaaatttagaatggtgcattatttttaacaaatggtattggcttaactagttgtttcagttatgctcttttagttgcaaggaatctcaagtgggacaaacataaaaagactcaaaagctacaagttagctcaagcaatgtgacattatttcaaggatatgtgccagggaattcaggaaccacctcac

SEQ ID NO: 154452 - DNA, 587 bp, Homo sapiens
  Payload ID: 10357
  Gene Symbol: MRPL36
  Gene Name: mitochondrial ribosomal protein L36
  Uniprot ID: Q9P0J6
  ENST ID: ENST00000382647
  CDS Start-End: 42-353
cagtgcgcagacgcaggggtcggcgccggattcaccacaacatggcaaatctttttataaggaaaatggtgaaccctctgctctatctcagtcgtcacacggtgaagcctcgagccctctccacatttctatttggatccattcgaggtgcagcccccgtggctgtggaacccggggcagcagtgcgctcacttctctcacccggcctcctgccccatctgctgcctgcgctggggttcaaaaacaagactgtccttaagaagcgctgcaaggactgttacctggtgaagaggcggggtcggtggtacgtctactgtaaaacccatccgaggcacaagcagagacagatgtagaccctttccctccagagtcacgcacatactcgtcatcgcatcacttgggagaatggttgtatcttatggaaggaattatcacatcaaggagtcaggggaaagtgactggaagcaaacgccctaaaagttacccatcacgtttcagtgtaaatgagtaactatagaagacattgcgttatcttatttccaaaacgttccaactaaaaaacattttcctattaaaatagaccttcc

SEQ ID NO: 154453 - DNA, 610 bp, Homo sapiens
  Payload ID: 10357
  Gene Symbol: MRPL36
  Gene Name: mitochondrial ribosomal protein L36
  Uniprot ID: Q9P0J6
  ENST ID: ENST00000505059
  CDS Start-End: 61-372
ccagtgcgcagacgcaggggtcggcgccgggtgagagcgtgcggccggattcaccacaacatggcaaatctttttataaggaaaatggtgaaccctctgctctatctcagtcgtcacacggtgaagcctcgagccctctccacatttctatttggatccattcgaggtgcagcccccgtggctgtggaacccggggcagcagtgcgctcacttctctcacccggcctcctgccccatctgctgcctgcgctggggttcaaaaacaagactgtccttaagaagcgctgcaaggactgttacctggtgaagaggcggggtcggtggtacgtctactgtaaaacccatccgaggcacaagcagagacagatgtagaccctttccctccagagtcacgcacatactcgtcatcgcatcacttgggagaatggttgtatcttatggaaggaattatcacatcaaggagtcaggggaaagtgactggaagcaaacgccctaaaagttacccatcacgtttcagtgtaaatgagtaactatagaagacattgcgttatcttatttccaaaacgttccaactaaaaaacattttcctattaaaatagaccttccgaat

SEQ ID NO: 154454 - DNA, 686 bp, Homo sapiens
  Payload ID: 10357
  Gene Symbol: MRPL36
  Gene Name: mitochondrial ribosomal protein L36
  Uniprot ID: Q9P0J6
  ENST ID: ENST00000508987
  CDS Start-End: 138-449
gccacgtgacccccccccccgccgccatcttccttcctggcagcagcgtccgcgtgccagtgcgcagacgcaggggtcggcgccgggtgagagcgtgcggccgggtaagggagccgtcttctcagattcaccacaacatggcaaatctttttataaggaaaatggtgaaccctctgctctatctcagtcgtcacacggtgaagcctcgagccctctccacatttctatttggatccattcgaggtgcagcccccgtggctgtggaacccggggcagcagtgcgctcacttctctcacccggcctcctgccccatctgctgcctgcgctggggttcaaaaacaagactgtccttaagaagcgctgcaaggactgttacctggtgaagaggcggggtcggtggtacgtctactgtaaaacccatccgaggcacaagcagagacagatgtagaccctttccctccagagtcacgcacatactcgtcatcgcatcacttgggagaatggttgtatcttatggaaggaattatcacatcaaggagtcaggggaaagtgactggaagcaaacgccctaaaagttacccatcacgtttcagtgtaaatgagtaactatagaagacattgcgttatcttatttccaaaacgttccaactaaaaaacattttcctattaaaatagaccttccgaa

SEQ ID NO: 154455 - DNA, 793 bp, Homo sapiens
  Payload ID: 10357
  Gene Symbol: MRPL36
  Gene Name: mitochondrial ribosomal protein L36
  ENST ID: ENST00000510999
  CDS Start-End: 687-793
tgagagtgggggctgcgagagggtggggccggccaccttgggaccctcgggcgtgtctccccgagtgggctgcggtcagaggagcgtgggccggggcctggcggtctcagagggccagggttggggggtgcgggtccgaccgtgggcgcccgacctggcgacaggagggggtgtccagcgaccccggggcgggagaactggcggctcccgaacgcgacctcacagcccgcgcgcagggccggctccggtgccgcagtgtcctccgggccctgcaggcccagctcttcccagccggggccgctgaaccctaagggccggggcgcgtggggaagcaggggcgggcgaccggggtgccagagttccgtgctcttccggagcgggggcctgtcccgaaactggcccgagggagggcccctgggtctgggaagagttggagggaggagctcatcagttgaaccgtccttgacctggtgtctgtttggaaagggatgcggcctaagtttaagctccctcccagccaagtgagcggctcctcaacatcgcagggctttgcacactcacctacacttgcagcaggcgggaaagggaaggaagccaccgtccactgccccttattctcctggcacacttggctgattaaggcagtgttcaagctcaggtcgaggctgcagctgattcaccacaacatggcaaatctttttataaggaaaatggtgaaccctctgctctatctcagtcgtcacacggtgaagcctcgagccctctccacatttctatttggatccattcgagg

SEQ ID NO: 154456 - DNA, 595 bp, Homo sapiens
  Payload ID: 10357
  Gene Symbol: MRPL36
  Gene Name: mitochondrial ribosomal protein L36
  Uniprot ID: Q9P0J6
  ENST ID: ENST00000505818
  CDS Start-End: 46-357
atgcgcacggcttctggcggcgccaaacacccgattcaccacaacatggcaaatctttttataaggaaaatggtgaaccctctgctctatctcagtcgtcacacggtgaagcctcgagccctctccacatttctatttggatccattcgaggtgcagcccccgtggctgtggaacccggggcagcagtgcgctcacttctctcacccggcctcctgccccatctgctgcctgcgctggggttcaaaaacaagactgtccttaagaagcgctgcaaggactgttacctggtgaagaggcggggtcggtggtacgtctactgtaaaacccatccgaggcacaagcagagacagatgtagaccctttccctccagagtcacgcacatactcgtcatcgcatcacttgggagaatggttgtatcttatggaaggaattatcacatcaaggagtcaggggaaagtgactggaagcaaacgccctaaaagttacccatcacgtttcagtgtaaatgagtaactatagaagacattgcgttatcttatttccaaaacgttccaactaaaaaacattttcctattaaaatagaccttccgaat

SEQ ID NO: 154457 - DNA, 1179 bp, Homo sapiens
  Payload ID: 10358
  Gene Symbol: MRPL37
  Gene Name: mitochondrial ribosomal protein L37
  ENST ID: ENST00000336230
  CDS Start-End: 169-1047
ctcattcgttcccagcaggccctgcgcgcggcaacatggcggggtccaggtggaggtcttgaggctatcagatcggtatggcattggcgtccgggcccgcaaggcgggcgctagctggctccgggcagctcggccttgggggcttcggggccccgagacgcggggcgtatgagtggggcgtgcgctccacgcggaagtcggagcctcctcccctggatagggtgtacgagatccctggactggagcccatcacctttgcggggaagatgcacttcgtgccctggctggcgcggccgatctttccgccctgggaccgcggctacaaggacccaaggttctaccgctcgccccctcttcacgagcatccgctgtacaaagaccaggcctgctatatctttcaccaccgttgccgccttctcgaggtctcttctccttcaagtccgtggttctggtggagcccgactgagcactaaggatcctctgcccaccatcgcctccagagaggagattgaagctactaagaatcatgttctagagaccttctaccccatatcacccatcatcgatcttcatgaatgcaatatttatgatgtgaaaaatgacacaggattccaggaaggctatccttacccctatccccataccctgtacttactggacaaagccaatttacgaccacaccgccttcaaccagatcagctgcgggccaagatgatcctgtttgcttttggcagtgccctggctcaggcccggctcctctatgggaatgatgccaaggtcttggagcagcccgtggtggtgcagagcgtgggcacggatggacgtgtcttccatttcctagtgtttcaactgaataccacagacctggactgtaacgagggtgtcaagaatttggcctgggtggactcagaccagctcctctatcagcatttttggtgtctcccagtgatcaaaaagagagtggttgtggaacctgttggcccagttggtttcaagccagagacattcagaaagtttttagctctatatttgcatggtgctgcgtgagcggaggacccctctgaatcctgaaacccctcttgcctctcttccacggaagagggcctgggccccgtggagcctcagtgcccgtttggcctgctgctctcgctgacaataaagagcccttgcgttgcactg

SEQ ID NO: 154458 - DNA, 1483 bp, Homo sapiens
  Payload ID: 10358
  Gene Symbol: MRPL37
  Gene Name: mitochondrial ribosomal protein L37
  Uniprot ID: Q9BZE1
  ENST ID: ENST00000360840
  CDS Start-End: 78-1349
ctcattcgttcccagcaggccctgcgcgcggcaacatggcggggtccaggtggaggtcttgaggctatcagatcggtatggcattggcgtccgggcccgcaaggcgggcgctagctggctccgggcagctcggccttgggggcttcggggccccgagacgcggggcgtatgagtggggcgtgcgctccacgcggaagtcggagcctcctcccctggatagggtgtacgagatccctggactggagcccatcacctttgcggggaagatgcacttcgtgccctggctggcgcggccgatctttccgccctgggaccgcggctacaaggacccaaggttctaccgctcgccccctcttcacgagcatccgctgtacaaagaccaggcctgctatatctttcaccaccgttgccgccttctcgagggtgtaaagcaggccctctggctcaccaagaccaagttaatagaaggccttcccgagaaagtgcttagccttgttgatgatccaaggaaccacatagagaaccaagacgagtgcgttctgaatgtgatctctcacgcccgtctctggcagaccactgaggaaatccccaagagagagacctactgcccggtcatcgtggacaacctaatacagctgtgtaaatctcagattctcaagcatccttctctggccaggaggatctgtgtccaaaactccacgttttctgctacctggaaccgagagtctcttctccttcaagtccgtggttctggtggagcccgactgagcactaaggatcctctgcccaccatcgcctccagagaggagattgaagctactaagaatcatgttctagagaccttctaccccatatcacccatcatcgatcttcatgaatgcaatatttatgatgtgaaaaatgacacaggattccaggaaggctatccttacccctatccccataccctgtacttactggacaaagccaatttacgaccacaccgccttcaaccagatcagctgcgggccaagatgatcctgtttgcttttggcagtgccctggctcaggcccggctcctctatgggaatgatgccaaggtcttggagcagcccgtggtggtgcagagcgtgggcacggatggacgtgtcttccatttcctagtgtttcaactgaataccacagacctggactgtaacgagggtgtcaagaatttggcctgggtggactcagaccagctcctctatcagcatttttggtgtctcccagtgatcaaaaagagagtggttgtggaacctgttggcccagttggtttcaagccagagacattcagaaagtttttagctctatatttgcatggtgctgcgtgagcggaggacccctctgaatcctgaaacccctcttgcctctcttccacggaagagggcctgggccccgtggagcctcagtgcccgtttggcctgctgctctcgctgacaataaagagcccttgcgttgcactgaa

SEQ ID NO: 154459 - DNA, 868 bp, Homo sapiens
  Payload ID: 10358
  Gene Symbol: MRPL37
  Gene Name: mitochondrial ribosomal protein L37
  ENST ID: ENST00000398219
  CDS Start-End: 1-794
agtctcttctccttcaagtccgtggttctggtggagcccgactgagcactaaggatcctctgcccaccatcgcctccagagaggagattgaagctactaagaatcatgttctagagaccttctaccccatatcacccatcatcgatcttcatgaatgcaatatttatgatgtgaaaaatgacacaggattccaggaaggctatccttacccctatccccataccctgtacttactggacaaagccaatttacgaccacaccgccttcaaccagatcagctgcgggccaagatgatcctgtttgcttttggcagtgccctggctcaggcccggctcctctatgggaatgatgccaaggtcttggagcagcccgtggtggtgcagagcgtgggcacggatggacgtgtcttccatttcctagtgtttcaactgaataccacagacctggactgtaacgagggtgtcaagaatttggcctgggtggactcagaccagctcctctatcagcatttttggtgtctcccagtgatcaaaaagagagtggttgtgacaggtccttgcttctccaaatcccaaatgtctaccagcttcgtcctcactccctcattcaacgcaggagaggaagtgatgcagcggaacttgagggcctcagccagcctcccgcccagtacaggctccccagccagtgagctggtgaaggagcaggagcacgctgcagggagagtgctgcgccgggtcatgctggatagcgaaaccccacgagaggaacttccagcagcagacttttggaaatgaaatggtgacattcccattgtgaacgtatttctcactgtctcatatatttaaattcctggttgttccattcaaaa

SEQ ID NO: 154460 - DNA, 1582 bp, Homo sapiens
  Payload ID: 10358
  Gene Symbol: MRPL37
  Gene Name: mitochondrial ribosomal protein L37
  ENST ID: ENST00000605337
  CDS Start-End: 49-1500
ggcaacatggcggggtccaggtggaggtcttgaggctatcagatcggtatggcattggcgtccgggcccgcaaggcgggcgctagctggctccgggcagctcggccttgggggcttcggggccccgagacgcggggcgtatgagtggggcgtgcgctccacgcggaagtcggagcctcctcccctggatagggtgtacgagatccctggactggagcccatcacctttgcggggaagatgcacttcgtgccctggctggcgcggccgatctttccgccctgggaccgcggctacaaggacccaaggttctaccgctcgccccctcttcacgagcatccgctgtacaaagaccaggcctgctatatctttcaccaccgttgccgccttctcgagggtgtaaagcaggccctctggctcaccaagaccaagttaatagaaggccttcccgagaaagtgcttagccttgttgatgatccaaggaaccacatagagaaccaagacgagtgcgttctgaatgtgatctctcacgcccgtctctggcagaccactgaggaaatccccaagagagagacctactgcccggtcatcgtggacaacctaatacagctgtgtaaatctcagattctcaagcatccttctctggccaggaggatctgtgtccaaaactccacgttttctgctacctggaaccgagagtctcttctccttcaagtccgtggttctggtggagcccgactgagcactaaggatcctctgcccaccatcgcctccagagaggagattgaagctactaagaatcatgttctagagaccttctaccccatatcacccatcatcgatcttcatgaatgcaatatttatgatgtgaaaaatgacacaggattccaggaaggctatccttacccctatccccataccctgtacttactggacaaagccaatttacgaccacaccgccttcaaccagatcagctgcgggccaagatgatcctgtttgcttttggcagtgccctggctcaggcccggctcctctatgggaatgatgccaaggtcttggagcagcccgtggtggtgcagagcgtgggcacggatggacgtgtcttccatttcctagtgtttcaactgaataccacagacctggactgtaacgagggtgtcaagaatttggcctgggtggactcagaccagctcctctatcagcatttttggtgtctcccagtgatcaaaaagagagtggttgtgaaaaataaaagacattccagcggaccaaaatgtgtttgcaagacaagaaatggaaaatggcttttagacggcccccaaatatttaaagtgagatggataccttccctcccaacccaccttccgccaaggccatcgcgactccacaagaacacagaatttgcaggcccaggaaaagaaggcagacgcctcaaacacaaaacatcttgttatgcaccaggaacaaaaactgtgcccaagaagtcaccttgcattttgtaatcagtgtaataaactccaacccacattccccaaacatgtcaggaagggctgcggaaaaaagatgtccctttaataaaacgtt

SEQ ID NO: 154461 - DNA, 1888 bp, Homo sapiens
  Payload ID: 10359
  Gene Symbol: MRPL38
  Gene Name: mitochondrial ribosomal protein L38
  Uniprot ID: Q96DV4
  ENST ID: ENST00000309352
  CDS Start-End: 539-1681
cgggttttcaccgtgttggccaggatggtctcgatctcctgacttcgtgatccacccgccttggcctcccaaagtgctgggattcccggcgtgagccaccgcgcccagccctcaatctgggttttaaacccaagcagagtccggaatcggagctcgcaccccttctcccaaccaggcctgcgtccctggggaaatcaggacgcagcgtccaggggttggaggagggccccggcggccgaccccggtctgtgccgccccctggtggccagccatgggcgagcatatgactgctctcggctccgccccgccgtccaacgggcacttccggagccgggcgtctacagaccgcggccaccttccacctgcgcccgaggcagacggtgcaggggcctccgggacaggcgtctgaggcctgctccgcagcgcgggcccgggggcgggcctaggggcggggcctgctgtggtgcgctcaggcaccgcgctggccacctgtgcccgggtcctagtggcggccgcagtgtcgcaggccggagggaagatggcggcgccctggtggcgagccgcgctgtgcgagtgtcggagatggcggggcttcagcacctcggccgtcctgggccgccggacacccccgctggggccgatgcccaacagtgacatcgacttgagcaacctggagcggctggagaagtaccggagcttcgaccgctaccggcgccgagcagagcaggaggcgcaggccccgcactggtggcggacctaccgagagtatttcggggagaagacagatcccaaagagaagattgatattgggctgcctccacccaaagtctcccggacccaacagctactggaacggaaacaggccatccaggagcttcgggccaatgtggaagaggagcgggctgcccgcctccgcacagccagtgtcccgctggatgccgtgcgggccgagtgggagaggacctgtggcccctaccacaagcagcgtctggctgagtattacggcctctaccgagacctgttccacggtgccacctttgtgccccgagtccccctgcacgtggcctacgctgtgggtgaggatgacctgatgcctgtgtactgtggcaatgaggtgactccaaccgaggctgcccaagcgccagaggtgacctatgaggcagaagagggctccttgtggacgttgctactcactagcttggatgggcacctgctggagccagatgctgagtacctccactggctgctaaccaacatcccgggtaaccgggtggctgaaggacaggtgacgtgtccctacctcccccccttccctgcccgaggctccggcatccaccgtcttgccttcctgctcttcaagcaggaccagccgattgacttctctgaggacgcacgcccctcaccctgctatcagctggcccagcggaccttccgcacttttgatttctacaagaaacaccaagaaaccatgactccagccggcttgtccttcttccagtgccgctgggatgactccgtcacctacatcttccaccagcttctggacatgcgggagccggtgtttgagttcgtgcggccgcccccttaccaccccaagcagaagcgcttcccccaccggcagcccctgcgctacctggaccggtacagggacagtcatgagcccacctatggcatctactaaggagccagagtgtgcgcatttcagagcatgggattgatcggcagcaagagtaaagacacagctccagaggcccacactgtggggtctgggccctgccttaggcagcccccctctttggccccctcccgtcaggcccagggcttggagtgaaagtgactctcaggtggtggggtggggaatgtgaataaacatgatttcttgccgggc

SEQ ID NO: 154462 - DNA, 1110 bp, Homo sapiens
  Payload ID: 10360
  Gene Symbol: MRPL39
  Gene Name: mitochondrial ribosomal protein L39
  Uniprot ID: Q9NYK5
  ENST ID: ENST00000352957
  CDS Start-End: 43-1059
agggcggagaaggacttgcgcgcgacggttctcaccgctgctatggaggcgctggccatgggttcccgggcgctgcggctctggctggtcgcacccggtggcgggatcaaatggagatttatagcaacatcgtcagcttctcagctgtcaccgacagaattgacagaaatgcggaatgatctctttaataaagagaaagccaggcagttatcattaactccccgaactgagaagatagaagttaagcatgttgggaaaactgaccccggtactgtcttcgtgatgaataaaaacatttcaactccctacagttgtgccatgcatttaagcgagtggtattgcaggaagtccattctggctctggtggatggacagccttgggacatgtataagcctttaacaaagtcctgtgaaattaaatttcttactttcaaagattgtgatccaggagaagtgaataaggcatattggcgttcctgtgctatgatgatgggctgtgtgatagagagggcattcaaagatgaatatatggtcaatttggtcagagctccagaagttcctgtaatttctggtgccttctgttatgacgtagttttggatagcaaacttgatgagtggatgccaacaaaagagaacttacgttccttcacaaaagatgctcatgctttaatttataaagatcttccatttgaaactctggaagttgaagcaaaagtggcattggaaatatttcaacacagcaagtacaaagtagatttcatagaagagaaggcatctcagaaccctgagagaatagtcaagctacacagaataggtgacttcattgatgtgagtgagggccctcttattccaagaacaagtatttgtttccagtatgaagtatcagcagttcacaatcttcaacccacccagccaagtctcatacgaagattccagggcgtgtctttacctgttcacttaagagcacattttacaatatgggataagctattggaaagatctcggaaaatggtaactgaagatcaaagtaaagcaacagaggaatgtacatctacctaataactttctaaaatttaaatatgtataataaaataaatgttttaaatataa

SEQ ID NO: 154463 - DNA, 1199 bp, Homo sapiens
  Payload ID: 10360
  Gene Symbol: MRPL39
  Gene Name: mitochondrial ribosomal protein L39
  Uniprot ID: Q9NYK5
  ENST ID: ENST00000307301
  CDS Start-End: 43-1104
agggcggagaaggacttgcgcgcgacggttctcaccgctgctatggaggcgctggccatgggttcccgggcgctgcggctctggctggtcgcacccggtggcgggatcaaatggagatttatagcaacatcgtcagcttctcagctgtcaccgacagaattgacagaaatgcggaatgatctctttaataaagagaaagccaggcagttatcattaactccccgaactgagaagatagaagttaagcatgttgggaaaactgaccccggtactgtcttcgtgatgaataaaaacatttcaactccctacagttgtgccatgcatttaagcgagtggtattgcaggaagtccattctggctctggtggatggacagccttgggacatgtataagcctttaacaaagtcctgtgaaattaaatttcttactttcaaagattgtgatccaggagaagtgaataaggcatattggcgttcctgtgctatgatgatgggctgtgtgatagagagggcattcaaagatgaatatatggtcaatttggtcagagctccagaagttcctgtaatttctggtgccttctgttatgacgtagttttggatagcaaacttgatgagtggatgccaacaaaagagaacttacgttccttcacaaaagatgctcatgctttaatttataaagatcttccatttgaaactctggaagttgaagcaaaagtggcattggaaatatttcaacacagcaagtacaaagtagatttcatagaagagaaggcatctcagaaccctgagagaatagtcaagctacacagaataggtgacttcattgatgtgagtgagggccctcttattccaagaacaagtatttgtttccagtatgaagtatcagcagttcacaatcttcaacccacccagccaagtctcatacgaagattccagggcgtgtctttacctgttcacttaagagcacattttacaatatgggataagctattggaaagatctcggaaaatgactccatttcccattctccttctatttactacgcagtcattcttcactacctcgcctgagtcgtacctcctccatggaacagtctcagagtaactgaagatcaaagtaaagcaacagaggaatgtacatctacctaataactttctaaaatttaaatatgtataataaaataaatgttttaaatataa

SEQ ID NO: 154464 - DNA, 900 bp, Homo sapiens
  Payload ID: 10360
  Gene Symbol: MRPL39
  Gene Name: mitochondrial ribosomal protein L39
  ENST ID: ENST00000419219
  CDS Start-End: 10-900
accgctgctatggaggcgctggccatgggttcccgggcgctgcggctctggctggtcgcacccggtggcgggatcaaatggagatttatagcaacatcgtcagcttctcagctgtcaccgacagaattgacagaaatgcggaatgatctctttaataaagagaaagccaggcagttatcattaactccccgaactgagaagatagaagttaagcatgttgggaaaactgaccccggtactgtcttcgtgatgaataaaaacatttcaactccctacagttgtgccatgcatttaagcgagtggtattgcaggaagtccattctggctctggtggatggacagccttgggacatgtataagcctttaacaaagtcctgtgaaattaaatttcttactttcaaagattgtgatccaggagaagtgaataaggcatattggcgttcctgtgctatgatgatgggctgtgtgatagagagggcattcaaagatgaatatatggtcaatttggtcagagctccagaagttcctgttttggatagcaaacttgatgagtggatgccaacaaaagagaacttacgttccttcacaaaagatgctcatgctttaatttataaagatcttccatttgaaactctggaagttgaagcaaaagtggcattggaaatatttcaacacagcaagtacaaagtagatttcatagaagagaaggcatctcagaaccctgagagaatagtcaagctacacagaataggtgacttcattgatgtgagtgagggccctcttattccaagaacaagtatttgtttccagtatgaagtatcagcagttcacaatcttcaacccacccagccaagtctcatacgaagattccagggcgtgtctttacctgttcacttaaga

SEQ ID NO: 154465 - DNA, 1455 bp, Homo sapiens
  Payload ID: 10361
  Gene Symbol: MRPL4
  Gene Name: mitochondrial ribosomal protein L4
  Uniprot ID: Q9BYD3
  ENST ID: ENST00000253099
  CDS Start-End: 288-1223
aaagtaggctaggcctacggaagctgggtcttcttgctgtgaggtcgcgttccccagtgttacggagggtccttgaggcaggagtgaaaattgggtctgggggttagtcctggggtggaggtctgggcacgccgggtcggaccccctccatcttcggttttgcacaccccgctttccagcgcggagtcgcggcgggtagggcggcgtcgcgtgcgtgacgtcatccagcggcgcctcgcgaggctccagtggccttgacctcccgcggcgtgggaggctgcgcggcgatgctgcagttcgtccgggccggggcgcgggcctggcttcggcctaccggcagccagggcctgagttccctggcggaagaggcagcgcgtgcgaccgagaacccggagcaggtggcgagcgagggtctcccggagcccgtgctgcgcaaagtcgagctcccggtacccactcatcgacgcccagtgcaggcctgggtcgagtccttgcggggcttcgagcaggagcgcgtgggcctggccgacctgcaccccgatgttttcgccaccgcgcccaggctggacatactgcaccaggttgctatgtggcagaagaacttcaagagaattagctatgccaagaccaagacgagagccgaggtgcggggcggtggccggaagccttggccgcagaaaggcactgggcgggcccggcatggcagcatccgctctccgctctggcgaggaggaggtgttgcccatggcccccggggccccacaagttactactacatgctgcccatgaaggtgcgggcgctgggtctcaaagtggcactgaccgtcaagctggcccaggacgacctgcacatcatggactccctagagctgcccaccggagacccacagtacctgacagagctggcgcactaccgccgctggggggactccgtactcctcgtggacttaacacacgaggagatgccacagagcatcgtggaggccacctctaggcttaagaccttcaacttgatcccggctgttggcctaaatgtgcacagcatgctcaagcaccagacgctggtcctgacgctgcccaccgtcgccttcctggaggacaagctgctctggcaggactcacgttacagacccctctaccccttcagcctgccctacagcgacttcccccgacccctaccccacgctacccagggcccagcggccaccccgtaccactgttgatgtgaagcacctcttctgagccaggccgagcccctggccgacttgggagcctcaggcccacgcccacccttcgaggaaggtgtcacctggaccccttcattccacggaggaagctgaggccacagggagcggccatcgccattgggaaggggcgactccacggaaagcccagacgggcttctgcatccattccctctttttgtttttaaaataaattgtatttttgaatcaa

SEQ ID NO: 154466 - DNA, 1320 bp, Homo sapiens
  Payload ID: 10361
  Gene Symbol: MRPL4
  Gene Name: mitochondrial ribosomal protein L4
  Uniprot ID: Q9BYD3
  ENST ID: ENST00000307422
  CDS Start-End: 155-1090
cccaaagtaggctaggcctacggaagctgggtcttcttgctgtgagcgcggagtcgcggcgggtagggcggcgtcgcgtgcgtgacgtcatccagcggcgcctcgcgaggctccagtggccttgacctcccgcggcgtgggaggctgcgcggcgatgctgcagttcgtccgggccggggcgcgggcctggcttcggcctaccggcagccagggcctgagttccctggcggaagaggcagcgcgtgcgaccgagaacccggagcaggtggcgagcgagggtctcccggagcccgtgctgcgcaaagtcgagctcccggtacccactcatcgacgcccagtgcaggcctgggtcgagtccttgcggggcttcgagcaggagcgcgtgggcctggccgacctgcaccccgatgttttcgccaccgcgcccaggctggacatactgcaccaggttgctatgtggcagaagaacttcaagagaattagctatgccaagaccaagacgagagccgaggtgcggggcggtggccggaagccttggccgcagaaaggcactgggcgggcccggcatggcagcatccgctctccgctctggcgaggaggaggtgttgcccatggcccccggggccccacaagttactactacatgctgcccatgaaggtgcgggcgctgggtctcaaagtggcactgaccgtcaagctggcccaggacgacctgcacatcatggactccctagagctgcccaccggagacccacagtacctgacagagctggcgcactaccgccgctggggggactccgtactcctcgtggacttaacacacgaggagatgccacagagcatcgtggaggccacctctaggcttaagaccttcaacttgatcccggctgttggcctaaatgtgcacagcatgctcaagcaccagacgctggtcctgacgctgcccaccgtcgccttcctggaggacaagctgctctggcaggactcacgttacagacccctctaccccttcagcctgccctacagcgacttcccccgacccctaccccacgctacccagggcccagcggccaccccgtaccactgttgatgtgaagcacctcttctgagccaggccgagcccctggccgacttgggagcctcaggcccacgcccacccttcgaggaaggtgtcacctggaccccttcattccacggaggaagctgaggccacagggagcggccatcgccattgggaaggggcgactccacggaaagcccagacgggcttctgcatccattccctctttttgtttttaaaataaattgtatttttgaatc

SEQ ID NO: 154467 - DNA, 1620 bp, Homo sapiens
  Payload ID: 10361
  Gene Symbol: MRPL4
  Gene Name: mitochondrial ribosomal protein L4
  ENST ID: ENST00000393733
  CDS Start-End: 28-1101
tcccgcggcgtgggaggctgcgcggcgatgctgcagttcgtccgggccggggcgcgggcctggcttcggcctaccggcagccagggcctgagttccctggcggaagaggcagcgcgtgcgaccgagaacccggagcaggtggcgagcgagggtctcccggagcccgtgctgcgcaaagtcgagctcccggtacccactcatcgacgcccagtgcaggcctgggtcgagtccttgcggggcttcgagcaggagcgcgtgggcctggccgacctgcaccccgatgttttcgccaccgcgcccaggctggacatactgcaccaggttgctatgtggcagaagaacttcaagagaattagctatgccaagaccaagacgagagccgaggtgcggggcggtggccggaagccttggccgcagaaaggcactgggcgggcccggcatggcagcatccgctctccgctctggcgaggaggaggtgttgcccatggcccccggggccccacaagttactactacatgctgcccatgaaggtgcgggcgctgggtctcaaagtggcactgaccgtcaagctggcccaggacgacctgcacatcatggactccctagagctgcccaccggagacccacagtacctgacagagctggcgcactaccgccgctggggggactccgtactcctcgtggacttaacacacgaggagatgccacagagcatcgtggaggccacctctaggcttaagaccttcaacttgatcccggctgttgccacaagatggcgacatgagcctaagtcaagtcctgtccctcaacccacgcccctcgctggcttccccacctctctcaggatgaaagcccaagtcatcagggtggcacgtcaggccctgcacgatgtgccccgtcacctccctgccctcccgtcatttgccctgggtctcccccaccagaatgggagccaggagtcccagccaggcacaggaccgagcctggctctcggtcagcaggtgatgagctgggagcagctccttggccagaggcttacaggcaacaagcggccaggcagggtctggccccgggctgctgggctcacaaagtcacactagaccacagtgacgatctctgtaagcacaaagggactccgatgtgggtggggtgaggagagaggcagccccggcctgaccggccccccgccccgcccccaccccgcccccaggcctaaatgtgcacagcatgctcaagcaccagacgctggtcctgacgctgcccaccgtcgccttcctggaggacaagctgctctggcaggactcacgttacagacccctctaccccttcagcctgccctacagcgacttcccccgacccctaccccacgctacccagggcccagcggccaccccgtaccactgttgatgtgaagcacctcttctgagccaggccgagcccctggccgacttgggagcctcaggcccacgcccacccttcgaggaaggtgtcacctggaccccttcattccacggaggaagctgaggccacagggagcggccatcgccattgggaaggggcgactccacggaaagcccagacgggcttctgcatccattccctctttttgtttttaaaat

SEQ ID NO: 154468 - DNA, 876 bp, Homo sapiens
  Payload ID: 10361
  Gene Symbol: MRPL4
  Gene Name: mitochondrial ribosomal protein L4
  ENST ID: ENST00000590702
  CDS Start-End: 1-360
cagaagaacttcaagagaattagctatgccaagaccaagacgagagccgaggtgcggggcggtggccggaagccttggccgcagaaaggcactgggcgggcccggcatggcagcatccgctctccgctctggcgaggaggaggtgttgcccatggcccccggggccccacaagttactactacatgctgcccatgaaggtgcgggcgctgggtctcaaagtggcactgaccgtcaagctggcccaggacgacctgcacatcatggactccctagagctgcccaccggagacccacagtacctgacagagctggcgcactaccgccgctggggggactccgtactcctcgtggacttgtgagggcacagggcagagcaggggcagggggccctgagctccgtactctgagggttcaacccccactccctggcctctcttacagaacacacgaggagatgccacagagcatcgtggaggccacctctaggcttaagaccttcaacttgatcccggctgttggtgagcaaagagcccaggcccctagagtgcgcatgtgcaggctccgctgttagaatcacagcggttcaaatccggcatctggtcgctgagtggcctcaggcagtgaccacgctcccggacccaaccttcagcttgcccaaagcaataatctttcctaaagaagtgcttggctggggatggtggctcacgcttgtaatcccagtactttgggaggccaaggcagtctgggcaatatagtgaggctcccatctgtactaaaaataaaaaagttaggcgtggcgatgtgcacctgtagtcccagctactcgggggctgagccaggcggatagcttgagctcagggggccaaggctgcagt

SEQ ID NO: 154469 - DNA, 1423 bp, Homo sapiens
  Payload ID: 10361
  Gene Symbol: MRPL4
  Gene Name: mitochondrial ribosomal protein L4
  Uniprot ID: Q9BYD3
  ENST ID: ENST00000590669
  CDS Start-End: 245-1036
gtcgcgttccccagtgttacggagggtccttgaggcaggagtgaaaattgggtctgggggttagtcctggggtggaggtctgggcacgccgggtcggaccccctccatcttcggttttgcacaccccgctttccagcgcggagtcgcggcgggtagggcggcgtcgcgtgcgtgacgtcatccagcggcgcctcgcgaggctccagtggccttgacctcccgcggcgtgggaggctgcgcggcgatgctgcagttcgtccgggccggggcgcgggcctggcttcggcctaccggcagccagggcctgagttccctggcggaagaggcagcgcgtgcgaccgagaacccggagcaggtggcgagcgagggtctcccggagcccgtgctgcgcaaagtcgagctcccggtacccactcatcgacgcccagtgcaggcctgggtcgagtccttgcggggcttcgagcaggagcgcgtgggcctggccgacctgcaccccgatgttttcgccaccgcgcccaggctggacatactgcaccaggttgctatgtggcagaagaacttcaagagaattagctatgccaagaccaagacgagagccgaggtgcggggcggtggccggaagccttggccgcagaaaggcactgggcgggcccggcatggcagcatccgctctccgctctggcgaggaggaggtgttgcccatggcccccggggccccacaagttactactacatgctgcccatgaaggtgcgggcgctgggtctcaaagtggcactgaccgtcaagctggcccaggacgacctgcacatcatggactccctagagctgcccaccggagacccacagtacctgacagagctggcgcactaccgccgctggggggactccgtactcctcgtggacttaacacacgaggagatgccacagagcatcgtggaggccacctctaggcttaagaccttcaacttgatcccggctgttggtgagcaaagagcccaggcccctagagtgcgcatgtgcaggctccgctgttagaatcacagcggttcaaatccggcatctggtcgctgagtggcctcaggcagtgaccacgctcccggacccaaccttcagcttgcccaaagcaataatctttcctaaagaagtgcttggctggggatggtggctcacgcttgtaatcccagtactttgggaggccaaggcagtctgggcaatatagtgaggctcccatctgtactaaaaataaaaaagttaggcgtggcgatgtgcacctgtagtcccagctactcgggggctgagccaggcggatagcttgagctcagggggccaaggctgcagtgagtcatgatcgcaccactgcacccaaacctggggagagagctagactcttgtctcaaaaaaaaaaaaaaaaaaaaaaaaaaa

SEQ ID NO: 154470 - DNA, 777 bp, Homo sapiens
  Payload ID: 10361
  Gene Symbol: MRPL4
  Gene Name: mitochondrial ribosomal protein L4
  ENST ID: ENST00000591054
  CDS Start-End: 175-558
ccggctcgtcggaggcgggacccaaagtaggctaggcctacggaagctgggtcttcttgctgtgagcgcggagtcgcggcgggtagggcggcgtcgcgtgcgtgacgtcatccagcggcgcctcgcgaggctccagtggccttgacctcccgcggcgtgggaggctgcgcggcgatgctgcagttcgtccgggccggggcgcgggcctggcttcggcctaccggcagccagggcctgagttccctggcggaagaggcagcgcgtgcgaccgagaacccggagcaggtggcgagcgagggtctcccggagcccgtgctgcgcaaagtcgagctcccggtacccactcatcgacgcccagtgcaggcctgggtcgagtccttgcggggcttcgagcaggagcgcgtgggcctggccgacctgcaccccgatgttttcgccaccgcgcccaggctggacatactgcaccaggttgctatgtggcagaagaacttcaagagaattgaggtgttgcccatggcccccggggccccacaagttactactacatgctgcccatgaaggtgcgggcgctgggtctcaaagtggcactgaccgtcaagctggcccaggacgacctgcacatcatggactccctagagctgcccaccggagacccacagtacctgacagagctggcgcactaccgccgctggggggactccgtactcctcgtggacttaacacacgaggagatgccacagagcatcgtggaggccacctctaggcttaagaccttca

SEQ ID NO: 154471 - DNA, 747 bp, Homo sapiens
  Payload ID: 10361
  Gene Symbol: MRPL4
  Gene Name: mitochondrial ribosomal protein L4
  ENST ID: ENST00000590150
  CDS Start-End: 257-747
tcttgctgtgaggtcgcgttccccagtgttacggagggtccttgaggcaggagtgaaaattgggtctgggggttagtcctggggtggaggtctgggcacgccgggtcggaccccctccatcttcggttttgcacaccccgctttccagcgcggagtcgcggcgggtagggcggcgtcgcgtgcgtgacgtcatccagcggcgcctcgcgaggctccagtggccttgacctcccgcggcgtgggaggctgcgcggcgatgctgcagttcgtccgggccggggcgcgggcctggcttcggcctaccggcagccaggggtcgtctctcactttcgcccaacccttgcagggcctgagttccctggcggaagaggcagcgcgtgcgaccgagaacccggagcaggtggcgagcgagggtctcccggagcccgtgctgcgcaaagtcgagctcccggtacccactcatcgacgcccagtgcaggcctgggtcgagtccttgcggggcttcgagcaggagcgcgtgggcctggccgacctgcaccccgatgttttcgccaccgcgcccaggctggacatactgcaccaggttgctatgtggcagaagaacttcaagagaattagctatgccaagaccaagacgagagccgaggtgcggggcggtggccggaagccttggccgcagaaaggcactgggcgggcccggcatggcagcatccgctctccgctctggcgaggaggaggtgttgccca

SEQ ID NO: 154472 - DNA, 827 bp, Homo sapiens
  Payload ID: 10361
  Gene Symbol: MRPL4
  Gene Name: mitochondrial ribosomal protein L4
  ENST ID: ENST00000588502
  CDS Start-End: 68-730
gggcgcgggcctggcttcggcctaccggcagccaggtgaggccaggggctggaggcgtggtcgaaggatgaaatttgggggtgtccaggggtcgtctctcactttcgcccaacccttgcagggcctgagttccctggcggaagaggcagcgcgtgcgaccgagaacccggagcaggtggcgagcgagggtctcccggagcccgtgctgcgcaaagtcgagctcccggtacccactcatcgacgcccagtgcaggcctgggtcgagtccttgcggggcttcgagcaggagcgcgtgggcctggccgacctgcaccccgatgttttcgccaccgcgcccaggctggacatactgcaccaggttgctatgtggcagaagaacttcaagagaattagctatgccaagaccaagacgagagccgaggtgcggggcggtggccggaagccttggccgcagaaaggcactgggcgggcccggcatggcagcatccgctctccgctctggcgaggaggaggtgttgcccatggcccccggggccccacaagttactactacatgctgcccatgaaggtgcgggcgctgggtctcaaagtggcactgaccgtcaagctggcccaggacgacctgcacatcatggactccctagagctgcccaccggagacccacagtacctgacagagctggcgcactaccgccgctggggggactccgtactcctcgtggacttgtgagggcacagggcagagcaggggcagggggccctgagctccgtactctgagggttcaacccccactccctggcctctcttacagaacacacgaggagat

SEQ ID NO: 154473 - DNA, 1118 bp, Homo sapiens
  Payload ID: 10361
  Gene Symbol: MRPL4
  Gene Name: mitochondrial ribosomal protein L4
  ENST ID: ENST00000592514
  CDS Start-End: 218-1118
ggctgaattgggccagagaggtctcattggctgaattcctgcaccggctcgtcggaggcgggacccaaagtaggctaggcctacggaagctgggtcttcttgctgtgagcgcggagtcgcggcgggtagggcggcgtcgcgtgcgtgacgtcatccagcggcgcctcgcgaggctccagtggccttgacctcccgcggcgtgggaggctgcgcggcgatgctgcagttcgtccgggccggggcgcgggcctggcttcggcctaccggcagccagggcctgagttccctggcggaagaggcagcgcgtgcgaccgagaacccggagcaggtggcgagcgagggtctcccggagcccgtgctgcgcaaagtcgagctcccggtacccactcatcgacgcccagtgcaggcctgggtcgagtccttgcggggcttcgagcaggagcgcgtgggcctggccgacctgcaccccgatgttttcgccaccgcgcccaggctggacatactgcaccaggttgctatgtggcagaagaacttcaagagaattagctatgccaagaccaagacgagagccgaggtgcggggcggtggccggaagccttggccgcagaaaggcactgggcgggcccggcatggcagcatccgctctccgctctggcgaggaggaggtgttgcccatggcccccggggccccacaagttactactacatgctgcccatgaaggtgcgggcgctgggtctcaaagtggcactgaccgtcaagctggcccaggacgacctgcacatcatggactccctagagctgcccaccggagacccacagtacctgacagagctggcgcactaccgccgctggggggactccgtactcctcgtggacttaacacacgaggagatgccacagagcatcgtggaggccacctctaggcttaagaccttcaacttgatcccggctgttggcctaaatgtgcacagcatgctcaagcaccagacgctggtcctgacgctgcccaccgtcgccttcctggaggacaagctgctctggcaggactcacgttacagacccctctaccccttcagcctgccctacagcgacttcccccgacccctaccccacgcta

SEQ ID NO: 154474 - DNA, 1387 bp, Homo sapiens
  Payload ID: 10362
  Gene Symbol: MRPL40
  Gene Name: mitochondrial ribosomal protein L40
  Uniprot ID: Q9NQ50
  ENST ID: ENST00000333130
  CDS Start-End: 654-1274
agttgcaacccgggccgcccgcagaggcaggcggggcccaggtggcgtggaccgcccgtcaccagctctgcctcgccagtctgagtccgacttattaactagcttccgtcattcatcaacacgcgctattgggcatcttgcgagcgccgggctccgcgccggcgccggaatgcgatccgggcttcggactcgaacgaatgcgggggacgagccaaccctggtgggggaggctggggcggacgcgtttattagaagatcggggccgtttgcctagacatgaacatttggactcggaggagcagagggacgccccctcggccgctccggctgcactgcggagccgaggcccgcgcgagggcgcagaccgaccaaccggctagggcctgactggctagactgtgcccgctgcagaggcgcgctcccagcacagggcggggacggaagggaggaccccgagccgcgtgaaacgcaaggccctcgtgtgtgcgcagctgacaccctaggcggggctgcgtcgggggcggggacaggcgcgtcccagcccacgcagccggaacgcctgagcgctgggcgcctggtctgccggacctcagcagggggcaccgcgggccggactgtggaggggcgcacgcccggaagcggcgagggtagccatgacggcctccgtgctgcgaagtatctcgctagccctgcgcccgactagcgggcttctgggaacttggcagacgcagcttagagagactcaccagcgagcgtcattgttgtctttctgggaactcattcccatgagatcagaacctcttcgaaaaaagaagaaggtagatcctaaaaaagaccaagaagcaaaggagcgcttgaaaaggaagatccgaaaactggaaaaggctactcaagagctaattcctattgaagattttattacccctctaaagttcttggataaagcaagagagcggcctcaggtggagctcacctttgaggagactgagaggagagctctgcttctgaagaagtggtccttgtacaagcagcaagagcgtaagatggagagggacaccatcagggctatgctagaagcccagcaggaagctctggaggaactgcaactggaatccccgaagctccatgctgaggccatcaagcgggatcctaacctgttcccctttgagaaggaagggccacattacacaccaccgatccctaactaccaaccccctgaaggcaggtacaatgacatcaccaaggtgtacacacaagtggagtttaagagatagacttgcaggctgctatccttaacatgctgcccctgagagtaggaatgaccagggttcaagtctgctttccacagaatcaggcatgctgttaataaatactggtttaatcaaaa

SEQ ID NO: 154475 - DNA, 1262 bp, Homo sapiens
  Payload ID: 10363
  Gene Symbol: MRPL41
  Gene Name: mitochondrial ribosomal protein L41
  Uniprot ID: Q8IXM3
  ENST ID: ENST00000371443
  CDS Start-End: 789-1202
gggcgacttccgcgtggggtgagaggtcgcctgcgagggtgaccgggcaggagggctcagtgcgcaagccggacgtgctgggtccaagattattgattaatttgggcaccgcgagggctcgagtccccccacaccactgcccggcctgcgggggagcacagacagcccgggccctcccggctgcaggtcccgggctttccccgcgcggttgccggctccgcccagaggagccgcgcccggcggaggggtaagaaaggcagggtcgcggcgtcaacgcggcggccgtctcgagtccagggcccgcgtcctccccgacctcccgacgccacctcacggcctcagggggactgggctcccgggaaaccgccggccacctggcggacgaacacaggcagtggcgggcagtggagacgccagggaccaccgcgctgagagcgatcactcatccgccagccccgccccgcgagccccgccccgcgagccccgccccgcgagccccgccccgcgagccccgccccgcgagccccgccccgcgagccccgcaccgccggccccgcaccgccagccccgcgagccccgccccgccccgcgcgctcctcgcattggccgagtccccgcggccacaccccctaccagattggggccgctattggacgcggcggccgcggccaatcggagccgctcttgctgcgacgcagcggtcggaagcggagcaaggtcgaggccgggttggcgccggagccggggccgcttggagctcgtgtggggtctccggtccagggcgcggcatgggcgtcctggccgcagcggcgcgctgcctggtccggggtgcggaccgaatgagcaagtggacgagcaagcggggcccgcgcagcttcaggggccgcaagggccggggcgccaagggcatcggcttcctcacctcgggctggaggttcgtgcagatcaaggagatggtcccggagttcgtcgtcccggatctgaccggcttcaagctcaagccctacgtgagctacctcgcccctgagagcgaggagacgcccctgacggccgcgcagctcttcagcgaagccgtggcgcctgccatcgaaaaggacttcaaggacggtaccttcgaccctgacaacctggaaaagtacggcttcgagcccacacaggagggaaagctcttccagctctaccccaggaacttcctgcgctagctgggcgggggaggggcggcctgccctcatctcatttctattaaacgcctttgccagcta

SEQ ID NO: 154476 - DNA, 2105 bp, Homo sapiens
  Payload ID: 10364
  Gene Symbol: MRPL42
  Gene Name: mitochondrial ribosomal protein L42
  ENST ID: ENST00000358678
  CDS Start-End: 132-287
aaacaagatggcgggttcgtggtgagaagccgtcaaggagtagaaattggtatgcttagaagcagattctaaaagcagtttctcttcagaacatcttttttcataccacttgataagcatcttgaaacaccatggctgtagctgcagtaaaatgggtgatgtcaaagagaactatcttgaaacatttatttccagtccaaaattcgggcgtacatgtgcaggtttgttacgtggatgtattacatatactgaggtttgggcttcaactgaacccgtcacccaaatagtgaacatagtacccaatagatggagctttatattgtgtttgtcataaatctacgtattctcctctaccagatgactataattgcaacgtagagcttgctctgacttctgatggcaggacaatagtatgctaccacccttctgtggacattccatatgaacacacaaaacctatccctcggccagatcctgtgcataataatgaagaaacacatgatcaagtgctgaaaaccagattggaagaaaaagttgaacaccttgaggaaggacctatgatagaacaacttagcaaaatgttctttactactaagcaccgttggtatcctcatggacggtatcacagatgtcgtaagaatctgaatcctccaaaagacagatgatgcggaggttcctgggggaatcaaagagaaatgtgcctcatttgccatttgagaaaatgcagtctggtgtattcagtaatatatagtaaagtaataatgataaaatatcttttcatatattagaatgtgtacttttatataaagtaattctggatttgacattctcatttagagaaacctattttcttttttctttttctattttagtgtttcatttatgtgcggtctccaatttaggacttttccatagtgccaaagccatacatattcagtagaacatcaataaattacatcagaaattcaacactttattataaaacgggcttcgtgttagataattttgctaaacagtaggctactgtaagtgttctgagcatatttaagacaggctagcattttcaatttacaatattttcaactgatagtaggtttattgggatgtaaccctatgataagttgagaaacatctctttttgtgtgtctactgtgatttaagtatttttaatcatcagccaagcattgttagtagtataaatatgattaataaaaatgtgcatggctttcctgaaggagattttttaattgcctttgagaataaactcataaggtctaccaagaaaataaatgttatgatgtttcagttggcttctaggaaataattaaattagtgatattttaatcaggttttactatctgctaggccccttccatcaattcttattaaattctcaaaataatcctttgaaaagggagtataattacattttacagtgactcgaaccttacccaaacaagtgggagagccaggagccaaactatcaggctccaaagcttttttttagtgcatcacaatgacaaaggggtggttttctttcacccaagaatgtgctttcctggaaatttttctagatagaatattatgtaatttgttttgaaggttttttttcctgactgtcttaaagattatgctagctttagaacacatgcaaacagctgcagctctgtgattaaaatgttaaggtcactagaatagtgttaggaaaatgttaatagataattctgctgcctctattagcttatgtatgatccttaatagcattgcttccccttcagtttctatttaggaggtgaagaatcttttaataaggtagaaagttgctttatttaaatttgtactgtagaatgtttgtgatacagtatttgtaaaattgatatgaaaaataatttctcaaagtctattgtttgatctagttattttaataaaggaactctagaagtttcaagtggccagtgaagtgtgaggaatagagagtaaaggaaataattaataatggtgaccctctgttaagtggtttactttttccattaatataaatttcatttggaaagattaaaaaaacaagtttgattgaacttgataaatcagaaatatttaccagc

SEQ ID NO: 154477 - DNA, 1983 bp, Homo sapiens
  Payload ID: 10364
  Gene Symbol: MRPL42
  Gene Name: mitochondrial ribosomal protein L42
  ENST ID: ENST00000393128
  CDS Start-End: 133-552
gaaacaagatggcgggttcgtggtgagaagccgtcaaggagtagaaattggtatgcttagaagcagattctaaaagcagtttctcttcagaacatcttttttcataccacttgataagcatcttgaaacaccatggctgtagctgcagtaaaatgggtgatgtcaaagagaactatcttgaaacatttatttccagtccaaaatggagctttatattgtgtttgtcataaatctacgtattctcctctaccagatgactataattgcaacgtagagcttgctctgacttctgatggcaggacaatagtatgctaccacccttctgtggacattccatatgaacacacaaaacctatccctcggccagatcctgtgcataataatgaagaaacacatgatcaagtgctgaaaaccagattggaagaaaaagttgaacaccttgaggaaggacctatgatagaacaacttagcaaaatgttctttactactaagcaccgttggtatcctcatggacgatgtcgtaagaatctgaatcctccaaaagacagatgatgcggaggttcctgggggaatcaaagagaaatgtgcctcatttgccatttgagaaaatgcagtctggtgtattcagtaatatatagtaaagtaataatgataaaatatcttttcatatattagaatgtgtacttttatataaagtaattctggatttgacattctcatttagagaaacctattttcttttttctttttctattttagtgtttcatttatgtgcggtctccaatttaggacttttccatagtgccaaagccatacatattcagtagaacatcaataaattacatcagaaattcaacactttattataaaacgggcttcgtgttagataattttgctaaacagtaggctactgtaagtgttctgagcatatttaagacaggctagcattttcaatttacaatattttcaactgatagtaggtttattgggatgtaaccctatgataagttgagaaacatctctttttgtgtgtctactgtgatttaagtatttttaatcatcagccaagcattgttagtagtataaatatgattaataaaaatgtgcatggctttcctgaaggagattttttaattgcctttgagaataaactcataaggtctaccaagaaaataaatgttatgatgtttcagttggcttctaggaaataattaaattagtgatattttaatcaggttttactatctgctaggccccttccatcaattcttattaaattctcaaaataatcctttgaaaagggagtataattacattttacagtgactcgaaccttacccaaacaagtgggagagccaggagccaaactatcaggctccaaagcttttttttagtgcatcacaatgacaaaggggtggttttctttcacccaagaatgtgctttcctggaaatttttctagatagaatattatgtaatttgttttgaaggttttttttcctgactgtcttaaagattatgctagctttagaacacatgcaaacagctgcagctctgtgattaaaatgttaaggtcactagaatagtgttaggaaaatgttaatagataattctgctgcctctattagcttatgtatgatccttaatagcattgcttccccttcagtttctatttaggaggtgaagaatcttttaataaggtagaaagttgctttatttaaatttgtactgtagaatgtttgtgatacagtatttgtaaaattgatatgaaaaataatttctcaaagtctattgtttgatctagttattttaataaaggaactctagaagtttcaagtggccagtgaagtgtgaggaatagagagtaaaggaaataattaataatggtgaccctctgttaagtggtttactttttccattaatataaatttcatttggaaagattaaaaaaacaagtttgattgaacttgataaatcagaaata

SEQ ID NO: 154478 - DNA, 920 bp, Homo sapiens
  Payload ID: 10364
  Gene Symbol: MRPL42
  Gene Name: mitochondrial ribosomal protein L42
  Uniprot ID: Q9Y6G3
  ENST ID: ENST00000552217
  CDS Start-End: 137-565
tgaaacaagatggcgggttcgtggtgagaagccgtcaagcaggagtagaaattggtatgcttagaagcagattctaaaagcagtttctcttcagaacatcttttttcataccacttgataagcatcttgaaacaccatggctgtagctgcagtaaaatgggtgatgtcaaagagaactatcttgaaacatttatttccagtccaaaatggagctttatattgtgtttgtcataaatctacgtattctcctctaccagatgactataattgcaacgtagagcttgctctgacttctgatggcaggacaatagtatgctaccacccttctgtggacattccatatgaacacacaaaacctatccctcggccagatcctgtgcataataatgaagaaacacatgatcaagtgctgaaaaccagattggaagaaaaagttgaacaccttgaggaaggacctatgatagaacaacttagcaaaatgttctttactactaagcaccgttggtatcctcatggacggtatcacagatgtcgtaagaatctgaatcctccaaaagacagatgatgcggaggttcctgggggaatcaaagagaaatgtgcctcatttgccatttgagaaaatgcagtctggtgtattcagtaatatatagtaaagtaataatgataaaatatcttttcatatattagaatgtgtacttttatataaagtaattctggatttgacattctcatttagagaaacctattttcttttttctttttctattttagtgtttcatttatgtgcggtctccaatttaggacttttccatagtgccaaagccatacatattcagtagaacatcaataaattacatcagaaattcaacactttattataaaacgggcttcgtgttagataattttgctaaacagtagg

SEQ ID NO: 154479 - DNA, 775 bp, Homo sapiens
  Payload ID: 10364
  Gene Symbol: MRPL42
  Gene Name: mitochondrial ribosomal protein L42
  Uniprot ID: Q9Y6G3
  ENST ID: ENST00000549561
  CDS Start-End: 98-526
caggagtagaaattggtatgcttagaagcagattctaaaagcagtttctcttcagaacatcttttttcataccacttgataagcatcttgaaacaccatggctgtagctgcagtaaaatgggtgatgtcaaagagaactatcttgaaacatttatttccagtccaaaatggagctttatattgtgtttgtcataaatctacgtattctcctctaccagatgactataattgcaacgtagagcttgctctgacttctgatggcaggacaatagtatgctaccacccttctgtggacattccatatgaacacacaaaacctatccctcggccagatcctgtgcataataatgaagaaacacatgatcaagtgctgaaaaccagattggaagaaaaagttgaacaccttgaggaaggacctatgatagaacaacttagcaaaatgttctttactactaagcaccgttggtatcctcatggacggtatcacagatgtcgtaagaatctgaatcctccaaaagacagatgatgcggaggttcctgggggaatcaaagagaaatgtgcctcatttgccatttgagaaaatgcagtctggtgtattcagtaatatatagtaaagttgacttatatccaaaattctacaaattcttagctatgttataaatgtagaaagaagtgaaaaatcaaaatatgattatgaagattttcttctcttccgagtacaaagctctgctaaataaggatttacccaagatgcccacatccacatacttatgt

SEQ ID NO: 154480 - DNA, 15582 bp, Homo sapiens
  Payload ID: 10364
  Gene Symbol: MRPL42
  Gene Name: mitochondrial ribosomal protein L42
  Uniprot ID: Q9Y6G3
  ENST ID: ENST00000549982
  CDS Start-End: 162-590
gcgcagcgctgtttcgtgggaccaggattgaaacaagatggcgggttcgtggtgagaagccgtcaaggagtagaaattggtatgcttagaagcagattctaaaagcagtttctcttcagaacatcttttttcataccacttgataagcatcttgaaacaccatggctgtagctgcagtaaaatgggtgatgtcaaagagaactatcttgaaacatttatttccagtccaaaatggagctttatattgtgtttgtcataaatctacgtattctcctctaccagatgactataattgcaacgtagagcttgctctgacttctgatggcaggacaatagtatgctaccacccttctgtggacattccatatgaacacacaaaacctatccctcggccagatcctgtgcataataatgaagaaacacatgatcaagtgctgaaaaccagattggaagaaaaagttgaacaccttgaggaaggacctatgatagaacaacttagcaaaatgttctttactactaagcaccgttggtatcctcatggacggtatcacagatgtcgtaagaatctgaatcctccaaaagacagatgatgcggaggttcctgggggaatcaaagagaaatgtgcctcatttgccatttgagaaaatgcagtctggtgtattcagtaatatatagtaaagtaataatgataaaatatcttttcatatattagaatgtgtacttttatataaagtaattctggatttgacattctcatttagagaaacctattttcttttttctttttctattttagtgtttcatttatgtgcggtctccaatttaggacttttccatagtgccaaagccatacatattcagtagaacatcaataaattacatcagaaattcaacactttattataaaacgggcttcgtgttagataattttgctaaacagtaggctactgtaagtgttctgagcatatttaagacaggctagcattttcaatttacaatattttcaactgatagtaggtttattgggatgtaaccctatgataagttgagaaacatctctttttgtgtgtctactgtgatttaagtatttttaatcatcagccaagcattgttagtagtataaatatgattaataaaaatgtgcatggctttcctgaaggagattttttaattgcctttgagaataaactcataaggtctaccaagaaaataaatgttatgatgtttcagttggcttctaggaaataattaaattagtgatattttaatcaggttttactatctgctaggccccttccatcaattcttattaaattctcaaaataatcctttgaaaagggagtataattacattttacagtgactcgaaccttacccaaacaagtgggagagccaggagccaaactatcaggctccaaagcttttttttagtgcatcacaatgacaaaggggtggttttctttcacccaagaatgtgctttcctggaaatttttctagatagaatattatgtaatttgttttgaaggttttttttcctgactgtcttaaagattatgctagctttagaacacatgcaaacagctgcagctctgtgattaaaatgttaaggtcactagaatagtgttaggaaaatgttaatagataattctgctgcctctattagcttatgtatgatccttaatagcattgcttccccttcagtttctatttaggaggtgaagaatcttttaataaggtagaaagttgctttatttaaatttgtactgtagaatgtttgtgatacagtatttgtaaaattgatatgaaaaataatttctcaaagtctattgtttgatctagttattttaataaaggaactctagaagtttcaagtggccagtgaagtgtgaggaatagagagtaaaggaaataattaataatggtgaccctctgttaagtggtttactttttccattaatataaatttcatttggaaagattaaaaaaacaagtttgattgaacttgataaatcagaaatatttaccagctttgtcgatggtgtattcttgaaaaatgtttggttttctttcaggttgacttatatccaaaattctacaaattcttagctatgttataaatgtagaaagaagtgaaaaatcaaaatatgattatgaagattttcttctcttccgagtacaaagctctgctaaataaggatttacccaagatgcccacatccacatacttatgtgtcagtgctttggagaattaactttgactttattctactggaagtatagattaacactgtgctttctgggattttgcttttcatgggttgctgatttttaattttgctaaataagcacatagtccgtgatcaccagcatcacctgccctctgttcctcccccgtcccccagggataagaacctgttatccaccatcagtaacattttatgaaagatctacttatttgtctgttttgcagacattttaaaattcgtaaagtgggatgcttctttaatttaaatacatttagcttcatgaaaaactcactacacagttcttgttcaagcattattgggaaaccaccagagggcactctcacccagggcttaatttgaacatctcgcccaaaagtgacttttaaaagcacttaattagcagagaatttggatgttcattagttgagaatgactagtagaataaatggtaatagtgaaattaagtgctggaatattctgagtagaccaatagcaaaaactgatttttttttttttttaaagaaaaggtcttgctgtgtcgcccaggatggagtgcagtggcacaatcacattgcactgcaacctcaatatcctgggctcaagcaatcctcccaccgcagcctcccgaattgctgagactacacatgtgtgctaccatgcctggctaattgttttaattttttttatagagacggggtttcgccatgttgcccaggctggtcttgaactcctgggctcaaagcgatccacccaccttggcctccaaaagtatgggattacaggtgtgagccactgtgcccagccttattttttttttttaagataatattgttaacattttgtatttctctgcataaatatatttcaaaaataaaaatagagctcataatatatgctgttttgtaatgcttttttcacttaataggaattttttccgtatcattaagtactctgatttaatgggtgcatattattctataatctggcttgtcataatttaattaactccctgctgttagacaaaatcattgtttctgttccatcttgtgaataatgctgttattaacatcctggtggattattaccattttctttttttattttttttttaaatttatttcttcttttttttttcttataatctcatcagaagctggcaagatcattactgttttcttagatttgtttctgtaagtgcaatcgttgaatcaccatgtccggcatccatgtttatgtacatttttaaagtcagtggtttaaactgtatactttttgggttttggagatggaggtttgctctgcccaagctggaatgcaatggcgcgatcttggctcactgcagcctccacctcccgggttcaagtgattctcctgcctcagcctccttaagtagttgggattacaagtgtgcaccaccatactcaggtaattttgcatttttagtagagacagggtttcaccatgttggtcaggctggtctcgaactcctgacctcaagtgtccacacaccttggcctcccaaagtgctgggtgggattataggtgtgagcctccatgcctggcctaaactgcatactcctaacatcagtatatagaaatattttctctttagttctattaaaattttaaaaaatctttatcaatttagtaggcaaagactggaaaatgttttaatttgatcagccactttaatgtatgtctcatttcaaagcatataaagtatacaagtttcaggtcctagcttaaacctataagaggccttattatgggcttatttcctttgcagccctttaccataatgtgtttcttctacctcccctgcacaacattgtttatatgccccctaaaatgtaacttctttagattctgttgttacgtgcaacactgtatatctctccatagcacttaatcagagtttgtaattaggcatctttttgtgtgattatttggtaaatgtccatatcccctactagcctataagctccatgacttctaggtaccctgtctgactacgtgtatcactgtttctaccgcctaacattgcctagcacattcattgcttcacaggcatctgaatatggttttataaaatacattgctctagtgcacaggattttaagctaaggatttcatgaatgggatttggggtaggggcatctatgaaattcctgaaattgtgtagaattttgagaatatgtgttttcctggggatagagtatgtagtttctcagcaactcattacagtctgtcacatcatgccctaattctacttgcctgtagctaaacacctaataacattagaactgaaatgatagtgatatgcaagatagcacgtgtggtttccacatattctaagaggcatcttcaattagattccaaaaatttttaagaaaaaaagatataatgtgccatcattttggatggttctgggcacttcaggtaaacccttactcaaagaatactttttcagtttcaatgtgtatttttaaaatttccagaagatgagttgaatatcagcccacaaacactggtagtaagcaaactattttatttgctaaaggcataaataaatgtctcctttgcttttaggcaaagggaatgcttcttcagatttttttttttccccagaagttcaaaataacttgctcatagtcttcccaaaataattttcaaacattctaacaccaaagaaagatactcccaattgagctcagccatcagcctcctactattttttaatgtgctgtttaaccttgtgaatgtgagaatattttgaatgcactgggaaggaatactcaggaacaatatgtaatgtgctttctagttttgcacaaaggcattcattttgatttagtaacaacctcatacttacatagcatatccttctgcagaaatgcttcacagccatgactgcttgaattcttgtcatgttgcttgtaaatgagctcctgtttttagatggagaaatggaggcagagtctcacaattacatgtgagaatagcaagtagaaccttatgattacttctgagtcttttttttttttttttttttgagatggagtttcacttttgtcacccaggctggagtgcagtacagtggccagtggcatgatctcagcccactgcaacctccgcctcataggctcaagcaattctcctgcctcagcctcccgagtagctgggattatgagcgtgcaccagcatgcctggctgattttttgtattttcagtagagatggggtttcaccacgttggccaggctggtcttgaactcctgacctcaggtgatctgcccaccttggccccccaaaatactgggattacaagggtgagccactgtgcccagcctcttctgagtcttcaattcagcaagaatgtctcttttttttttttttttttttttgggacagagtcttgctcttgttgccttggctggagtgtagtggcacattctcagctcactgcaacctccacctcccgggttcaagcgattctcctgcctcagcttcccaagtagctgggactataggcatgcaacaccatgtccggctaattttttgtatttagtagagatggggtttctccatgttggtcaggctggtctcaaactcctgacctcaggtgatccacctgctttcgcctcctgaagtgctgggattacaggcatgagccaccacgcccggccaagaatgtcttttctttataatgttgtctctaagcatgtaatcttttcggcaaattttattaagcacctatagagttcaagccactgtgggttcaaagatagccctcattcctgattgacaaagtatcttgctatgaccatcccttctttcccctctagtcaaaattagtctcttcttcactcataatgcaaagtacattggattactattatgccacttacttgaataattgtcttgatgagtaatatatgtagtcagtaacatggttaagtgtggcaatttggattgatcccattggacttttcaattgctgcatccaggtgtaattaccataagagcatagaagatagaatcgtaaagctgaaagacatcttaaagatgatttttggggactgatttggaaacagatccaaagacactaattgacttgcccaagatcacagattgtggcagaaccaaccaatgtcttttttaaacattaaggacatcttatatgtatatttatgcatatacatactgatgaaatgtgcctttagcaatagatgtgtccagtgatgtactaatgaagatttaacaactggttctaacttgtaatgtttgccagtttccatgactgggtcttacaagttgttgtgcactgactccatcattccactggatgtgcccctgaaatcatatatttactactaaaaccattagattgtttccttgttccagttatgcattcagagacactccaccttattttctgattacatttgcagggagaaataactccttacttgtcagtttcagccttcacttttagtttctttttcttttcctttttccaacccagtataccttagaaactttcagtttcttttaaggatttaataacttgcttataagtgtttaaaatgacttaatgggttctatcttttaagggaactttggatgaatccttgaatatcagttatctattgccaattaacaaatcaccccaaagctcattggcttaaaacaacaatctttcattagtttgcgttcttccaggtaattcttatagtctggatccagctcagcttatcttggctggacttgcccatgcagctgaggtcactagttgggttgttgaggctggctagtcctagatggtgtcactcatatgtctggtattgagtgactgtcacctggggcattagggggactgtgtctctcatcatccagcaagctaggcctggattcttcacatggctttaggatttcaagagtatgagattggggctgggcatgatgactcacacctgtaatcccagcactttgggaggccaaggttgggggatttcttgagcccaggagttcaagaccagcctgggcaacatagtgagagcccatctgtaaaaaaaaaaattttttgagatggagtttcgcccttgttgcccaggctggagtgcaatggcgcaatctcagcccaccagaacctttgcctcttgggttcaagcgattctcctgcctcagtctcctgagtagctgagattacaggcatgagccaccacgcccagctaattttgtatttttagtagagatgggtttctccgtgttggtcaggctggtcttgaattccccacctcaggtgatctgcctgcctcagcctcccaaagtgctgggattacaggtgtgagccaccacgcctggtcttctacaaaaaaattttaaaaaattagctgggggtggggagggtggggtggtgctgcatgcctgtagtcccagctatttgggaggctgagatgggaggattgcttgagcccatgagattgaggctgtagtgagccatgattgtgccactgcactctaggctgggcaacagaacaagcacctgtatcaaaacaaacaaaaaagtgcaagattggaagcttcgaggcttcttgaggcctagtctcagaactggcacaatatcacttcataaggctatctcagattcaagggagtaagaggagagatgctacctattaaaaggagaagcagcaaatactatggccattctcttcacaatagttgtcaccaaaacgtaatcgatttgtttatgggtttacattgtcatgtctccacaggacaatgcacatggtatgtttgtcagaacccagttggagttttgtttcccagcatccaaaggaaatccctaactttcattttttcttcccgtaagcagccccgaacacttacttataagccatctctacctgaattagcaatcatggataagctcaataactgatcatttccttatcagtttaaaccatatatattttaacactgtctctttttcacacacactagttagctaagaatgagctggggggctgggcgtggtagttcacacctgtaatcccagcactttaggaggcggaggtgggcggatcacttgaggtcaggagtttgagaccagcctagctaacatggtgaaaccccgtctctactaaaaatgcaaaaattagctgggtgtggtggcaggcatctgtaatcctagctactcaggaggctgaggcaggagaatcccttgaacccaggaggcagaggttgcagtgggccaagatcacaccactgcactccagtctgggtgataaaacgagattccgtctcaaaaaaaaaaaaaaaactgccaaaacgctttttgcaaagtggttgtaccattttatattctcaccaccatgaatgaaagttccaattgctatattcttgccctcatttgataatatttttagttttagccattctaatggatatatagtaataatttgatggttttaatttgcatttctctgatgatcaataacattaagttttgattcaggtacttgttgggcactcatatctttggtgaaatatctgttcaaatcatttgctcttttttttttcttagcacttaaaaaagactttttgccaggcacagtggcacatgcctgtagacctagctactcaggaggctaagacaggaggatcacttgagtccagaagttctgggttgtagtgagctatgtcaatcaggtgtttgcactaagttcagcataaatgtagtgacctcctgggtcactgggacccagagttgcctaaggagcgtcagaagtggagcaggtcaaaactcctgtgctgatcagtagtgggatcacacctgtgaatagccactgcactgcagcctgggcaacatagtgagatcctcatctcctgaaaaaaaaaaaaaactttagtttttaaaagtagttttaggttctgagcaaaattgagaggagggtacagaaataacttatatatcctcagtgctcccctcccccatgcctccctcatcaccatcccccagcagagtggcacattggttacaattgataaacctacactgacacatcattatcacccaaagcctattgtttccattagggttcactcttggtgctgtacaatctatgggtttgaacaaaggtacaatgacatgtatccatctttatagtcatgcagagtctacactgtcctaaaaacccttggctctgcctcttcgtcgtgtcctccccactgacccccggctaccactggtcttttcactgtctccgtaagtttttcctttttcagaacgccatatagttggaatcataaagtatatatagccttttcacattggtttctttcactggataatatgcatttgtttcctctatgtcttttcacagtttgatagctcatttctttttagcatcgagtaatactccattgtctgggtgtacaacagtttatccattcacctgctgaaggacatcttggttgattgcttccaagttttggcaattatgaataaaattgctatagatatccatgtgtaggtttttgtgtccatttaagctttcaactcctttgggtaaataccaaagagcacaattgttggattgaatgctaagagaatgtttcgttttgtaaaaaaccaccaaactgtcctacagagaggctgtaccattttgcattcccaccagcagtgaataagggttcctattgctcaacatccctgtcagcacttggtgttagtgttctgaattttggccattctaaaaggtgtgtagtggtgtctcacttgttttgtgtttttctctgctcagacagctcatccacatcacatttattttaatttgcatttccctgataatatgtgatatggaacatctatttactcattattttttcttcttatgattgaagttataatatttctttaaatattttggataaatcttttgtcagatatatgcactggaaatatttttatgggggaccagtgttaagattagatctgtttaaagagaaaggagagaaagtttcaggcagggaatgcaatcgatgtgaaggtttggggtaatttgtttcatttatctttaacaccatgttatggatggcaaaataacttcactggctttttttatcaagaaaagacttaccttttctgaatgcaacagtattagtaaacctaatggtgacaataaaagcgattctgaataaatgaaaaccaatagattgttctagttttactcataaatataattcttcatatactgagttcagttttttagccataaatgaagacatgggaaaaccataacatgttatttgctgagaagttctggcaaatgaagcaataaaataatcaaaactaaatcaacatttaaatacagaacataaagagataaatccaaaaccagaagatctctttgaaagaaaaacctaagtaattaaaaaactgaaagcacagatattcattatttcacaaataaacgttaatgctttttagacatctttaagcaactttagattgctaaaactaaaaaatgcaattaagacaataatcttatatatagacaataattgtcttaataataatcagcatcaaagattcttagaaatgttgggagactgtgtggcaaagaaagtacttcaattaccagttaccaacacacaacaatttgaaatatccaggaagatcaacccatagaacaaagaaagctaataaattaccttttcttgcaattggtttgatgtaccattaatatatagatattactaatatggcaattagtttatatgctatttgaatatgatagtaatatgaaggaagattctcttttttccacttcattgccaacaaacagctaactctaaacaacagtaaagtgtggaataaattactttgttaattaatgtggtttgaagctttgtaggaatccaattggatggatagcagcagtggtaagagaacattccggaataattacctaaattaaggagcttgccctagaatgtaaatcaacctactatatctttttatttgaaaaagtcttggtagaaaaagcatatcaactgaactgtacagtgtgttcagtgacttagtaaagaacataacttgtgtaaaggctaatgcaataagtttgagattgttctctttatgtaatagtttggaaaacaaacaactgtgattacatttagagatatgatgattatctagagggaaagttctgttgagcatatttgaacatttaattattgctgcaagaagccagtttggtcccagctttataaagatatacattgggctgggtgcggtggctcatgcctgtaatcccagcactttgggaggccgaggcaggcggatcacctgaggtcagaggttcgagaccagcctggccaacatggtgaaaccccatctctactaaaaatacaaaaattagctgggcgtggtggcacacacctgtattccttgctactcgggaggctaaggcaggagaatcgcttgaacccaggaagcagaggttgcagtgagccaagattgtgccactgcacaccagcctggataaaaagagtgaaactctgcctcaaaataaaataataaaatgaaataaagatataaattggccagctagagttacctgaagttactatcttcaattatctgaagacagttctgatagcttcagaattctttcatacaaggcaggaatgcaacttgttttttaatggcagataaaatcaaagagcaaaagcaaaaggtagaagcttgaaagaccagagttgctacagattgttattacatgttccataatttaacaattgtcattgaagttggtgattgtcttgatattgcacatctgtaagaagtaatcaaactattgtgaatttgatagaatgctttaagttttattttccaacaaaagaatgtctacatacggcaaattcatagatctggaatccatttatgtcatcaaaagaggatttaaatttaattgtaagcttatatgatacattgttctaactggcaactaatgaaggattaaaaatgaattttgaaaataccacaccacttgcttcattttggataaaagttaaaagtgaatattctgagtatgctgaaattagtttaaaaacttttttttcccattccgaccattatccctttgtaaatctggtttcatcttatgaataatattttttaaaaaccatggaaacagtttagatatacatcaatccatgaaagtagtagtattgtcaatctaccctggattacatattttaacgagaaagaaaccagctcatttgtgacatttagaattttttttttttttttttttttttgagagagagggtctcattcattttattgcccaggctggagtgcagtggtgcaatcgtagctcactgtaaccttgaacttctgggctcaagcaatcctctcacctcagcctgcagctggagcttcaggtgtctgccatcacgcctggcaaatttattttttgtagagaccaagtctccttgtgttacccaggttggtatcaaactcctggtctcaagtgatcctcccatctcggcccccacaagtgttgagatgacaggtgtgagccaccttgcttgacctaaaaacttttgaatattaatatgcattgtgtttattcaaagtatatctaatggtctaataaacagaatcactacttcaattataatcttcagttataattgaagaatgacaaaaagttgagttatagaaattatattaatcttaaattcacattttcagtgaaagtttttaaataattttttctctttccgttttatgtgtgttccaattctatttattgaaatttaattttatatccattaacataattaaaaattggggcttttaaaaaatgtttttcattctactaatttcattttataatttataaaagtactagaccacaatggattaaagaactatcctttcatcacagatagttcaatgactcctgtttttttttagaccgagtcttgctctgtcaccccagctggagtgcagtggtgtgatcttggctcactgcaacctccgtctcccaggttcaagcaagtctcctgcctcagccttccgagtagctgggactacaggtgcccaccaccacacccggctaatttttgtatttttagtagagacggggtttcaccatgttggtcaggctggtcttgaactcctgacctcatgatctgcctgcctcggcctcccaaagtgctaggattacaggcgtgagccaccatgcccagccaactcctgttttatagtgtactttctggaatattattcagctttctcttgaattcttttagtaactaggagttcactacgtttccatggacctaactccaataatgattggacagttttctccctctgctttttctttctttctttcttttttttttttttttttttgagatggcgtctcctctgtcaatctcggttcattgcaacctccacctcccaagctcaagcgattcttgtgcctcagcctcctgagtagctgggattacaggcacccaccaccacacctggctaatttttttttttggtagagacagggtttcaccatgttgaccaggctggtcttgaactcccgacctcaggtgatctggctgccttggcctcccaaagtgctgacattacaggcatgagccactgcacctggccattattggacagttttaatggaaagtgtttccttatattgagtggaaatcagtctgcttatggtttataatcctcagacttgattctccccctgaatctatatgaaataaatttactcctatttgaaaatatttgtcatattccttcttatttttctttaagctttattttttcttattatccatatgacatgtttccagaactctcccttatcctgattgtcctcctttagacacatgcttttaatgatatatttcttaaaatgtattacccaggacaacatatttttttttactgtggacagtatacttttacgaatggtgccaataatgcattacattttttagcagtcatgtcatcctcttgatttgcattgagtcatcatttcttaagagggaatcaggatatcaaaatagtctccaaactcagctgattccttctgcagatacactctccacccttcttgattccttttcgggagaaaagaaaaaagtttattttcattgctaacctcactgatttttaattttaccatttaaatgttagtaacagctggtaatgtaaccaaagaagatttttggcaggggatgatgcattcagagccttcactctggctacagggagaccatggaggatgggctggaacggaagcacgatggactcctgggcacaccgttaagtgactgatggagtcattcagctgacaaatgataatggcctggattaaggaaggagaagaggggaccaagaaatgccagagatacataggaagtaaaaattaataggccttggcaactattttttttttttttttttgagacagagacttgctgtgttgcccaggctggagtgcagtggggtgatctcggctcactgcaacctctgcctcctggattcaagcaattttcgtgcctcaacctcctgagtagctgggactacaggtgtgcatcaccattcccaggtaatttttgtatttttagtatagatggagtttcgccattctggccaggctggtctcgagctcctgacctcaagtgattcgcccgcgtcggcctcccaaagggctgggattacagacatcagccactgcacctgggttggcaactaatttacacggaatggcagagagtgattaatgaaaaagcggggagaaaagctgctcttgacatctgaaagctgacttggcattcacagctaggctatgttattttcctattgggcataagtctcacagaataccaacattaaacaagatgactctgaaaccttaataaagtgagaaaaaacaagtccactttgtaattttgtctaagcacaggcaaaaagagggtcatggtgccatccagaaaataccaaaaatcaccctctctcagctaaaatgagcaactgctactttaccagtgacagctttgtcccagctctagtctgccttccctatagagaagatgtattgagataatcatgaaattctccttctttctgatagtatccaatctggagcaaacccgtttccttagaccctctcccaatcccaaattctatactaggttcttctaaacactctcatactgagacaccccatggttccctatgttgtgtgttcttctttgctgcaatgagtaataaactcaacttgtttaact

SEQ ID NO: 154481 - DNA, 725 bp, Homo sapiens
  Payload ID: 10364
  Gene Symbol: MRPL42
  Gene Name: mitochondrial ribosomal protein L42
  ENST ID: ENST00000551396
  CDS Start-End: 113-274
tgagaagccgtcaagcaggagtagaaattggtatgcttagaagcagattctaaaagcagtttctcttcagaacatcttttttcataccacttgataagcatcttgaaacaccatggctgtagctgcagtaaaatgggtgatgtcaaagagaactatcttgaaacatttatttccagtccaaaattcgggcgtacatgtgcagatggagctttatattgtgtttgtcataaatctacgtattctcctctaccagatgactataattgcaacgtagagcttgctctgacttctgatggcaggacaatagtatgctaccacccttctgtggacattccatatgaacacacaaaacctatccctcggccagatcctgtgcataataatgaagaaacacatgatcaagtgctgaaaaccagattggaagaaaaagttgaacaccttgaggaaggacctatgatagaacaacttagcaaaatgttctttactactaagcaccgttggtatcctcatggacggtatcacagatgtcgtaagaatctgaatcctccaaaagacagatgatgcggaggttcctgggggaatcaaagagaaatgtgcctcatttgccatttgagaaaatgcagtctggtgtattcagtaatatatagtaaagtaataatgataaaatatcttttcatatattagaatgtgtacttttatataaagtaattctggatttgacattc

SEQ ID NO: 154482 - DNA, 701 bp, Homo sapiens
  Payload ID: 10364
  Gene Symbol: MRPL42
  Gene Name: mitochondrial ribosomal protein L42
  ENST ID: ENST00000547098
  CDS Start-End: 135-602
aaacaagatggcgggttcgtggtgagaagccgtcaagcaggagtagaaattggtatgcttagaagcagattctaaaagcagtttctcttcagaacatcttttttcataccacttgataagcatcttgaaacaccatggctgtagctgcagtaaaatgggtgatgtcaaagagaactatcttgaaacatttatttccagtccaaaatggagctttatattgtgtttgtcataaatctacgtattctcctctaccagatgactataattgcaacgtagagcttgctctgacttctgatggcaggacaatagtatgctaccacccttctgtggacattccatatgaacacacaaaacctatccctcggccagatcctgtgcataataatgaagaaacacatgatcaagtgctgaaaaccagattggaagaaaaagttgaacaccttgaggaaggacctatgatagaacaacttagcaaaatgttctttactactaagcaccgttggtatcctcatggacgaggcaaggtctcactcactgtgttgcgcaggctgattttaaactcctggactcaagtgatcctcctccctcagctgggattgtaagaatgagccactgccactgtacttttaaatttacatataatttagctaaaatgaaatagtacttctttttttctttattttaatgggggaatttaacca

SEQ ID NO: 154483 - DNA, 692 bp, Homo sapiens
  Payload ID: 10364
  Gene Symbol: MRPL42
  Gene Name: mitochondrial ribosomal protein L42
  ENST ID: ENST00000548545
  CDS Start-End: 73-459
aagcagattctaaaagcagtttctcttcagaacatcttttttcataccacttgataagcatcttgaaacaccatggctgtagctgcagtaaaatgggtgatgtcaaagagaactatcttgaaacatttatttccagtccaaaatggagctttatattgtgtttgtcataaatctacgtattctcctctaccagatgactataattgcaacgtagagcttgctctgacttctgatggcaggacaatagtatgctaccacccttctgtggacattccatatgaacacacaaaacctatccctcggccagatcctgtgcataataatgaagaaacacatgatcaagtgctgaaaaccagattggaagaaaaagttgaacaccttgaggaaggacctatgatagaacaacttagcaaaatgttctttactactaagcaccgttggtatcctcatggacggtaagttttcttttcttttcttcaatccctactacatacagtaaaggaacacatggattttcttgcaataacaaacttctgaagtggtgttttgcatgaggaaattaaccctaagtagaatcacctactatgttgtactttttttttcttttctgagacaggatctcgctctgtcacccaggctggagtgcagtgccacaatctcagctcactgcagcctcaacctccagtgctcaa

SEQ ID NO: 154484 - DNA, 747 bp, Homo sapiens
  Payload ID: 10365
  Gene Symbol: MRPL43
  Gene Name: mitochondrial ribosomal protein L43
  Uniprot ID: Q8N983
  ENST ID: ENST00000299179
  CDS Start-End: 52-660
cccgcccccctctcctcgctgcttaggctccgcggcctccaagctgtagctatgacggcgcgcgggactccgagccgcttcttggccagcgttctccacaacggactgggtcgctatgtgcagcagctgcagcgtctgagcttcagcgtcagccgcgacggcgcctcgtctcgcggcgccagggagttcgtggagcgggaggtgatcgacttcgcccgacggaatccaggggtcgtaatatatgtaaactcgcgtccgtgctgcgtgcccagagtagtggccgaataccttaacggggctgtgcgcgaggagagcatccactgcaagtcggtcgaggagatctcgacgctggtgcagaagctggccgaccagtcgggcttggacgtgatccgcatccgcaagcccttccacaccgacaaccctagcatccagggccagtggcaccccttcaccaacaagccgaccacgttccgcgggctacgcccccgagaggttcaggatcctgccccagcccaggacactggcctgagactgtctgcagttgcaccgcagatcctcctgcccggctggcccgacccaatatcagttcagtcatccgatcttccttggggaaatacccattaccgtcctgaacccttgtcatccactacttggctataagctccagaagtgacaagacacttcacatcttaaatatgtttcctagtttataattcatttgggcagtaaatgtttgttgagcactta

SEQ ID NO: 154485 - DNA, 2134 bp, Homo sapiens
  Payload ID: 10365
  Gene Symbol: MRPL43
  Gene Name: mitochondrial ribosomal protein L43
  Uniprot ID: Q8N983
  ENST ID: ENST00000318325
  CDS Start-End: 55-702
agtcccgcccccctctcctcgctgcttaggctccgcggcctccaagctgtagctatgacggcgcgcgggactccgagccgcttcttggccagcgttctccacaacggactgggtcgctatgtgcagcagctgcagcgtctgagcttcagcgtcagccgcgacggcgcctcgtctcgcggcgccagggagttcgtggagcgggaggtgatcgacttcgcccgacggaatccaggggtcgtaatatatgtaaactcgcgtccgtgctgcgtgcccagagtagtggccgaataccttaacggggctgtgcgcgaggagagcatccactgcaagtcggtcgaggagatctcgacgctggtgcagaagctggccgaccagtcgggcttggacgtgatccgcatccgcaagcccttccacaccgacaaccctagcatccagggccagtggcaccccttcaccaacaagccgaccacgttccgcgggctacgcccccgagaggttcaggatcctgccccagcccaggacactggcctgagactgtctgcagttgcaccgcagatcctcctgcccggctggcccgacccaccagacctccccacagtggatcctatctcatcctcattgacctctgctccagcccctatgctgtccgcagtttcttgcctcccgattgtccctgcactgaccactgtgtgctcagcgtgaaggctgcatagaagtgtgtacggcttgaggtttcagcatccaggctgcagaccccacgcagtgtctcatacagtggaatgtggcagatgagacgggctttcaggaaggaagtccacttcttctgcaggatcttcttccctcccaggtctccctggggaggtagaggcacgggataaggggccagggtcagaggtccagcctctatacccgtgccccaacgtcagcccaatccaccttgcagacacgagccacacgggccacacggtgactgctgcggctctgagtgaagctgccagagccctcctcagtggcacgctccgtgaagaagtagtacaccttgtcatcatcacccactgcactggccttgctctcccgcacgaggacggagaacacaaactccgcatctgtgggtcaggcagtttgagaggcttttgagacaggctggggattcctttccctcactctgaggctgacccctcacttgacaacacacaggaatggaatggacaggctcacctggggatttgggggtggggtggtcagctggccaagggagtaaaaatgaagaaatagtcccctaccccccatcatcctgtgcctcatcctcctaaccattgagccaatgcattggtgtctcctcagttctcagggagtgtgggtggcggctccggcggatgtcaggaatgctccggaattcatacctagtggctgtgtagaggcctccatctggcgtggggatattccaggcatgagagacatgtcatattcaacagggcacatgacatatacatggtggcaggtcctagagatgagatccacatcctaaaaataccatgtctgtgatagggaagaaggcctgctcaccaatgatgaggcctgtgaagccacgggctgggtcataaggacacttctccttcccctcctcgaagctggttggcaaggtgaaggcctcagcatcctagggaacaaggaaccagcagtaagtggttccgaagacaggcagggacagtggctcaaagtcagatcagtctggggtcagggatcagcgatcagggataggggcaggttgtatggcagatgcacctgacagcaataacttaagcatcccctgagaatgaccttatggcctcaaaacaatgtatgtttggagttccaaatctgcaagtggccaacctagagattcactccttatctatgaagaacatctgagcccctagcccatcctgtggaacacatgctgtccaggggatcaaggccctttgttttgggttaaatgaagtttgccaggtggaggtgattagggggaggatgctaagtgaaaatgctataaaaactgcatggtttttacaaaggggaatggttctccagtgcagcccgccgccactggagtgccctgtatggaagtccccttaataaaccatccgtctccttc

SEQ ID NO: 154486 - DNA, 1010 bp, Homo sapiens
  Payload ID: 10365
  Gene Symbol: MRPL43
  Gene Name: mitochondrial ribosomal protein L43
  Uniprot ID: Q8N983
  ENST ID: ENST00000318364
  CDS Start-End: 73-552
ccggaagcctcgaggtttagtcccgcccccctctcctcgctgcttaggctccgcggcctccaagctgtagctatgacggcgcgcgggactccgagccgcttcttggccagcgttctccacaacggactgggtcgctatgtgcagcagctgcagcgtctgagcttcagcgtcagccgcgacggcgcctcgtctcgcggcgccagggagttcgtggagcgggaggtgatcgacttcgcccgacggaatccaggggtcgtaatatatgtaaactcgcgtccgtgctgcgtgcccagagtagtggccgaataccttaacggggctgtgcgcgaggagagcatccactgcaagtcggtcgaggagatctcgacgctggtgcagaagctggccgaccagtcgggcttggacgtgatccgcatccgcaagcccttccacaccgacaaccctagcatccagggccagtggcaccccttcaccaacaagccgaccacgttccgcgggctacgcccccgagaggttcaggatcctgccccagcccaggtgcaagcacagtgaagagttgccccaccaactgcagccccaggctttggactgttactccggtaaaggtggttcttcccctttgggattccaagcccaggcaaatggaacccatcaatgggcaagttgacagaggttctgcttgggataatgaagagctgcctgtttctttccagtgcctgcttctgggggcagtgaccttgtgaaccactcatttttatgcaagtggcatccctaaaacctgagatgaggaagacttcaagggttttacagggcccttgttttttaaatccaaattgataataatgatctcaaaacacagtgagaggtctgaaggctggcttctgaagaatccctgatgtcttattggaacaaccactgagctacggagagctctgctgtgatgggctaggcactttatatctgtgtgaatacagatttataaaacaggttaataaacttatccaaggtca

SEQ ID NO: 154487 - DNA, 894 bp, Homo sapiens
  Payload ID: 10365
  Gene Symbol: MRPL43
  Gene Name: mitochondrial ribosomal protein L43
  Uniprot ID: Q8N983
  ENST ID: ENST00000342071
  CDS Start-End: 73-780
ccggaagcctcgaggtttagtcccgcccccctctcctcgctgcttaggctccgcggcctccaagctgtagctatgacggcgcgcgggactccgagccgcttcttggccagcgttctccacaacggactgggtcgctatgtgcagcagctgcagcgtctgagcttcagcgtcagccgcgacggcgcctcgtctcgcggcgccagggagttcgtggagcgggaggtgatcgacttcgcccgacggaatccaggggtcgtaatatatgtaaactcgcgtccgtgctgcgtgcccagagtagtggccgaataccttaacggggctgtgcgcgaggagagcatccactgcaagtcggtcgaggagatctcgacgctggtgcagaagctggccgaccagtcgggcttggacgtgatccgcatccgcaagcccttccacaccgacaaccctagcatccagggccagtggcaccccttcaccaacaagccgaccacgttccgcgggctacgcccccgagaggttcaggatcctgccccagcccaggatgcggctgagttcctcggcgaaggagcagggccctgctggtactccattgttgctctgcctcagaagcacatagctattgccattcatcctccgcagccggctgggcagtgccaccaagccattggacactggcctgagactgtctgcagttgcaccgcagatcctcctgcccggctggcccgacccaatatcagttcagtcatccgatcttccttggggaaatacccattaccgtcctgaacccttgtcatccactacttggctataagctccagaagtgacaagacacttcacatcttaaatatgtttcctagtttataattcatttgggcagtaaatgtttgttgagcactt

SEQ ID NO: 154488 - DNA, 798 bp, Homo sapiens
  Payload ID: 10365
  Gene Symbol: MRPL43
  Gene Name: mitochondrial ribosomal protein L43
  Uniprot ID: Q8N983
  ENST ID: ENST00000370234
  CDS Start-End: 41-535
ctcctcgctgcttaggctccgcggcctccaagctgtagctatgacggcgcgcgggactccgagccgcttcttggccagcgttctccacaacggactgggtcgctatgtgcagcagctgcagcgtctgagcttcagcgtcagccgcgacggcgcctcgtctcgcggcgccagggagttcgtggagcgggaggtgatcgacttcgcccgacggaatccaggggtcgtaatatatgtaaactcgcgtccgtgctgcgtgcccagagtagtggccgaataccttaacggggctgtgcgcgaggagagcatccactgcaagtcggtcgaggagatctcgacgctggtgcagaagctggccgaccagtcgggcttggacgtgatccgcatccgcaagcccttccacaccgacaaccctagcatccagggccagtggcaccccttcaccaacaagccgaccacgttccgcgggctacgcccccgagaggttcaggatcctgccccagcccagtgcctgcttctgggggcagtgaccttgtgaaccactcatttttatgcaagtggcatccctaaaacctgagatgaggaagacttcaagggttttacagggcccttgttttttaaatccaaattgataataatgatctcaaaacacagtgagaggtctgaaggctggcttctgaagaatccctgatgtcttattggaacaaccactgagctacggagagctctgctgtgatgggctaggcactttatatctgtgtgaatacagatttataaaacaggttaataaacttatccaag

SEQ ID NO: 154489 - DNA, 866 bp, Homo sapiens
  Payload ID: 10365
  Gene Symbol: MRPL43
  Gene Name: mitochondrial ribosomal protein L43
  Uniprot ID: Q8N983
  ENST ID: ENST00000370236
  CDS Start-End: 41-520
ctcctcgctgcttaggctccgcggcctccaagctgtagctatgacggcgcgcgggactccgagccgcttcttggccagcgttctccacaacggactgggtcgctatgtgcagcagctgcagcgtctgagcttcagcgtcagccgcgacggcgcctcgtctcgcggcgccagggagttcgtggagcgggaggtgatcgacttcgcccgacggaatccaggggtcgtaatatatgtaaactcgcgtccgtgctgcgtgcccagagtagtggccgaataccttaacggggctgtgcgcgaggagagcatccactgcaagtcggtcgaggagatctcgacgctggtgcagaagctggccgaccagtcgggcttggacgtgatccgcatccgcaagcccttccacaccgacaaccctagcatccagggccagtggcaccccttcaccaacaagccgaccacgttccgcgggctacgcccccgagaggttcaggatcctgccccagcccaggtgcaagcacagtgaagagttgccccaccaactgcagccccaggctttggactgttactccgtgcctgcttctgggggcagtgaccttgtgaaccactcatttttatgcaagtggcatccctaaaacctgagatgaggaagacttcaagggttttacagggcccttgttttttaaatccaaattgataataatgatctcaaaacacagtgagaggtctgaaggctggcttctgaagaatccctgatgtcttattggaacaaccactgagctacggagagctctgctgtgatgggctaggcactttatatctgtgtgaatacagatttataaaacaggttaataaacttatccaaggtcaca

SEQ ID NO: 154490 - DNA, 824 bp, Homo sapiens
  Payload ID: 10365
  Gene Symbol: MRPL43
  Gene Name: mitochondrial ribosomal protein L43
  ENST ID: ENST00000370241
  CDS Start-End: 14-568
ccaagctgtagctatgacggcgcgcgggactccgagccgcttcttggccagcgttctccacaacggactgggtcgctatgtgcagcagctgcagcgtctgagcttcagcgtcagccgcgacggcgcctcgtctcgcggcgccagggagttcgtggagcgggaggtgatcgacttcgcccgacggaatccaggggtcgtaatatatgtaaactcgcgtccgtgctgcgtgcccagagtagtggccgaataccttaacggggctgtgcgcgaggagagcatccactgcaagtcggtcgaggagatctcgacgctggtgcagaagctggccgaccagtcgggcttggacgtgatccgcatccgcaagcccttccacaccgacaaccctagcatccagggccagtggcaccccttcaccaacaagccgaccacgttccgcgggctacgcccccgagaggttcaggatcctgccccagcccaggacactggcctgagactgtctgcagttgcaccgcagatcctcctgcccggctggcccgacccaacacgagccacacgggccacacggtgactgctgcggctctgagtgaagctgccagagccctcctcagtggcacgctccgtgaagaagtagtacaccttgtcatcatcacccactgcactggccttgctctcccgcacgaggacggagaacacaaactccgcatctgtgggtcaggcagtttgagaggcttttgagacaggctggggattcctttccctcactctgaggctgacccctcacttgacaacacacaggaatggaatggacaggctcacctggggat

SEQ ID NO: 154491 - DNA, 884 bp, Homo sapiens
  Payload ID: 10365
  Gene Symbol: MRPL43
  Gene Name: mitochondrial ribosomal protein L43
  Uniprot ID: Q8N983
  ENST ID: ENST00000370242
  CDS Start-End: 55-840
agtcccgcccccctctcctcgctgcttaggctccgcggcctccaagctgtagctatgacggcgcgcgggactccgagccgcttcttggccagcgttctccacaacggactgggtcgctatgtgcagcagctgcagcgtctgagcttcagcgtcagccgcgacggcgcctcgtctcgcggcgccagggagttcgtggagcgggaggtgatcgacttcgcccgacggaatccaggggtcgtaatatatgtaaactcgcgtccgtgctgcgtgcccagagtagtggccgaataccttaacggggctgtgcgcgaggagagcatccactgcaagtcggtcgaggagatctcgacgctggtgcagaagctggccgaccagtcgggcttggacgtgatccgcatccgcaagcccttccacaccgacaaccctagcatccagggccagtggcaccccttcaccaacaagccgaccacgttccgcgggctacgcccccgagaggttcaggatcctgccccagcccaggatgcggctgagttcctcggcgaaggagcagggccctgctggtactccattgttgctctgcctcagaagcacatagctattgccattcatcctccgcagccggctgggcagtgccaccaagccattggacactggcctgagactgtctgcagttgcaccgcagatcctcctgcccggctggcccgacccaccagacctccccacagtggatcctatctcatcctcattgacctctgctccagcccctatgctgtccgcagtttcttgcctcccgattgtccctgcactgaccactgtgtgctcagcgtgaaggctgcatagaagtgtgtacggcttgaggtttcagcatccaggctgcagacccc

SEQ ID NO: 154492 - DNA, 727 bp, Homo sapiens
  Payload ID: 10365
  Gene Symbol: MRPL43
  Gene Name: mitochondrial ribosomal protein L43
  ENST ID: ENST00000448244
  CDS Start-End: 1-509
gcgggactccgagccgcttcttggccagcgttctccacaacggactgggtcgctatgtgcagcagctgcagcgtctgagcttcagcgtcagccgcgacggcgcctcgtctcgcggcgccagggagttcgtggagcgggaggtgatcgacttcgcccgacggaatccaggggtcgtaatatatgtaaactcgcgtccgtgctgcgtgcccagagtagtggccgaataccttaacggggctgtgcgcgaggagagcatccactgcaagtcggtcgaggagatctcgacgctggtgcagaagctggccgaccagtcgggcttggacgtgatccgcatccgcaagcccttccacaccgacaaccctagcatccagggccagtggcaccccttcaccaacaagccgaccacgttccgcgggctacgcccccgagaggttcaggatcctgccccagcccaggatgcggctgagttcctcggcgaaggagcagggccctgctggacactggcctgagactgtctgcagttgcaccgcagatcctcctgcccggctggcccgacccaatatcagttcagtcatccgatcttccttggggaaatacccattaccgtcctgaacccttgtcatccactacttggctataagctccagaagtgacaagacacttcacatcttaaatatgtttcctagtttataattcatttgggcagtaaatgtttgttgagcactta

SEQ ID NO: 154493 - DNA, 844 bp, Homo sapiens
  Payload ID: 10365
  Gene Symbol: MRPL43
  Gene Name: mitochondrial ribosomal protein L43
  ENST ID: ENST00000523148
  CDS Start-End: 1-445
ggagttcgtggagcgggaggtgatcgacttcgcccgacggaatccaggggtcgtaatatatgtaaactcgcgtccgtgctgcgtgcccagagtagtggccgaataccttaacggggctgtgcgcgaggagagcatccactgcaagtcggtcgaggagatctcgacgctggtgcagaagctggccgaccagtcgggcttggacgtgatccgcatccgcaagcccttccacaccgacaaccctagcatccagggccagtggcaccccttcaccaacaagccgaccacgttccgcgggctacgcccccgagaggttcaggatcctgccccagcccaggacactggcctgagactgtctgcagttgcaccgcagatcctcctgcccggctggcccgacccactcgaggacaagctctccttcgatcccgccggacgccgggagacgtgacccagatcctggggaacactgttcgccacgcggccccctccccgcgctggtccccgactccgtggtggccggtttgcaccccgcgcagcccgaggcctggcccgcgcccctctagagccgtcatgcaggaccgggggacttggtggtgagaaaggcctggcccagcttggagggtagaatggacgtgggggaggccttgcccgacccccggcccgcagccccaggctcacgccagggcgccgcccgcactcctcgccttgctcacctttgcgctcggatccggggccatagagacagcgacgcgcggctccgcggccccacagcaccagctgcgagaggaaggggccgcggctggaggcggggcggggggggggtggtggaggcggagccgggggtggg

SEQ ID NO: 154494 - DNA, 903 bp, Homo sapiens
  Payload ID: 10365
  Gene Symbol: MRPL43
  Gene Name: mitochondrial ribosomal protein L43
  ENST ID: ENST00000477279
  CDS Start-End: 73-207
ccggaagcctcgaggtttagtcccgcccccctctcctcgctgcttaggctccgcggcctccaagctgtagctatgacggcgcgcgggactccgagccgcttcttggccagcgttctccacaacggactgggtcgctatgtgcagcagctgcagcgtctgagcttcagcgtcagccgcgacggcgcctcgtctcgcggcgccagttaacggggctgtgcgcgaggagagcatccactgcaagtcggtcgaggagatctcgacgctggtgcagaagctggccgaccagtcgggcttggacgtgatccgcatccgcaagcccttccacaccgacaaccctagcatccagggccagtggcaccccttcaccaacaagccgaccacgttccgcgggctacgcccccgagaggttcaggatcctgccccagcccaggtgcaagcacagtgaagagttgccccaccaactgcagccccaggctttggactgttactccggtaaaggtggttcttcccctttgggattccaagcccaggcaaatggaacccatcaatgggcaagttgacagaggttctgcttgggataatgaagagctgcctgtttctttccagtgcctgcttctgggggcagtgaccttgtgaaccactcatttttatgcaagtggcatccctaaaacctgagatgaggaagacttcaagggttttacagggcccttgttttttaaatccaaattgataataatgatctcaaaacacagtgagaggtctgaaggctggcttctgaagaatccctgatgtcttattggaacaaccactgagctacggagagctctgctgtgatgggctaggcactttatatctgtgtgaatacagatttataaaacaggttaataaacttatccaaggtca

SEQ ID NO: 154495 - DNA, 1748 bp, Homo sapiens
  Payload ID: 10366
  Gene Symbol: MRPL44
  Gene Name: mitochondrial ribosomal protein L44
  Uniprot ID: Q9H9J2
  ENST ID: ENST00000258383
  CDS Start-End: 70-1068
ggggaagtgtgttacggggacactggcccgactactttcgttccgtcttccatcgttttctctcgtgcaatggcgtccgggctggtaagattgctgcagcagggacatcgctgcctcctggctccagtcgcccccaagctggtccctccggttcggggagtgaagaagggattccgcgccgccttccgcttccagaaggagttagagcggcagcgccttctgcggtgcccgccgccgcccgtgcgccgttcagagaagccgaactgggattaccatgcagaaatacaagcttttggacatcggttacaggaaaacttttccttagatcttctcaaaactgcatttgttaatagctgctatattaaaagtgaggaggccaaacgccaacaacttgggatagagaaagaagctgttcttctgaatcttaaaagtaatcaagaactatccgaacaagggacatctttttcacagacttgccttacacagtttcttgaagacgagtacccagacatgcccactgaaggcataaaaaatcttgttgactttctcactggtgaggaagtcgtgtgtcacgtggctagaaacttggctgtggagcagttaacactgagtgaagaattcccagtgcccccagctgtgttacagcagactttctttgcagttattggagccctgttacagagcagtggacctgagaggactgcacttttcatcagggacttcttaattactcaaatgactggaaaagagctctttgagatgtggaagataataaatcccatggggctattggtagaagaactgaagaaaaggaatgtttcagctcctgaatcaagacttactaggcagtctggtggcaccacagctttgcctttgtattttgttggcttatactgtgataaaaagttgattgcagaaggacctggggaaacagtattggttgcagaagaagaggctgctcgagtggcccttagaaaactttatggattcacagaaaatagacggccgtggaactattccaagcccaaagaaaccttgagagcagaaaagagcatcactgccagctagccgccatggatgcagcagcctgaaacttgagagcgaaagtgagataaatgtcaaaggtgtttcaagccagacattttcacaattgtgaagaaatagatgttttgtttctgttttttactgtgttcccaaaattaaataagtgttaaccaagtcacagtgtttttggttttgtttttctgaaatcttggtttgatcaaatctttttttttttctcttgagatggagtcttactctgtcgcccaggctggactgcagtggtgcgatctcggctcactgcaacctccacctcacaggttcaagcgattctcgtggctcagcctccctagtagctgggattacaggcacacaccaccatacctggctaatttttgtatttttggtagacatggggtttcaccaagttggctaggctagtcttgaactcctgacctcaggtgatccacccgccttggcctcccaaagtgctgggattacaggtgtgagccactatacccgaccagatcaaatctttttttgacatttttgcaaaaaaattttcctaatgttcttgatttaattgtatagaatttgtataattaggtgtattttatttgcgtctagctttgaggtatcataatttatgtatcttatgtgaattttttgctgtaataccaataaagttttttttctccacatgttaa

SEQ ID NO: 154496 - DNA, 1554 bp, Homo sapiens
  Payload ID: 10367
  Gene Symbol: MRPL45
  Gene Name: mitochondrial ribosomal protein L45
  ENST ID: ENST00000619548
  CDS Start-End: 162-932
cactcccgcgagcacgtgcgcgtcctcgctgctcacatttcggcggagggcgcgctccctggaaaattccactcctgtgctagctccaccctatgcggcttttctcctacccgacgctcttcactctcagctcccttcccggcggcctttgcgggaacaagatggcagcccccatacctcaagggttctcttgtttatcgaggtttttgggctggtggtctcggcagccagttctggtgactcagtccgcagctatagttccagtaagaactaaaaaacgtttcacacctcctatttatcaacctaaatttaaaacagaaaaggagtttatgcaacatgcccggaaagcaggattggttattcctccagaaaaatcggaccgttccatacatctggcctgtacagctggtatatttgatgcctatgttcctcctgagggtgatgcacgcatatcatctctttcaaaggagggactgatagagagaactgaacgaatgaagaagactatggcatcacaagtgtcaatccggaggataaaagactatgatgccaactttaaaataaaggacttccctgaaaaagctaaggatatctttattgaagctcacctttgtctaaataactcagaccatgaccggcttcataccttggtaactgaacactgttttccaactctggccatctatgaccggtttggccggttgatgtatggacaggaagatgtacccaaggatgtcctggagtatgttgtattcgaaaagcagttgacaaacccctatggaagctggagaatgcataccaagatcgttcccccatgggcaccccctaagcagcccatccttaagacggtgatgatccctggccctcagctgaaaccagaagaagaatatgaagaggcacaaggagaggcccagaagcctcagctagcctgatgacaaaaatgacttctagggtgaagcctgggtgatgaggctgctggaagctttgaagtctcccattcccctcatgctataaaaagaactacctttgttctctcccatcctgctcaggtcttttcagcagtctcatcatcagcaaccatgactgatgactgggccctagcaggtggcaggtataacatggccatggacactcttcttttttaaattttatgtctagcttctgagtctagatgaaagacagtatgtttcagagaacattggatatcagtttttcccacagcagggactgtgagagacaaccagcagcatcctctttgtaatcacagggcagggatcagagtttgaaatgaaatgttgtcagggtgttggaaaaattttggtgagttctgcacatttcccctggttcaggctgggcatggaccagccttcagatggcagaagtggaagatgagcctacttgtgagcgatgtgactttaaggaaatgaagactggggaagaataattagtgtttataagacatttaagaggccctttttcatatactgactcactgatgaatcagcatttgcattttatggaaaaatataaatccaaagaaataatttatccctt

SEQ ID NO: 154497 - DNA, 1554 bp, Homo sapiens
  Payload ID: 10367
  Gene Symbol: MRPL45
  Gene Name: mitochondrial ribosomal protein L45
  ENST ID: ENST00000613510
  CDS Start-End: 162-932
cactcccgcgagcacgtgcgcgtcctcgctgctcacatttcggcggagggcgcgctccctggaaaattccactcctgtgctagctccaccctatgcggcttttctcctacccgacgctcttcactctcagctcccttcccggcggcctttgcgggaacaagatggcagcccccatacctcaagggttctcttgtttatcgaggtttttgggctggtggtttcggcagccagttctggtgactcagtccgcagctatagttccagtaagaactaaaaaacgtttcacacctcctatttatcaacctaaatttaaaacagaaaaggagtttatgcaacatgcccggaaagcaggattggttattcctccagaaaaatcggaccgttccatacatctggcctgtacagctggtatatttgatgcctatgttcctcctgagggtgatgcacgcatatcatctctttcaaaggagggactgatagagagaactgaacgaatgaagaagactatggcatcacaagtgtcaatccggaggataaaagactatgatgccaactttaaaataaaggacttccctgaaaaagctaaggatatctttattgaagctcacctttgtctaaataactcagaccatgaccgacttcataccttggtaactgaacactgttttccaactctggccatctatgaccggtttggccggttgatgtatggacaggaagatgtacccaaggatgtcctggagtatgttgtattcgaaaagcagttgacaaacccctatggaagctggagaatgcataccaagatcgttcccccatgggcaccccctaagcagcccatccttaagacggtgatgatccctggccctcagctgaaaccagaagaagaatatgaagaggcacaaggagaggcccagaagcctcagctagcctgatgacaaaaatgacttctagggtgaagcctgggtgatgaggctgctggaagctttgaagtctcccattcccctcatgctataaaaagaactacctttgttctctcccatcctgctcaggtcttttcagcagtctcatcatcagcaaccatgactgatgactgggccctagcaggtggcaggtataacatggccatggacactcttcttttttaaattttatgtctagcttctgagtctagatgaaagacagtatgtttcagagaacattggatatcagtttttcccacagcagggactgtgagagacaaccagcagcatcctctttgtaatcacagggcagggatcagagtttgaaatgaaatgttgtcagggtgttggaaaaattttggtgagttctgcacatttcccctggttcaggctgggcatggaccagccttcagatggcagaagtggaagatgagcctacttgtgagcgatgtgactttaaggaaatgaagactggggaagaataattagtgtttataagacatttaagaggccctttttcatatactgactcactgatgaatcagcatttgcattttatggaaaaatataaatccaaagaaataatttatccctt

SEQ ID NO: 154498 - DNA, 1705 bp, Homo sapiens
  Payload ID: 10367
  Gene Symbol: MRPL45
  Gene Name: mitochondrial ribosomal protein L45
  Uniprot ID: Q9BRJ2
  ENST ID: ENST00000621878
  CDS Start-End: 162-1082
cactcccgcgagcacgtgcgcgtcctcgctgctcacatttcggcggagggcgcgctccctggaaaattccactcctgtgctagctccaccctatgcggcttttctcctacccgacgctcttcactctcagctcccttcccggcggcctttgcgggaacaagatggcagcccccatacctcaagggttctcttgtttatcgaggtttttgggctggtggtttcggcagccagttctggtgactcagtccgcagctatagttccagtaagaactaaaaaacgtttcacacctcctatttatcaacctaaatttaaaacagaaaaggagtttatgcaacatgcccggaaagcaggattggttattcctccagaaaaatcggaccgttccatacatctggcctgtacagctggtatatttgatgcctatgttcctcctgagggtgatgcacgcatatcatctctttcaaaggagggactgatagagagaactgaacgaatgaagaagactatggcatcacaagtgtcaatccggaggataaaagactatgatgccaactttaaaataaaggacttccctgaaaaagctaaggatatctttattgaagctcacctttgtctaaataactcagaccatgaccgacttcataccttggtaactgaacactgttttccagacatgacttgggacatcaaatataagaccgtccgctggagctttgtggaatctttagagccctctcatgttgttcaagttcgctgttcaagtatgatgaaccagggcaacgtgtacggccagatcaccgtacgcatgcacacccggcagactctggccatctatgaccggtttggccggttgatgtatggacaggaagatgtacccaaggatgtcctggagtatgttgtattcgaaaagcagttgacaaacccctatggaagctggagaatgcataccaagatcgttcccccatgggcaccccctaagcagcccatccttaagacggtgatgatccctggccctcagctgaaaccagaagaagaatatgaagaggcacaaggagaggcccagaagcctcagctagcctgatgacaaaaatgacttctagggtgaagcctgggtgatgaggctgctggaagctttgaagtctcccattcccctcatgctataaaaagaactacctttgttctctcccatcctgctcaggtcttttcagcagtctcatcatcagcaaccatgactgatgactgggccctagcaggtggcaggtataacatggccatggacactcttcttttttaaattttatgtctagcttctgagtctagatgaaagacagtatgtttcagagaacattggatatcagtttttcccacagcagggactgtgagagacaaccagcagcatcctctttgtaatcacagggcagggatcagagtttgaaatgaaatgttgtcagggtgttggaaaaattttggtgagttctgcacatttcccctggttcaggctgggcatggaccagccttcagatggcagaagtggaagatgagcctacttgtgagcgatgtgactttaaggaaatgaagactggggaagaataattagtgtttataagacatttaagaggccctttttcatatactgactcactgatgaatcagcatttgcattttatggaaaaatataaatccaaagaaataatttatccctta

SEQ ID NO: 154499 - DNA, 1705 bp, Homo sapiens
  Payload ID: 10367
  Gene Symbol: MRPL45
  Gene Name: mitochondrial ribosomal protein L45
  ENST ID: ENST00000613675
  CDS Start-End: 162-1082
cactcccgcgagcacgtgcgcgtcctcgctgctcacatttcggcggagggcgcgctccctggaaaattccactcctgtgctagctccaccctatgcggcttttctcctacccgacgctcttcactctcagctcccttcccggcggcctttgcgggaacaagatggcagcccccatacctcaagggttctcttgtttatcgaggtttttgggctggtggtctcggcagccagttctggtgactcagtccgcagctatagttccagtaagaactaaaaaacgtttcacacctcctatttatcaacctaaatttaaaacagaaaaggagtttatgcaacatgcccggaaagcaggattggttattcctccagaaaaatcggaccgttccatacatctggcctgtacagctggtatatttgatgcctatgttcctcctgagggtgatgcacgcatatcatctctttcaaaggagggactgatagagagaactgaacgaatgaagaagactatggcatcacaagtgtcaatccggaggataaaagactatgatgccaactttaaaataaaggacttccctgaaaaagctaaggatatctttattgaagctcacctttgtctaaataactcagaccatgaccggcttcataccttggtaactgaacactgttttccagacatgacttgggacatcaaatataagaccgtccgctggagctttgtggaatctttagagccctctcatgttgttcaagttcgctgttcaagtatgatgaaccagggcaacgtgtacggccagatcaccgtacgcatgcacacccggcagactctggccatctatgaccggtttggccggttgatgtatggacaggaagatgtacccaaggatgtcctggagtatgttgtattcgaaaagcagttgacaaacccctatggaagctggagaatgcataccaagatcgttcccccatgggcaccccctaagcagcccatccttaagacggtgatgatccctggccctcagctgaaaccagaagaagaatatgaagaggcacaaggagaggcccagaagcctcagctagcctgatgacaaaaatgacttctagggtgaagcctgggtgatgaggctgctggaagctttgaagtctcccattcccctcatgctataaaaagaactacctttgttctctcccatcctgctcaggtcttttcagcagtctcatcatcagcaaccatgactgatgactgggccctagcaggtggcaggtataacatggccatggacactcttcttttttaaattttatgtctagcttctgagtctagatgaaagacagtatgtttcagagaacattggatatcagtttttcccacagcagggactgtgagagacaaccagcagcatcctctttgtaatcacagggcagggatcagagtttgaaatgaaatgttgtcagggtgttggaaaaattttggtgagttctgcacatttcccctggttcaggctgggcatggaccagccttcagatggcagaagtggaagatgagcctacttgtgagcgatgtgactttaaggaaatgaagactggggaagaataattagtgtttataagacatttaagaggccctttttcatatactgactcactgatgaatcagcatttgcattttatggaaaaatataaatccaaagaaataatttatccctta

SEQ ID NO: 154500 - DNA, 1019 bp, Homo sapiens
  Payload ID: 10368
  Gene Symbol: MRPL46
  Gene Name: mitochondrial ribosomal protein L46
  Uniprot ID: Q9H2W6
  ENST ID: ENST00000312475
  CDS Start-End: 43-882
agggatccctgggagccgcggtgcattgtgggagaacgaaagatggcggcgcccgtaaggcggacgctgttaggggtggcggggggttggcggcggttcgagaggctctgggccggcagtctaagctctcgcagcctggctcttgcagccgcaccctcaagcaacggatccccatggcgcttgttgggcgcgttgtgcctgcagcggccacctgtagtctccaagccgttgaccccattgcaggaagagatggcgtctctactgcagcagattgagatagagagaagcctgtattcagaccacgagcttcgtgctctggatgaaaaccagcgactggcaaagaagaaagctgaccttcatgatgaagaagatgaacaggatatattgctggcgcaagatttggaagatatgtgggagcagaaatttctacagttcaaacttggagctcgcataacagaagctgatgaaaagaatgaccgaacatccctgaacaggaagctagacaggaaccttgtcctgttagtcagagagaagtttggagaccaggatgtttggatactgccccaggcagagtggcagcctggggagacccttcgaggaacagctgaacgaaccctggccacactctcagaaaacaacatggaagccaagttcctaggaaatgcaccctgtgggcactacacattcaagttcccccaggcaatgcggacagagagtaacctcggagccaaggtgttcttcttcaaagcactgctattaactggagacttttcccaggctgggaataagggccatcatgtgtgggtcactaaggatgagctgggtgactatttgaaaccaaaatacctggcccaagttaggaggtttgtttcagacctctgatgggccgagctgcctgtggacggtgctcagacaagtctgggattagagcctcaaggacattgtgtgattgcctcacatttgcaggtaatatcaagcagcaaactaaattctgagaaataaacgagtctattactgtg

SEQ ID NO: 154501 - DNA, 670 bp, Homo sapiens
  Payload ID: 10368
  Gene Symbol: MRPL46
  Gene Name: mitochondrial ribosomal protein L46
  ENST ID: ENST00000560703
  CDS Start-End: 13-273
ggagaacgaaagatggcggcgcccgtaaggcggacgctgttaggggtggcggggggttggcggcggttcgagaggctctgggccggcagtctaagctctcgcagcctggctcttgcagccgcaccctcaagcaacggatccccatggcgcttgttgggcgcgttgtgcctgcagcggccacctgtagtctccaagccgttgaccccattgcaggaagagatggcgtctctactgcagcagaagctgatgaaaagaatgaccgaacatccctgaacaggaagctagacaggaaccttgtcctgttagtcagagagaagtttggagaccaggatgtttggatactgccccaggcagagtggcagcctggggagacccttcgaggaacagctgaacgaaccctggccacactctcagaaaacaacatggaagccaagttcctaggaaatgcaccctgtgggcactacacattcaagttcccccaggcaatgcggacagagagtaacctcggagccaaggtgttcttcttcaaagcactgctattaactggagacttttcccaggctgggaataagggccatcatgtgtgggtcactaaggatgagctgggtgactatttgaaaccaaaatacctggcccaagttaggaggtttgtttcagacctctgatgggc

SEQ ID NO: 154502 - DNA, 727 bp, Homo sapiens
  Payload ID: 10368
  Gene Symbol: MRPL46
  Gene Name: mitochondrial ribosomal protein L46
  ENST ID: ENST00000559538
  CDS Start-End: 1-137
tagtcagagagaagtttggagaccaggatgtttggatactgccccaggcagagtggcagcctggggagacccttcgaggaacagctgaacgaaccctggccacactctcaggtgacacccattttaaaggtggatgaactttgttttacagaccaaatgtcctcgtccttcaccagcagatagcgactgggctgattcaccaacagttagcgactgggctgattcgccaacagatagcgactgggctgattcgccagcagatagcgactgggctgattcgccagcatagcgactgggctgattcgccagcagatagcgactgggctgaatgtaggaactagaaaacaacatggaagccaagttcctaggaaatgcaccctgtgggcactacacattcaagttcccccaggcaatgcggacagagagtaacctcggagccaaggtgttcttcttcaaagcactgctattaactggagacttttcccaggctgggaataagggccatcatgtgtgggtcactaaggatgagctgggtgactatttgaaaccaaaatacctggcccaagttaggaggtttgtttcagacctctgatgggccgagctgcctgtggacggtgctcagacaagtctgggattagagcctcaaggacattgtgtgattgcctcacatttgcaggtaatatcaagcagcaaactaaattctgagaaataaacgagtctattactg

SEQ ID NO: 154503 - DNA, 1002 bp, Homo sapiens
  Payload ID: 10368
  Gene Symbol: MRPL46
  Gene Name: mitochondrial ribosomal protein L46
  ENST ID: ENST00000558531
  CDS Start-End: 14-523
gggagaacgaaagatggcggcgcccgtaaggcggacgctgttaggggtggcggggggttggcggcggttcgagaggctctgggccggcagtctaagctctcgcagcctggctcttgcagccgcaccctcaagcaacggatccccatggcgcttgttgggcgcgttgtgcctgcagcggccacctgtagtctccaagccgttgaccccattgcaggaagagatggcgtctctactgcagcagattgagatagagagaagcctgtattcagaccacgagcttcgtgctctggatgaaaaccagcgactggcaaagaagaaagctgaccttcatgatgaagaagatgaacaggatatattgctggcgcaagatttggaagatatgtgggagcagaaatttctacagttcaaacttggagctcgcataacaggttgtgatccttttaggccagccagaaggaagggaaaaggggtatttggattcccaaataaaagacagttgcttggcccctgctttgtgttttaagtaacaaataatttcatattcttttctttgttgctcacatctaccataatacgacttaaaaagtctgtcttattttcgggtgagaggtaagggtattggaatagccttttctctcagttaaactttgtgaatgttatctgtgtttaactccaagtttgagactgagagtggggcaaatgaagcctttttccactaattcctgtgttttatgtgaaatccctcttaaagcgggagattgagttctgttttccttgtttcacagatgaagactgaagaacagagaaagtaggggctagttaagtcagtaatagtatcaaaaccaatgaagtagttgtgtttgaattagtatgatcattgtttcttttttgaagactcaaaatatggtttgctgttcaaagaagcttacctcttgatttcttaccttttagtttcctcaagattgtgagactcttccctggaagaggtcagagttagagaga

SEQ ID NO: 154504 - DNA, 1126 bp, Homo sapiens
  Payload ID: 10369
  Gene Symbol: MRPL47
  Gene Name: mitochondrial ribosomal protein L47
  Uniprot ID: Q9HD33
  ENST ID: ENST00000259038
  CDS Start-End: 17-709
ccagttatgcgaaaacatggctgcggccggtttggcccttctttgtaggagagtttcatccgccctgaaatcttcccgatcgttaataactcctcaggtccctgcctgcacaggattacttcataccacattgtcaaggaaaggactagaagaattttttgatgacccaaaaaactgggggcaagaaaaagtaaaatctggagcagcatggacctgtcagcaactaaggaacaaaagtaatgaagatttacacaaactttggtatgtcttactgaaagaaagaaacatgcttctaaccctagagcaggaggccaagcggcagagattgccaatgccaagtccagagcggttagataaggtagtagattccatggatgcattagataaagttgtccaggaaagagaagatgccctaaggcttcttcagactggtcaagaaagagctagacctggtgcttggagaagagacatctttggaagaatcatctggcacaagttcaagcagtgggttataccttggcacctaaataaaagatacaataggaaacgattctttgccttgccttatgtggaccattttctcagactggaacgtgagaaacgagcccgcatcaaagcacggaaggaaaatttagagagaaagaaagcaaaaattcttttaaaaaagtttccacatcttgctgaagcccaaaagtcaagtcttgtctaagatgtctgaactattaaatttaccattttgtttttcttgaatagtctgtgtacaggagtaaatatgttaagtggtttataaagaaattctgtttttagtcaagtgactttactaatcagttgttctaagtgtgaatatggcatgctaattagctaatttggtagaagctaatttgcttctaaaaatcaggtataaagttcagatgagattcccactttataaattctgacatttaagcaggctttaaatgtcacctgctaccttagagtgtgaaggtgatggtaactgccacagcaaaggcaataccgtagtttttgaatttgaataatagttttacctctgttgttaataggctatgaagaggatgtgggtattgctgttaataaacggaggactttgattcaaaataatgagaaa

SEQ ID NO: 154505 - DNA, 673 bp, Homo sapiens
  Payload ID: 10369
  Gene Symbol: MRPL47
  Gene Name: mitochondrial ribosomal protein L47
  Uniprot ID: Q9HD33
  ENST ID: ENST00000392659
  CDS Start-End: 210-632
cgcgttttgccagttatgcgaaaacatggctgcggccggtttggcccttctttgtaggagagtttcatccgccctgaaatcttcccgatcgttaataactcctcaggtccctgcctgcacagggagcagcatggacctgtcagcaactaaggaacaaaagtaatgaagatttacacaaactttggtatgtcttactgaaagaaagaaacatgcttctaaccctagagcaggaggccaagcggcagagattgccaatgccaagtccagagcggttagataaggtagtagattccatggatgcattagataaagttgtccaggaaagagaagatgccctaaggcttcttcagactggtcaagaaagagctagacctggtgcttggagaagagacatctttggaagaatcatctggcacaagttcaagcagtgggttataccttggcacctaaataaaagatacaataggaaacgattctttgccttgccttatgtggaccattttctcagactggaacgtgagaaacgagcccgcatcaaagcacggaaggaaaatttagagagaaagaaagcaaaaattcttttaaaaaagtttccacatcttgctgaagcccaaaagtcaagtcttgtctaagatgtctgaactattaaatttaccattttgtttttcttgaa

SEQ ID NO: 154506 - DNA, 1370 bp, Homo sapiens
  Payload ID: 10369
  Gene Symbol: MRPL47
  Gene Name: mitochondrial ribosomal protein L47
  Uniprot ID: Q9HD33
  ENST ID: ENST00000476781
  CDS Start-End: 31-783
ggaaacgcgttttgccagttatgcgaaaacatggctgcggccggtttggcccttctttgtaggagagtttcatccgccctgaaatcttcccgatcgttaataactcctcaggtccctgcctgcacagggttttttcttagtttgttgcctaagagtacaccaaatgtgacatcctttcaccaatatagattacttcataccacattgtcaaggaaaggactagaagaattttttgatgacccaaaaaactgggggcaagaaaaagtaaaatctggagcagcatggacctgtcagcaactaaggaacaaaagtaatgaagatttacacaaactttggtatgtcttactgaaagaaagaaacatgcttctaaccctagagcaggaggccaagcggcagagattgccaatgccaagtccagagcggttagataaggtagtagattccatggatgcattagataaagttgtccaggaaagagaagatgccctaaggcttcttcagactggtcaagaaagagctagacctggtgcttggagaagagacatctttggaagaatcatctggcacaagttcaagcagtgggttataccttggcacctaaataaaagatacaataggaaacgattctttgccttgccttatgtggaccattttctcagactggaacgtgagaaacgagcccgcatcaaagcacggaaggaaaatttagagagaaagaaagcaaaaattcttttaaaaaagtttccacatcttgctgaagcccaaaagtcaagtcttgtctaagatgtctgaactattaaatttaccattttgtttttcttgaatagtctgtgtacaggagtaaatatgttaagtggtttataaagaaattctgtttttagtcaagtgactttactaatcagttgttctaagtgtgaatatggcatgctaattagctaatttggtagaagctaatttgcttctaaaaatcaggtataaagttcagatgagattcccactttataaattctgacatttaagcaggctttaaatgtcacctgctaccttagagtgtgaaggtgatggtaactgccacagcaaaggcaataccgtagtttttgaatttgaataatagttttacctctgttgttaataggctatgaagaggatgtgggtattgctgttaataaacggaggactttgattcaaaataatgagaaatacatttagtccttaaagtagtaatcacagtgcacaacagtccaaaatatatttctggaatggctaatttttatttaattctgtaagcctaaggtaaaaagcataggcagtaacttttactagtcaataaaaagcagttctaccaatccactggtaattaatacactaaa

SEQ ID NO: 154507 - DNA, 1536 bp, Homo sapiens
  Payload ID: 10370
  Gene Symbol: MRPL48
  Gene Name: mitochondrial ribosomal protein L48
  Uniprot ID: Q96GC5
  ENST ID: ENST00000310614
  CDS Start-End: 657-1295
aggccgaggcgggcggatcacctgaggtcgggagttcaagaccagcctgacaaacatggagaaacctcatctctagtaaaaatataaaaattaggcgggcgtggtggcgggcacctgtaatcccagctacttggagacagaattgcttgaacccgagaggcggaggtggcagtgagctgagatcgtgccactacactccagcctgcgcaacagagcgagactccgtctcaaacaaacaaaaaagtcagatctgtgctagacgctgaaaggaattaatcagacaggatctcagtcttttaagaactttcaaatacagagaagaggtggtaacaaatcattagtgtataatattgtaagcgaaaaattagaattgtgtgctaagtactggggtaacacagagatggtaattaattctttctggagaaacagcagtgaatgtgacaacctgagtgagggtggaaagcaggagaatttctagactctgaatttcagaagcttccggaactaaaatgatgtggaagttgagtgagtctcggtgggatattgctgctgcacctggtcaaggccgttccttcagtgttttcagacgccctgggaacgcggctgcagggtccggtcttcggtttgcacagctagaggccgcgcagcagcaaaggatgagcggaaccttggaaaaggtgctgtgcctgaggaacaataccatttttaagcaagccttttctctcttaaggtttagaacttcaggagagaagcccatctattctgtaggtggaattctactaagtatcagtcggccctacaagacaaagcccacccacggcattggaaagtacaagcacttaattaaagcagaagagcccaagaagaagaagggaaaagtggaagtgagagccattaatttggggacagattatgaatatggggttttaaatattcatctgactgcatatgatatgaccctggcagagagttatgcccagtatgttcacaacctctgcaactctctctccattaaagtcgaggaaagttatgcaatgccaaccaaaaccatagaagtgttgcagttgcaggaccaaggcagcaaaatgctcctggactcagtgcttaccacccatgagcgagtggttcagatcagcggtttgagtgctacgtttgcagaaattttcttggaaataatccaaagcagtcttcctgaaggagtcagactgtcagtgaaggagcacactgaagaagacttcaagggacgattcaaagctcgaccagaactggaagaactgttggccaagttgaagtagctactgtagaccctttcatgccagcagtggtcatattgagtgccaaagagaagagcttactgggtagttagagttcatcaggagacccaacccttagatttcataagtacccattcccatagccagtaatgtcctcactcctctgtggcttggctgtacttgccatttcttaccacttacctatgaggtaatgcttgttatcttccatctaataaaaatctgctgcagatgtgtatatgta

SEQ ID NO: 154508 - DNA, 1922 bp, Homo sapiens
  Payload ID: 10370
  Gene Symbol: MRPL48
  Gene Name: mitochondrial ribosomal protein L48
  ENST ID: ENST00000314282
  CDS Start-End: 1352-1693
gctaatttttatgttttttgcagagctgggattttgccatgttatccaggctggtcctgaactcctaggctcaagcagtctgcctgcctcagcctcccaaagtgcaggaattataggcgtgagccactgtgcctagctgatactatttttgtacatgcttccagagatattttttaaatatgcaagcaaataagcatgtatgtaattacacacatgcacacacacacatatctattctcttccagctcccccattttatatgtgtggcaacattttgaacacattattctacagtttgcttttatcatttgttttatcttaaagacctttccagtatctgtacataaagaagtggttatttatttatttatttatttagagatggagtctcgttctgtcgctcaggttcgagtgcagtggcgggatctcagctcattgcaacctccgcctcccgggttcaagcaattctcctgcctcagcctcccaagcagctgggactacaggcgcacaccaccgtgcccagctaattttcatatttttagtagagacggggtttcaccatattggctaggctggtctcgaactcctgacctcatcatccacctgcctcggcctcccaaagtgctgggattacagacgtgagccaccgcgcccggccccttatttctttttacagctgcataatttacttaataagtctccctccttttctgttttgaaacaggatctcactctgttgcccaagctagagtgcagttgcgtgaccacggctcactgcagcctcaacccctcagactcaagccatcatctcacctgagcctcctgagtagctgggattacaggcacttgccacaatgcccagctaattaagaaaattttttttgtagagtcgggatctagctatgttgtcagggctgctcttgaaccctttggctcaagttatcctcctatcttggcctcaaagttctgggattacaggtgtcagccactgtacccagctataagtccctctctttatgggcatttaggttagattattttcggttgaggtgctttcttctttctgaagtatgttgtgttaaatattttttcccaggctttgttttaactttttttttttttttttcccttgagatggagtctcgccctgtcacccaggctggagtgcaatggcgtgatctcggcgcacttcaacctcgcctcccaggttcaagtgattctcctgcctcagtctcctgagtagctgggattacagcccaagaagaagaagggaaaagtggaagtgagagccattaatttggggacagattatgaatatggggttttaaatattcatctgactgcatatgatatgaccctggcagagagttatgcccagtatgttcacaacctctgcaactctctctccattaaagtcgaggaaagttatgcaatgccaaccaaaaccatagaagtgttgcagttgcaggaccaaggcagcaaaatgctcctggactcagtgcttaccacccatgagcgagtggttcagatcagcggtttgagtgctacgtttgcagaaattttcttggaaataatccaaagcagtcttcctgaaggagtcagactgtcagtgaaggagcacactgaagaagacttcaagggacgattcaaagctcgaccagaactggaagaactgttggccaagttgaagtagctactgtagaccctttcatgccagcagtggtcatattgagtgccaaagagaagagcttactgggtagttagagttcatcaggagacccaacccttagatttcataagtacccattcccatagccagtaatgtcctcactcctctgtggcttggctgtacttgccatttcttaccacttacctatgaggtaatgcttgttatcttccatctaataaaaatctgctgcaga

SEQ ID NO: 154509 - DNA, 1058 bp, Homo sapiens
  Payload ID: 10370
  Gene Symbol: MRPL48
  Gene Name: mitochondrial ribosomal protein L48
  ENST ID: ENST00000398483
  CDS Start-End: 482-823
cctgggaacgcggctgcagggtccggtcttcggtttgcacagctagaggccgcgcagcagcaaaggatgagcggaaccttggaaaaggctggtctggaactcctggaaaagagcccatggaaatctgtcattaaggccagcatctgacatgggtatataaggcctctcgacgtctgatgccactgttctcttcccgactccttagttgctttagtcagctaacctcgtcattatttgccaaatgtgctgtgcctgaggaacaataccatttttaagcaagccttttctctcttaaggtggaattctactaagtatcagtcggccctacaagacaaagcccacccacggcattggaaagtacaagcacttaattaaagcagaagagcccaagaagaagaagggaaaagtggaagtgagagccattaatttggggacagattatgaatatggggttttaaatattcatctgactgcatatgatatgaccctggcagagagttatgcccagtatgttcacaacctctgcaactctctctccattaaagtcgaggaaagttatgcaatgccaaccaaaaccatagaagtgttgcagttgcaggaccaaggcagcaaaatgctcctggactcagtgcttaccacccatgagcgagtggttcagatcagcggtttgagtgctacgtttgcagaaattttcttggaaataatccaaagcagtcttcctgaaggagtcagactgtcagtgaaggagcacactgaagaagacttcaagggacgattcaaagctcgaccagaactggaagaactgttggccaagttgaagtagctactgtagaccctttcatgccagcagtggtcatattgagtgccaaagagaagagcttactgggtagttagagttcatcaggagacccaacccttagatttcataagtacccattcccatagccagtaatgtcctcactcctctgtggcttggctgtacttgccatttcttaccacttacctatgaggtaatgcttgttatcttccatctaataaaaatctgctgcagatgtgta

SEQ ID NO: 154510 - DNA, 1197 bp, Homo sapiens
  Payload ID: 10370
  Gene Symbol: MRPL48
  Gene Name: mitochondrial ribosomal protein L48
  ENST ID: ENST00000411840
  CDS Start-End: 628-969
ttttcagacgccctgggaacgcggctgcagggtccggtcttcggtttgcacagctagaggccgcgcagcagcaaaggatgagcggaaccttggaaaaggctggtctggaactcctggaaaagagcccatggaaatctgtcattaaggccagcatctgacatgggtatataaggcctctcgacgtctgatgccactgttctcttcccgactccttagttgctttagtcagctaacctcgtcattatttgccaaatgaagagggttcatgactgagcagatcctcagcaacgtctgtaactctgcaaaagctaaggatttctcttagccatctccccctggatttcctgccaggtgctgtgcctgaggaacaataccatttttaagcaagccttttctctcttaaggtttagaacttcaggagagaagcccatctattctgtaggtggaattctactaagtatcagtcggccctacaagacaaagcccacccacggcattggaaagtacaagcacttaattaaagcagaagagcccaagaagaagaagggaaaagtggaagtgagagccattaatttggggacagattatgaatatggggttttaaatattcatctgactgcatatgatatgaccctggcagagagttatgcccagtatgttcacaacctctgcaactctctctccattaaagtcgaggaaagttatgcaatgccaaccaaaaccatagaagtgttgcagttgcaggaccaaggcagcaaaatgctcctggactcagtgcttaccacccatgagcgagtggttcagatcagcggtttgagtgctacgtttgcagaaattttcttggaaataatccaaagcagtcttcctgaaggagtcagactgtcagtgaaggagcacactgaagaagacttcaagggacgattcaaagctcgaccagaactggaagaactgttggccaagttgaagtagctactgtagaccctttcatgccagcagtggtcatattgagtgccaaagagaagagcttactgggtagttagagttcatcaggagacccaacccttagatttcataagtacccattcccatagccagtaatgtcctcactcctctgtggcttggctgtacttgccatttcttaccacttacctatgaggtaatgcttgttatcttccatctaataaaaatctgctgcag

SEQ ID NO: 154511 - DNA, 598 bp, Homo sapiens
  Payload ID: 10370
  Gene Symbol: MRPL48
  Gene Name: mitochondrial ribosomal protein L48
  ENST ID: ENST00000535277
  CDS Start-End: 520-598
cctgggaacgcggctgcagggtccggtcttcggtttgcacagctagaggccgcgcagcagcaaaggatgagcggaaccttggaaaaggctggtctggaactcctggaaaagagcccatggaaatctgtcattaaggccagcatctgacatgggtatataaggcctctcgacgtctgatgccactgttctcttcccgactccttagttgctttagtcagctaacctcgtcattatttgccaaatgtgctgtgcctgaggaacaataccatttttaagcaagccttttctctcttaaggtttagaacttcaggagagaagcccatctattctgtaggtggaattctactaagtatcagtcggccctacaagacaaagcccacccacggcattggaaagtacaagcacttaattaaagcagaagagcccaagaagaagaagggaaaagtggaagtgagagccattaatttggggacagattatgaatatggggttttaaatattcatctgactgcatatgatatgaccctggcagagagttatgcccagtatgttcacaacctctgcaactctctctccattaaagtcgaggaaaggtatg

SEQ ID NO: 154512 - DNA, 531 bp, Homo sapiens
  Payload ID: 10370
  Gene Symbol: MRPL48
  Gene Name: mitochondrial ribosomal protein L48
  ENST ID: ENST00000497094
  CDS Start-End: 500-531
agtgttttcagacgccctgggaacgcggctgcagggtccggtcttcggtttgcacagctagaggccgcgcagcagcaaaggatgagcggaaccttggaaaaggtgctgtgcctgaggaacaataccatttttaagcaagccttttctctcttaaggtttagaacttcaggagagaagcccatctattctgtaggtggaattctactaagtatcagtcggccctacaagacaaagcccacccacggcattggaaagtacaagcacttaattaaagcagaagagatggagtctcgccctgtcacccaggctggagtgcaatggcgtgatctcggcgcacttcaacctcgcctcccaggttcaagtgattctcctgcctcagtctcctgagtagctgggattacagcccaagaagaagaagggaaaagtggaagtgagagccattaatttggggacagattatgaatatggggttttaaatattcatctgactgcatatgatatgaccctggcagagagttatgcccagtatgt

SEQ ID NO: 154513 - DNA, 1004 bp, Homo sapiens
  Payload ID: 10370
  Gene Symbol: MRPL48
  Gene Name: mitochondrial ribosomal protein L48
  ENST ID: ENST00000540162
  CDS Start-End: 96-254
aaggccgttccttcagtgttttcagacgccctgggaacgcggctgcagggtccggtcttcggtttgcacagctagaggccgcgcagcagcaaaggatgagcggaaccttggaaaaggtgctgtgcctgaggaacaataccatttttaagcaagccttttctctcttaaggtttagaacttcaggagagaagcccatctattctgtagagagagacggtcttgcttgtggcccaggcttgagtacagtggcatgatcatagctccctgcagcctcgaactcctgggttcaagcaatcctcctgcctcagcctctggagtagctgggattacaggtggaattctactaagtatcagtcggccctacaagacaaagcccacccacggcattggaaagtacaagcacttaattaaagcagaagagcccaagaagaagaagggaaaagtggaagtgagagccattaatttggggacagattatgaatatggggttttaaatattcatctgactgcatatgatatgaccctggcagagagttatgcccagtatgttcacaacctctgcaactctctctccattaaagtcgaggaaagttatgcaatgccaaccaaaaccatagaagtgttgcagttgcaggaccaaggcagcaaaatgctcctggactcagtgcttaccacccatgagcgagtggttcagatcagcggtttgagtgctacgtttgcagaaattttcttggaaataatccaaagcagtcttcctgaaggagtcagactgtcagtgaaggagcacactgaagaagacttcaagggacgattcaaagctcgaccagaactggaagaactgttggccaagttgaagtagctactgtagaccctttcatgccagcagtggtcatattgagtgccaaagagaagagcttactgggtagttagagttcatcaggagacccaacccttagatttcataagtacccattcccatagccagtaatgtcctcactcctctg

SEQ ID NO: 154514 - DNA, 742 bp, Homo sapiens
  Payload ID: 10370
  Gene Symbol: MRPL48
  Gene Name: mitochondrial ribosomal protein L48
  ENST ID: ENST00000544819
  CDS Start-End: 88-240
tccttcagtgttttcagacgccctgggaacgcggctgcagggtccggtcttcggtttgcacagctagaggccgcgcagcagcaaaggatgagcggaaccttggaaaaggtgctgtgcctgaggaacaataccatttttaagcaagccttttctctcttaaggtggaattctactaagtatcagtcggccctacaagacaaagcccacccacggcattggaaagtacaagcacttaattaaagcagaagagcccaagaagaagaagggaaaagtggaagtgagagccattaatttggggacagattatgaatatggggttttaaatattcatctgactgcatatgatatgaccctggcagagagttatgcccagtatgttcacaacctctgcaactctctctccattaaagtcgaggaaagttatgcaatgccaaccaaaaccatagaagtgttgcagttgcaggaccaaggcagcaaaatgctcctggactcagtgcttaccacccatgagcgagtggttcagatcagcggtttgagtgctacgtttgcagaaattttcttggaaataatccaaagcagtcttcctgaaggagtcagactgtcagtgaaggagcacactgaagaagacttcaagggacgattcaaagctcgaccagaactggaagaactgttggccaagttgaagtagctactgtagaccctttcatgccagcagtggtcatattgagtgccaaagagaaga

SEQ ID NO: 154515 - DNA, 699 bp, Homo sapiens
  Payload ID: 10370
  Gene Symbol: MRPL48
  Gene Name: mitochondrial ribosomal protein L48
  ENST ID: ENST00000543058
  CDS Start-End: 16-168
gcgcagcagcaaaggatgagcggaaccttggaaaaggtgctgtgcctgaggaacaataccatttttaagcaagccttttctctcttaaggtttagaacttcaggagagaagcccatctattctgtagcccaagaagaagaagggaaaagtggaagtgagagccattaatttggggacagattatgaatatggggttttaaatattcatctgactgcatatgatatgaccctggcagagagttatgcccagtatgttcacaacctctgcaactctctctccattaaagtcgaggaaagatcagcggtttgagtgctacgtttgcagaaattttcttggaaataatccaaagcagtcttcctgaaggagtcagactgtcagtgaaggagcacactgaagaagacttcaagggacgattcaaagctcgaccagaactggaagaactgttggccaagttgaagtagctactgtagaccctttcatgccagcagtggtcatattgagtgccaaagagaagagcttactgggtagttagagttcatcaggagacccaacccttagatttcataagtacccattcccatagccagtaatgtcctcactcctctgtggcttggctgtacttgccatttcttaccacttacctatgaggtaatgcttgttatcttccatctaataaaaatctgctgcagatgtgtata

SEQ ID NO: 154516 - DNA, 661 bp, Homo sapiens
  Payload ID: 10370
  Gene Symbol: MRPL48
  Gene Name: mitochondrial ribosomal protein L48
  ENST ID: ENST00000542303
  CDS Start-End: 64-429
gggaacgcggctgcagggtccggtcttcggtttgcacagctagaggccgcgcagcagcaaaggatgagcggaaccttggaaaaggtgctgtgcctgaggaacaataccatttttaagcaagccttttctctcttaaggtttagaacttcaggagagaagcccatctattctgtaggtggaattctactaagtatcagtcggccctacaagacaaagcccacccacggcattggaaagtacaagcacttaattaaagcagaagagatcagcggtttgagtgctacgtttgcagaaattttcttggaaataatccaaagcagtcttcctgaaggagtcagactgtcagtgaaggagcacactgaagaagacttcaagggacgattcaaagctcgaccagaactggaagaactgttggccaagttgaagtagctactgtagaccctttcatgccagcagtggtcatattgagtgccaaagagaagagcttactgggtagttagagttcatcaggagacccaacccttagatttcataagtacccattcccatagccagtaatgtcctcactcctctgtggcttggctgtacttgccatttcttaccacttacctatgaggtaatgcttgttatcttccatctaataaaaatctgctgcagatgt

SEQ ID NO: 154517 - DNA, 996 bp, Homo sapiens
  Payload ID: 10370
  Gene Symbol: MRPL48
  Gene Name: mitochondrial ribosomal protein L48
  ENST ID: ENST00000544140
  CDS Start-End: 90-242
gttccttcagtgttttcagacgccctgggaacgcggctgcagggtccggtcttcggtttgcacagctagaggccgcgcagcagcaaaggatgagcggaaccttggaaaaggtgctgtgcctgaggaacaataccatttttaagcaagccttttctctcttaaggtggaattctactaagtatcagtcggccctacaagacaaagcccacccacggcattggaaagtacaagcacttaattaaagcagaagagcccaagaagaagaagggaaaagtggaagtgagagccattaatttggggacagattatgaatatggggttttaaatattcatctgactgcatatgatatgaccctggcagagagttatgcccagtatgttcacaacctctgcaactctctctccattaaagtcgaggaaagttatgcaatgccaaccaaaaccatagaagtgttgcagttgcaggaccaaggcagcaaaatgctcctggactcagtgcttaccacccatgagcgagtggttcaggtaggcactccaggagaataaaaaatgtatttgcttctcctggttcttttctctgtccactttttcactttctattatgctcttttcttttctttcttgaataatagtgttctccaggttcagttcttgatgcctccatctctccttttataataccttccccctatgcagtctcattcattccttaggcctcagtgatcatcatttaatactgataacccccagatgtatatatctccagtcctgatctgttggctgaggcttgaaacttgatacccagttgtctactggccttctcgacttggatgttccacaggagtcctccctgcactctgtctatgcaaaattagttgtagagggactgattttcctctttttctgtaatcctccccacctttgagcctaatgtgtcacccttctttgtcctctgatatccattcattcaccaaattctatagcttctacctccta

SEQ ID NO: 154518 - DNA, 1560 bp, Homo sapiens
  Payload ID: 10370
  Gene Symbol: MRPL48
  Gene Name: mitochondrial ribosomal protein L48
  ENST ID: ENST00000508278
  CDS Start-End: 101-226
tggtcaaggccgttccttcagtgttttcagacgccctgggaacgcggctgcagggtccggtcttcggtttgcacagctagaggccgcgcagcagcaaaggatgagcggaaccttggaaaaggtgctgtgcctgaggaacaataccatttttaagcaagccttttctctcttaaggtttagaacttcaggagagaagcccatctattctgtagatgggactgtctagttgcaggaaaacaagctcagggcttccactgattctacattatggtggaattctactaagtatcagtcggccctacaagacaaagcccacccacggcattggaaagtacaagcacttaattaaagcagaagagcccaagaagaagaagggaaaagtggaagtgagagccattaatttggggacagattatgaatatggggttttaaatattcatctgactgcatatgatatgaccctggcagagagttatgcccagtatgttcacaacctctgcaactctctctccattaaagtcgaggaaagttatgcaatgccaaccaaaaccatagaagtgttgcagttgcaggaccaaggcagcaaaatgctcctggactcagtgcttaccacccatgagcgagtggttcagatcagcggtttgagtgctacgtttgcagaaattttcttggaaataatccaaagcagtcttcctgaaggagtcagactgtcagtgaaggagcacactgaagaagacttcaagggacgattcaaagctcgaccagaactggaagaactgttggccaagttgaagtagctactgtagaccctttcatgccagcagtggtcatattgagtgccaaagagaagagcttactgggtagttagagttcatcaggagacccaacccttagatttcataagtacccattcccatagccagtaatgtcctcactcctctgtggcttggctgtacttgccatttcttaccacttacctatgaggtaatgcttgttatcttccatctaataaaaatctgctgcagatgtgtatatgtatgtgtgtgtgagagagagaaattggcccatcctgtggagtatctttaagagattctatattctggccaggcaccgtggtgcatccctgtaatcccagcactttgcgaggccgaggcaggaggactgctcgaggccaggagcttgagaccagcctggcaacattctgtctttaccaaaaacattcttttttttttttccgaaacggagtctcgctctgttgcccaggctggagtgcagtggcacgatctagactcactgcaagctctgcctcccgggttcacaccattctcctgcctcagcctcccaagtagctgggactgcaggcgcccgccaccacacctggctaattttttgtatttttagtagagacggggttttaccatgttagccaagatggtctcgatctcctgacctcgtgatccgccagccttggcctcccaaagtgctgggattacaggtgtgagccactgcacccagccaaactttttattttaattagctggacgtggtggtatgcacttg

SEQ ID NO: 154519 - DNA, 287 bp, Homo sapiens
  Payload ID: 10370
  Gene Symbol: MRPL48
  Gene Name: mitochondrial ribosomal protein L48
  ENST ID: ENST00000537007
  CDS Start-End: 249-287
ggtcttcggtttgcacagctagaggccgcgcagcagcaaaggatgagcggaaccttggaaaaggtggaattctactaagtatcagtcggccctacaagacaaagcccacccacggcattggaaagtacaagcacttaattaaagcagaagagcccaagaagaagaagggaaaagtggaagtgagagccattaatttggggacagattatgaatatggggttttaaatattcatctgactgcatatgatatgaccctggcagagagttatgcccagtatgttcacaac

SEQ ID NO: 154520 - DNA, 2019 bp, Homo sapiens
  Payload ID: 10371
  Gene Symbol: MRPL49
  Gene Name: mitochondrial ribosomal protein L49
  Uniprot ID: Q13405
  ENST ID: ENST00000279242
  CDS Start-End: 20-520
gctggcgtagcaggtaaagatggcagctaccatgttccgggctacgctgcggggatggagaaccggtgtccagcggggctgcgggctacggctgttgagccagacccagggccctccagattaccccaggtttgtggagtctgtggatgaatatcagtttgtggagcgcctgttaccggctaccaggatcccagatcccccaaagcatgaacattatcctacccctagtggctggcagcctcccagagaccccccacccaacctgccttactttgtacgacgctctcggatgcacaacatccccgtctacaaggacatcacgcatggcaaccggcagatgactgtgatccggaaagtggaaggggacatctgggccctgcagaaagacgtggaagattttctgagcccgctgctggggaagacacctgtcacccaggtcaatgaggtgacaggtaccctacggatcaagggctactttgaccaggagcttaaagcctggctcttggagaaaggcttctgaggcccagccgagcagcctgcttgtcagcatgccctgtggatcaagtctagggggcctcaggaggagggaggtgggtgttggagcccctgagacaggggatacagaaactagggctaaaggactttggggtcaggccttgcttgcataaaggagaaaacaactctatgtacatgctgggggagagtgcctaatgtgggagaccaaatagggatcaccaggctaatggggggcgtcagcagctttctctccctcctatcttggcctgttcttttttgttttttgagacggagtctcactctgttgcccagggtggagtgcagtggcatgatcttggctcactgcaacttccacctctgggatcaagggattctcctgcctcagcctcttgagtagctgggattacaggcgcccaccaccacagcctgctaatttttgtatttttagtagagatggggtttcaccatgttggccaggctggtctcaaactcctgactcgaagtgatccgcccaccttggcctcccaaagcgttgggattataggcatgagccatgtgcctggtccaccttggcctgttttgtttttctttccttgggctcagcaattcaaattctagttgttatttggtggaagcagtagcccaaccccagtttaggggaaggtagcacagggcagagccactgggcactttgtttccttggccctccgaagctcactgttgcaaatacccccaagcctttgctctaggccagatcttgtttggtgcaggtgatggagaacacagatgactcgggcatgggtcttggagatcttctgttcaaagtacagtgctggcactggggcacagagtgcccacgttagccccgggctctgatagagaggtaggaggcacgttcttggtcactgttccattgcagaccagacttgctggcctgaccacaagggagtggctgggaactcacagccagcatagggacatccccctgcagccttctgacctgcaatcaaggctggggaggggtttgcaggcaggaatatgctgacctttcaccctgccatcccatcccaaccccagctcactagccttcatatatgccttatacttggagtcacaggggccaaaggcctgagaccccaccctgcccccaaactggctaagacagctttcagttcctgactccccaacttggtctctgccctgaagcagggcactgaactctgggctgcttctctgtgtgtaaaatgggcacatcttcctaatctgttaatggtcagtggtgtccccaaggatagtgctggcttccatggaaaccctcactcctggagattccattccattttcaagtgtacagccacagcaaggagcccgacactgatttgatcgattctgtgacacaaaccccaccaattgttaatgcaagtttttatttggctgtatatacaatttaagctattaaaatttgtacaatatttacaaattaaataatcatctgaaactgtc

SEQ ID NO: 154521 - DNA, 688 bp, Homo sapiens
  Payload ID: 10371
  Gene Symbol: MRPL49
  Gene Name: mitochondrial ribosomal protein L49
  ENST ID: ENST00000533943
  CDS Start-End: 1-382
taccatgttccgggctacgctgcggggatggagaaccggtgtccagcggggctgcgggctacggctgttggtgagagcgctgagcgaggagctgagggcatcgcgtgggtaccccccacccaacctgccttactttgtacgacgctctcggatgcacaacatccccgtctacaaggacatcacgcatggcaaccggcagatgactgtgatccggaaagtggaaggggacatctgggccctgcagaaagacgtggaagattttctgagcccgctgctggggaagacacctgtcacccaggtcaatgaggtgacaggtaccctacggatcaagggctactttgaccaggagcttaaagcctggctcttggagaaaggcttctgaggcccagccgagcagcctgcttgtcagcatgccctgtggatcaagtctagggggcctcaggaggagggaggtgggtgttggagcccctgagacaggggatacagaaactagggctaaaggactttggggtcaggccttgcttgcataaaggagaaaacaactctatgtacatgctgggggagagtgcctaatgtgggagaccaaatagggatcaccaggctaatggggggcgtcagcagctttctctccctcctatcttggcctgttcttttttgttttttgagacggagtctcactctgttgccc

SEQ ID NO: 154522 - DNA, 1906 bp, Homo sapiens
  Payload ID: 10371
  Gene Symbol: MRPL49
  Gene Name: mitochondrial ribosomal protein L49
  Uniprot ID: Q13405
  ENST ID: ENST00000526319
  CDS Start-End: 29-529
gcacagaaggctggcgtagcaggtaaagatggcagctaccatgttccgggctacgctgcggggatggagaaccggtgtccagcggggctgcgggctacggctgttgagccagacccagggccctccagattaccccaggtttgtggagtctgtggatgaatatcagtttgtggagcgcctgttaccggctaccaggatcccagatcccccaaagcatgaacattatcctacccctagtggctggcagcctcccagagaccccccacccaacctgccttactttgtacgacgctctcggatgcacaacatccccgtctacaaggacatcacgcatggcaaccggcagatgactgtgatccggaaagtggaaggggacatctgggccctgcagaaagacgtggaagattttctgagcccgctgctggggaagacacctgtcacccaggtcaatgaggtgacaggtaccctacggatcaagggctactttgaccaggagcttaaagcctggctcttggagaaaggcttctgaggcccagccgagcagcctgcttgtcagcatgccctgtggatcaagtctagggggcctcaggaggagggagtgcctaatgtgggagaccaaatagggatcaccaggctaatggggggcgtcagcagctttctctccctcctatcttggcctgttcttttttgttttttgagacggagtctcactctgttgcccagggtggagtgcagtggcatgatcttggctcactgcaacttccacctctgggatcaagggattctcctgcctcagcctcttgagtagctgggattacaggcgcccaccaccacagcctgctaatttttgtatttttagtagagatggggtttcaccatgttggccaggctggtctcaaactcctgactcgaagtgatccgcccaccttggcctcccaaagcgttgggattataggcatgagccatgtgcctggtccaccttggcctgttttgtttttctttccttgggctcagcaattcaaattctagttgttatttggtggaagcagtagcccaaccccagtttaggggaaggtagcacagggcagagccactgggcactttgtttccttggccctccgaagctcactgttgcaaatacccccaagcctttgctctaggccagatcttgtttggtgcaggtgatggagaacacagatgactcgggcatgggtcttggagatcttctgttcaaagtacagtgctggcactggggcacagagtgcccacgttagccccgggctctgatagagaggtaggaggcacgttcttggtcactgttccattgcagaccagacttgctggcctgaccacaagggagtggctgggaactcacagccagcatagggacatccccctgcagccttctgacctgcaatcaaggctggggaggggtttgcaggcaggaatatgctgacctttcaccctgccatcccatcccaaccccagctcactagccttcatatatgccttatacttggagtcacaggggccaaaggcctgagaccccaccctgcccccaaactggctaagacagctttcagttcctgactccccaacttggtctctgccctgaagcagggcactgaactctgggctgcttctctgtgtgtaaaatgggcacatcttcctaatctgttaatggtcagtggtgtccccaaggatagtgctggcttccatggaaaccctcactcctggagattccattccattttcaagtgtacagccacagcaaggagcccgacactgatttgatcgattctgtgacacaaaccccaccaattgttaatgcaagtttttatttggctgtatatacaatttaagctattaaaatttgtacaatatttacaaattaaataatcatctg

SEQ ID NO: 154523 - DNA, 518 bp, Homo sapiens
  Payload ID: 10371
  Gene Symbol: MRPL49
  Gene Name: mitochondrial ribosomal protein L49
  ENST ID: ENST00000534078
  CDS Start-End: 37-207
agttgcgcgcacagaaggctggcgtagcaggtaaagatggcagctaccatgttccgggctacgctgcggggatggagaaccggtgtccagcggggctgcgggctacggctgttgaccccccacccaacctgccttactttgtacgacgctctcggatgcacaacatccccgtctacaaggacatcacgcatggcaaccggcagatgactgtgatccggaaagtggaaggggacatctgggccctgcagaaagacgtggaagattttctgagcccgctgctggggaagacacctgtcacccaggtcaatgaggtgacaggtaccctacggatcaagggctactttgaccaggagcttaaagcctggctcttggagaaaggcttctgaggcccagccgagcagcctgcttgtcagcatgccctgtggatcaagtctagggggcctcaggaggagggaggtgggtgttggagcccctgagacaggggatacagaaactagggctaaaggactttggggtca

SEQ ID NO: 154524 - DNA, 489 bp, Homo sapiens
  Payload ID: 10371
  Gene Symbol: MRPL49
  Gene Name: mitochondrial ribosomal protein L49
  ENST ID: ENST00000531705
  CDS Start-End: 12-311
agcaggtaaagatggcagctaccatgttccgggctacgctgcggggatggagaaccggtgtccagcggggctgcgggctacggctgttgagccagacccagggccctccagattaccccaggtttgtggagtctgtggatgaatatcagtttgtggagcgcctgttaccggctaccaggatcccagatcccccaaagcatgaacattatcctacccctagtggctggcagcctcccagagaccccaccctgcccccaaactggctaagacagctttcagttcctgactccccaacttggtctctgccctgaagcagggcactgaactctgggctgcttctctgtgtgtaaaatgggcacatcttcctaatctgttaatggtcagtggtgtccccaaggatagtgctggcttccatggaaaccctcactcctggagattccattccattttcaagtgtacagccacagcaaggagcccgacactgatttg

SEQ ID NO: 154525 - DNA, 501 bp, Homo sapiens
  Payload ID: 10371
  Gene Symbol: MRPL49
  Gene Name: mitochondrial ribosomal protein L49
  ENST ID: ENST00000526171
  CDS Start-End: 27-449
acagaaggctggcgtagcaggtaaagatggcagctaccatgttccgggctacgctgcggggatggagaaccggtgtccagcggggctgcgggctacggctgttgagccagacccagggccctccagattaccccaggtttgtggagtctgtggatgaatatcagtttgtggagcgcctgttaccggctaccaggatcccagatcccccaaagcatgaacattatcctacccctagtggctggcagcctcccagagaccccccacccaacctgccttactttgtacgacgctctcggatgcacaacatccccgtctacaaggacatcacgcatggcaaccggcagatgactgtgatccggaaagtggaaggggacatctgggtaagtgggtgggtgggtctgggactgggcctgaccctttcagggctgaagggacaggagtctttttaagggaagggactcttggcctgacctgatttgtcatctttccccaggccctgca

SEQ ID NO: 154526 - DNA, 3332 bp, Homo sapiens
  Payload ID: 10372
  Gene Symbol: MRPL50
  Gene Name: mitochondrial ribosomal protein L50
  Uniprot ID: Q8N5N7
  ENST ID: ENST00000374865
  CDS Start-End: 23-499
aggcccgtggatctcatcgaagatggcggcgcgatctgtgtcgggcattaccagaagagtcttcatgtggacagtctcagggacaccatgtagagaattttggtctcgattcagaaaagagaaagagccagtggttgttgagacagtagaagagaaaaaggaacctatcctagtgtgtccacctttacgaagccgagcatacacaccacctgaagatctccagagtcgtttggaatcttacgttaaagaagtttttggttcatctcttcctagtaattggcaagacatctccctggaagatagtcgtctaaagttcaatcttctggctcatttagctgatgacttgggtcatgtagtccctaactccagactccaccagatgtgcagggttagagatgttcttgatttctataatgtccctattcaagatagatctaaatttgatgaactcagtgccagtaatctgccccccaatttgaaaatcacttggagttactaagcaattcggaagagaaacacattgaaatcactgtctttccctgagcaagggggctgctcattagatcttttgatactttaccatgtgaaatactaccagaactgttctctaaacccactttttctgtagaggaatgtatcatctttttttttctcatattacaaatggacaaataacggactttctattttcatatttgctgaaaccattttttaaatgaaattaggtcattatttatgaaaagttttgagagggcactgtcaacttgggtttaagacaggaggacattgcaagttcacacctttcataagcataaagtagttgcaagaaagtattttcatcctgttaggattcatatctaagatagagttatgcattgcacatacacaaataaacttttattagatagatacctataaaagaaacataaaagtatgttgtgtattactgacagttctagattaatttcttttagaattaaagtagatttgttaaagtgtattgtgtgttgtaaattttttaagtgaaatttgcttgcgctctgccttgccatttctttccagtaagtataattttgaaaaaattagaatatatgccaaatattgagtgctgtgactcttcctcataagagatgtgccagattctatgtctaattgcatattctcttcagaggagatgatgcttattttaaacctttttctctataacttttaaaaagtggtgctgagtattcactagagtggcaagtctttgtgctttaatgcactcaatttgtggaaattacttaaatagcaggttatcagatggttctgaatgacaaaggtgttaaatttgggatttttttttcaagctttagatatggctggagagtaatgagacagaaggaatgtcttatattgttctgactgctgacaattcctaaagaaaagtgatagaagggtttttaacaaaataagttgcatttattctctttcccagggttactcctttgaagagggcaaaattcagttgggaatataaattctggaatcttcatgaagaaaattagttaacagtatagacatgccctacaaatatcatccacaggcacttcattcaagaacttcaggtgtcagagtgcctggagctctggagcttagacattagagttgattccttggggattggttccaggacacctacttggataccaaagtccacagatgcccaagccccttttataaaatgatgtagtatttgcatattatgtatgcacatcctcccatatactttaaatcatctttagattacttatactgaatagaatgtaaatagtatttacaattgtgaatacaatgtatttagttatgtaaatatgtaaattttaaagttatgtaaatatgtagctatgtaaatagctataaaataatatttacaattgtgaatagtatgtaaatagttgtgaacataactattgtgaataatatgttatatgttatagttgtgaatgtaaatagtattcacaattgtgaatacaatgtaaatagctttcacaattgtgaatacaatgtaagtagctatgtaaatagtgaatacaatgtaaatagctatgtaaatagttgttatgctgattagggaataatgagaaggaaaaaaagtatacatattcagtacagatgcagtcatctttttttcccctcgaacatttttgatccacaattggttgaatccacagatggggaacacacagtcttggtaaatttaaccaacaaggagggtaaacgcatcccaacagggaaggtaaactgcacatccatcagtacctctagagggcatcactggtttatagctcaatacagtgactatatcagaataatggcctttagttttcctgaaagattaaattaggcttgctgttgttgaatgagataatcaaacatatgatgtaattttaaagggtttacatacagaaggcctgctgtatgtcctgcttctgctgtgtaaaagattcagcatggaatcattggaattttatgtacaggatttcattatctcattttctatacaatttttccttctgatccagagacacggaaaaacaaagggcaagatggaaataagggatgagaaggtctatgtggaaaaacagttacaactggagtggtaactgcaaaaaccaagcagcttcatgtgatcgttaggacagaagaaatttctcctttgtagcctagagcaatattctcaaaatttaatgcgcatgttaatcatttggggatcttttattcattttttcatgtggggatcttttaaaaatgcaaattctgatttggtaagtctggagtaggtcctgagcttctgcatgcttcaaaagctgattatgttttgagaacatggatctagatgctggtattgaggtgggagacaagtactgccacctgaaacaacagtcttggtaaatttagccgacgagggtaaacacatcctaacagggaaggtaaactgtacgtccatcagtaccactagagggcatcactggtttatagttcaatacagtgaatatatcagaataatggcctttagttttcctgaaagattaaattaggcttgctaacttgtttaatgagataatcagacatatgatgtaattttaaagggtttacatttttaaaaatttaatgattgctacataaaaagggtatcagttaactaattttacttagatggaacttctgtaagcttagtaggtatgcttaaataaagcctgctaataaaatagagattcagactcaatagaatggttttacatatgtaatatatgttttaaactgcataaaataaactcctccctcctttc

SEQ ID NO: 154527 - DNA, 1234 bp, Homo sapiens
  Payload ID: 10373
  Gene Symbol: MRPL51
  Gene Name: mitochondrial ribosomal protein L51
  Uniprot ID: Q4U2R6
  ENST ID: ENST00000229238
  CDS Start-End: 463-849
gtaaaataggggtaataaaaacagctacagcggaagactgttgtgaggcacagagaaagggcttggtcattggaagcgggttccaggttctcaaccttcatttccttcacggttgaaggacgccaaagaaagcggaaagggtgaattttcttgaaatctcagttttggggaatcttagcgacgagtcgcggacctcagcttgtccggcgctccaaaacttccggcaggcggaccggaagcactgaggcgggaagggtggtagaggcccctcctgccggaacccggggggcggggctcgtggctgttgcggatggggcgtaggtgggcggtgcgcccacagctgcctgggtaaggcccaagatggctgtcttcgccttagtactcgtgtgaagttggcggggacggttcctgtcatcttcttgggcttatttggtgtgctgttgaaggggggagactagagaaatggcagggaacctcttatccggggcaggtaggcgcctgtgggactgggtgcctctggcgtgcagaagcttctctcttggtgtgcctagattgatcggtataaggctcactctcccgccccccaaagtggttgatcgttggaacgagaaaagggccatgttcggagtgtatgacaacatcgggatcctgggaaactttgaaaagcaccccaaagaactgatcagggggcccatatggcttcgaggttggaaagggaatgaattgcaacgttgtatccgaaagaggaaaatggttggaagtagaatgttcgctgatgacctgcacaaccttaataaacgcatccgctatctctacaaacactttaaccgacatgggaagtttcgatagaagagaaagctgagaacttcggaaaaggctcatctgtcaccctggagaagggaaactgtacttttccctgtgaggaaacggctttgtattttctctgtaataaaatggggcttctttggaatttgatagccacatacttttgttttcctctagatgctgcctctactcatgtagactatgaagtcttgactcatcctagatcttaggatcttaggtttgggcttcacaccacttgccttttacagtctagctatacctaattcctttaaaaagaaaagttggtgagaatgttattggcgctttttgacataatgctgttatgttaatagtgtttctaaagagccttccacactgaaatgaaatataagagaaaaatggagtcata

SEQ ID NO: 154528 - DNA, 441 bp, Homo sapiens
  Payload ID: 10373
  Gene Symbol: MRPL51
  Gene Name: mitochondrial ribosomal protein L51
  ENST ID: ENST00000543703
  CDS Start-End: 223-321
gcctgcgaatccctccttggccgcaaggtccccctttgcccagtcggcggggaggaggccgtatttctgctggccagagacgtcgcgtccctggctgggcattcagtcacccccaggaaaggaggaaactttgaaaagcaccccaaagaactgatcagggggcccatatggcttcgaggttggaaagggaatgaattgcaacgttgtatccgaaagaggaaaatggttggaagtagaatgttcgctgatgacctgcacaaccttaataaacgcatccgctatctctacaaacactttaaccgacatgggaagtttcgatagaagagaaagctgagaacttcggaaaaggctcatctgtcaccctggagaagggaaactgtacttttccctgtgaggaaacggctttgtattttctctgtaataaaatggggcttctttgga

SEQ ID NO: 154529 - DNA, 472 bp, Homo sapiens
  Payload ID: 10373
  Gene Symbol: MRPL51
  Gene Name: mitochondrial ribosomal protein L51
  ENST ID: ENST00000543959
  CDS Start-End: 123-353
aggcaagtccacgctgggagttagaaggcatcgcctctaatccaggtgtgcctagattgatcggtataaggctcactctcccgccccccaaagtggttgatcgttggaacgagaaaagggccatgttcggagtgtatgacaacatcgggatcctgggaaactttgaaaagcaccccaaagaactgatcagggggcccatatggcttcgaggttggaaagggaatgaattgcaacgttgtatccgaaagaggaaaatggttggaagtagaatgttcgctgatgacctgcacaaccttaataaacgcatccgctatctctacaaacactttaaccgacatgggaagtttcgatagaagagaaagctgagaacttcggaaaaggctcatctgtcaccctggagaagggaaactgtacttttccctgtgaggaaacggctttgtattttctctgtaataaaatggggcttctttgg

SEQ ID NO: 154530 - DNA, 501 bp, Homo sapiens
  Payload ID: 10373
  Gene Symbol: MRPL51
  Gene Name: mitochondrial ribosomal protein L51
  ENST ID: ENST00000538814
  CDS Start-End: 152-382
atgtaggcaccccgataactgcttcgtagtataataggcggctcagattaattccctcccttccccatccccaggtgtgcctagattgatcggtataaggctcactctcccgccccccaaagtggttgatcgttggaacgagaaaagggccatgttcggagtgtatgacaacatcgggatcctgggaaactttgaaaagcaccccaaagaactgatcagggggcccatatggcttcgaggttggaaagggaatgaattgcaacgttgtatccgaaagaggaaaatggttggaagtagaatgttcgctgatgacctgcacaaccttaataaacgcatccgctatctctacaaacactttaaccgacatgggaagtttcgatagaagagaaagctgagaacttcggaaaaggctcatctgtcaccctggagaagggaaactgtacttttccctgtgaggaaacggctttgtattttctctgtaataaaatggggcttctttgg

SEQ ID NO: 154531 - DNA, 343 bp, Homo sapiens
  Payload ID: 10373
  Gene Symbol: MRPL51
  Gene Name: mitochondrial ribosomal protein L51
  ENST ID: ENST00000540949
  CDS Start-End: 123-343
gttgcggatggggcgtaggtgggcggtgcgcccacagctgcctgggtgtgcctagattgatcggtataaggctcactctcccgccccccaaagtggttgatcgttggaacgagaaaagggccatgttcggagtgtatgacaacatcgggatcctgggaaactttgaaaagcaccccaaagaactgatcagggggcccatatggcttcgaggttggaaagggaatgaattgcaacgttgtatccgaaagaggaaaatggttggaagtagaatgttcgctgatgacctgcacaaccttaataaacgcatccgctatctctacaaacactttaaccgacatgggaa

SEQ ID NO: 154532 - DNA, 601 bp, Homo sapiens
  Payload ID: 10373
  Gene Symbol: MRPL51
  Gene Name: mitochondrial ribosomal protein L51
  ENST ID: ENST00000537701
  CDS Start-End: 203-433
cgcctgcgaatccctccttggccgcaaggtccccctttgcccagtcggcggggaggaggccgtatttctgctggccagagacgtcgcgtccctggctgggcattcagtcacccccaggaaaggaggtgtgcctagattgatcggtataaggctcactctcccgccccccaaagtggttgatcgttggaacgagaaaagggccatgttcggagtgtatgacaacatcgggatcctgggaaactttgaaaagcaccccaaagaactgatcagggggcccatatggcttcgaggttggaaagggaatgaattgcaacgttgtatccgaaagaggaaaatggttggaagtagaatgttcgctgatgacctgcacaaccttaataaacgcatccgctatctctacaaacactttaaccgacatgggaagtttcgatagaagagaaagctgagaacttcggaaaaggctcatctgtcaccctggagaagggaaactgtacttttccctgtgaggaaacggctttgtattttctctgtaataaaatggggcttctttggaatttgatagccacatacttttgttttcctctagatgctgcctctactc

SEQ ID NO: 154533 - DNA, 814 bp, Homo sapiens
  Payload ID: 10373
  Gene Symbol: MRPL51
  Gene Name: mitochondrial ribosomal protein L51
  ENST ID: ENST00000543164
  CDS Start-End: 460-690
gcctgcgaatccctccttggccgcaaggtccccctttgcccagtcggcggggaggaggccgtatttctgctggccagagacgtcgcgtccctggctgggcattcagtcacccccaggaaaggaggcaagtccacgctgggagttagaaggcatcgcctctaatccaggtttcgccatctcctctgctaagtgacgtccagcaagtcacttcactttcaggacctcaaatctcctccccagtagtaaaataggggtaataaaaacagctacagcggaagactgttgtgaggcacagagaaagggcttggtcattggaagcgggttccaggttctcaaccttcatttccttcacggttgaaggacgccaaagaaagcggaaagggtgtgcctagattgatcggtataaggctcactctcccgccccccaaagtggttgatcgttggaacgagaaaagggccatgttcggagtgtatgacaacatcgggatcctgggaaactttgaaaagcaccccaaagaactgatcagggggcccatatggcttcgaggttggaaagggaatgaattgcaacgttgtatccgaaagaggaaaatggttggaagtagaatgttcgctgatgacctgcacaaccttaataaacgcatccgctatctctacaaacactttaaccgacatgggaagtttcgatagaagagaaagctgagaacttcggaaaaggctcatctgtcaccctggagaagggaaactgtacttttccctgtgaggaaacggctttgtattttctctgtaataaaatggggcttctttggaattt

SEQ ID NO: 154534 - DNA, 1042 bp, Homo sapiens
  Payload ID: 10374
  Gene Symbol: MRPL52
  Gene Name: mitochondrial ribosomal protein L52
  ENST ID: ENST00000311892
  CDS Start-End: 205-363
gctgctttagggactgttctcttcagtgagtggcaggtgtccggaggctgcactgcagcgtagccgcttgggcgggcggccagtggcgactacagcagggactggctgccaacccctccggctacgggccccttaccgagctcccagactggtcatatgcgggggtatgatcctgcttaattggataattggtgactgaggaagatggtgaagattttttctacttgttatttactagacgagttgtactgctgtcacaggaaatggacgctggattacaagcatggcagctcaggcagcagaagttgcaggaagaacaaaggaagcaggaaaatgctcttaaacccaaaggggcttcactgaagagcccacttccaagtcaataaaaagcaactcctgcctcccttcctcaccctgtctctggatttcttttctatcacctagatgcttcatccagccagaagatagccttcacgttccccatctgtcttcagagaaaaagagctgggacaccaagaacaagctgttagatcactgcctgggaggcttggcttagtactctcatctctggttccattccagttcagctaagtcttgctttaaaatttttacctcctagctgggtgcggtggctcacgcctgtaatcccagcactttgggaggctgaggcgggcagatcacaagatcaggagttcgagaccagcctggccaacccagcctggtcaacatggtgaaaccctgtccctactaaagatacaaacaattagccgggcgtggtggggtgcgcttgtaatcccagctactcaggaggctgaggcaggagaatcgcttaaactcgggaggtagaggttgcagtgagccaaggtcacaccattgcactccaacctgggcgacagggcgagactccgtctcaaaaaaaaaaaaaaatttacctcctttgcaggccataggactagcccaactatgagaaatagctgttctgtgaacgtgaaaaggggacagcagttttcccagttttggccaggcagtcaagcctttaaca

SEQ ID NO: 154535 - DNA, 1118 bp, Homo sapiens
  Payload ID: 10374
  Gene Symbol: MRPL52
  Gene Name: mitochondrial ribosomal protein L52
  Uniprot ID: Q86TS9
  ENST ID: ENST00000355151
  CDS Start-End: 31-402
ttccggctaccccggctactcctgctcagcatggctgctttagggactgttctcttcacaggtgtccggaggctgcactgcagcgtagccgcttgggcgggcggccagtggcgactacagcagggactggctgccaacccctccggctacgggccccttaccgagctcccagactggtcatatgcggatggccgccctgctcccccaatgaaaggccagcttcgaagaaaagctgaaagggagacgtttgcaagacgagttgtactgctgtcacaggaaatggacgctggattacaagcatggcagctcaggcagcagaagttgcaggaagaacaaaggaagcaggaaaatgctcttaaacccaaaggggcttcactgaagagcccacttccaagtcaataaaaagcaactcctgcctcccttcctcaccctgtctctggatttcttttctatcacctagatgcttcatccagccagaagatagccttcacgttccccatctgtcttcagagaaaaagagctgggacaccaagaacaagctgttagatcactgcctgggaggcttggcttagtactctcatctctggttccattccagttcagctaagtcttgctttaaaatttttacctcctagctgggtgcggtggctcacgcctgtaatcccagcactttgggaggctgaggcgggcagatcacaagatcaggagttcgagaccagcctggccaacccagcctggtcaacatggtgaaaccctgtccctactaaagatacaaacaattagccgggcgtggtggggtgcgcttgtaatcccagctactcaggaggctgaggcaggagaatcgcttaaactcgggaggtagaggttgcagtgagccaaggtcacaccattgcactccaacctgggcgacagggcgagactccgtctcaaaaaaaaaaaaaaatttacctcctttgcaggccataggactagcccaactatgagaaatagctgttctgtgaacgtgaaaaggggacagcagttttcccagttttggccaggcagtcaagcctttaacagctcatgcacagtttaggccatgtacagctggcatctaataaatgttttcatgaaaaaga

SEQ ID NO: 154536 - DNA, 1111 bp, Homo sapiens
  Payload ID: 10374
  Gene Symbol: MRPL52
  Gene Name: mitochondrial ribosomal protein L52
  Uniprot ID: Q86TS9
  ENST ID: ENST00000397496
  CDS Start-End: 27-395
ggctaccccggctactcctgctcagcatggctgctttagggactgttctcttcagtgtccggaggctgcactgcagcgtagccgcttgggcgggcggccagtggcgactacagcagggactggctgccaacccctccggctacgggccccttaccgagctcccagactggtcatatgcggatggccgccctgctcccccaatgaaaggccagcttcgaagaaaagctgaaagggagacgtttgcaagacgagttgtactgctgtcacaggaaatggacgctggattacaagcatggcagctcaggcagcagaagttgcaggaagaacaaaggaagcaggaaaatgctcttaaacccaaaggggcttcactgaagagcccacttccaagtcaataaaaagcaactcctgcctcccttcctcaccctgtctctggatttcttttctatcacctagatgcttcatccagccagaagatagccttcacgttccccatctgtcttcagagaaaaagagctgggacaccaagaacaagctgttagatcactgcctgggaggcttggcttagtactctcatctctggttccattccagttcagctaagtcttgctttaaaatttttacctcctagctgggtgcggtggctcacgcctgtaatcccagcactttgggaggctgaggcgggcagatcacaagatcaggagttcgagaccagcctggccaacccagcctggtcaacatggtgaaaccctgtccctactaaagatacaaacaattagccgggcgtggtggggtgcgcttgtaatcccagctactcaggaggctgaggcaggagaatcgcttaaactcgggaggtagaggttgcagtgagccaaggtcacaccattgcactccaacctgggcgacagggcgagactccgtctcaaaaaaaaaaaaaaatttacctcctttgcaggccataggactagcccaactatgagaaatagctgttctgtgaacgtgaaaaggggacagcagttttcccagttttggccaggcagtcaagcctttaacagctcatgcacagtttaggccatgtacagctggcatctaataaatgttttcatgaaaaaga

SEQ ID NO: 154537 - DNA, 333 bp, Homo sapiens
  Payload ID: 10374
  Gene Symbol: MRPL52
  Gene Name: mitochondrial ribosomal protein L52
  Uniprot ID: Q86TS9
  ENST ID: ENST00000397505
  CDS Start-End: 1-264
atggctgctttagggactgttctcttcacaggtgtccggaggctgcactgcagcgtagccgcttgggcgggcggccagtggcgactacagcagggactggctgccaacccctccggctacgggccccttaccgagctcccagactggtcatatgcggagacgagttgtactgctgtcacaggaaatggacgctggattacaagcatggcagctcaggcagcagaagttgcaggaagaacaaaggaagcaggaaaatgctcttaaacccaaaggggcttcactgaagagcccacttccaagtcaataaaaagcaactcctgcctcccttcctca

SEQ ID NO: 154538 - DNA, 411 bp, Homo sapiens
  Payload ID: 10374
  Gene Symbol: MRPL52
  Gene Name: mitochondrial ribosomal protein L52
  ENST ID: ENST00000432849
  CDS Start-End: 11-343
cctgctcagcatggctgctttagggactgttctcttcagtgtccggaggctgcactgcagcgtagccgcttgggcgggcggccagtggcgactacagcagggactggctgccaacccctccggctacgggccccttaccgagctcccagactggtcatatgcggatggccgccctgctcccccaatgaaaggccagcttcgaagaaaagctgaaagggagacgtttgcagtgagtgagacgagttgtactgctgtcacaggaaatggacgctggattacaagcatggcagctcaggcagcagaagttgcaggaagaacaaaggaagcaggaaaatgctcttaaacccaaaggggcttcactgaagagcccacttccaagtcaataaaaagcaactcctgcctcccttcctc

SEQ ID NO: 154539 - DNA, 895 bp, Homo sapiens
  Payload ID: 10374
  Gene Symbol: MRPL52
  Gene Name: mitochondrial ribosomal protein L52
  Uniprot ID: Q86TS9
  ENST ID: ENST00000555345
  CDS Start-End: 305-499
cggctactcctgctcagcatggctgctttagggactgttctcttcagtgagtgggtatagatagggaccgtggactcgggggccctttggggacgggcacaggacccctgatccggctgcgcggcctctcccccaactctgctctgttctcccagcaggtgtccggaggctgcactgcagcgtagccgcttgggcgggcggccagtggcgactacagcagggactggctgccaacccctccggctacgggccccttaccgagctcccagactggtcatatgcggatggccgccctgctcccccaatgaaaggccagcttcgaagaaaagctgaaagggagacgtttgcaagacgagttgtactgctgtcacaggaaatggacgctggattacaagcatggcagctcaggcagcagaagttgcaggaagaacaaaggaagcaggaaaatgctcttaaacccaaaggggcttcactgaagagcccacttccaagtcaataaaaagcaactcctgcctcccttcctcaccctgtctctggatttcttttctatcacctagatgcttcatccagccagaagatagccttcacgttccccatctgtcttcagagaaaaagagctgggacaccaagaacaagctgttagatcactgcctgggaggcttggcttagtactctcatctctggttccattccagttcagctaagtcttgctttaaaatttttacctcctagctgggtgcggtggctcacgcctgtaatcccagcactttgggaggctgaggcgggcagatcacaagatcaggagttcgagaccagcctggccaacccagcctggtcaacatggtgaaaccctgtccctactaaagatacaaacaattagccgggcgtggtgggg

SEQ ID NO: 154540 - DNA, 586 bp, Homo sapiens
  Payload ID: 10374
  Gene Symbol: MRPL52
  Gene Name: mitochondrial ribosomal protein L52
  Uniprot ID: Q86TS9
  ENST ID: ENST00000553711
  CDS Start-End: 368-562
gctcagcatggctgctttagggactgttctcttcagtgagtgggtatagatagggaccgtggactcgggggccctttggggacgggcacaggacccctgatccggctgcgcggcctctcccccaactctgctctgttctcccagcaggtgtccggaggctgcactgcagcgtagccgcttgggcgggcggccagtggcgactacagcagggactggctgccaacccctccggctacgggccccttaccgagctcccagactggtcatatgcgggggtatgatcctgcttaattggataattggtgactgaggaagatggtgaagattttttctacttgttatttactatggccgccctgctcccccaatgaaaggccagcttcgaagaaaagctgaaagggagacgtttgcaagacgagttgtactgctgtcacaggaaatggacgctggattacaagcatggcagctcaggcagcagaagttgcaggaagaacaaaggaagcaggaaaatgctcttaaacccaaaggggcttcactgaagagcccacttccaagtcaataaaaagcaactcctgcctcccttcct

SEQ ID NO: 154541 - DNA, 922 bp, Homo sapiens
  Payload ID: 10374
  Gene Symbol: MRPL52
  Gene Name: mitochondrial ribosomal protein L52
  ENST ID: ENST00000557221
  CDS Start-End: 260-415
tggctgctttagggactgttctcttcagtgagtgggtatagatagggaccgtggactcgggggccctttggggacgggcacaggacccctgatccggctgcgcggcctctcccccaactctgctctgttctcccagcaggtgtccggaggctgcactgcagcgtagccgcttgggcgggcggccagtggcgactacagcagggactggctgccaacccctccggctacgggccccttaccgagctcccagactggtcatatgcggagacgagttgtactgctgtcacaggaaatggacgctggattacaagcatggcagctcaggcagcagaagttgcaggaagaacaaaggaagcaggaaaatgctcttaaacccaaaggggcttcactgaagagcccacttccaagtcaataaaaagcaactcctgcctcccttcctcaccctgtctctggatttcttttctatcacctagatgcttcatccagccagaagatagccttcacgttccccatctgtcttcagagaaaaagagctgggacaccaagaacaagctgttagatcactgcctgggaggcttggcttagtactctcatctctggttccattccagttcagctaagtcttgctttaaaatttttacctcctagctgggtgcggtggctcacgcctgtaatcccagcactttgggaggctgaggcgggcagatcacaagatcaggagttcgagaccagcctggccaacccagcctggtcaacatggtgaaaccctgtccctactaaagatacaaacaattagccgggcgtggtggggtgcgcttgtaatcccagctactcaggaggctgaggcaggagaatcgcttaaactcgggaggtagaggttgcagtgagccaaggtcacaccattgcactccaacctgggcga

SEQ ID NO: 154542 - DNA, 398 bp, Homo sapiens
  Payload ID: 10374
  Gene Symbol: MRPL52
  Gene Name: mitochondrial ribosomal protein L52
  Uniprot ID: Q86TS9
  ENST ID: ENST00000556840
  CDS Start-End: 178-372
tttagggactgttctcttcagtgagtggcaggtgtccggaggctgcactgcagcgtagccgcttgggcgggcggccagtggcgactacagcagggactggctgccaacccctccggctacgggccccttaccgagctcccagactggtcatatgcggatggccgccctgctcccccaatgaaaggccagcttcgaagaaaagctgaaagggagacgtttgcaagacgagttgtactgctgtcacaggaaatggacgctggattacaagcatggcagctcaggcagcagaagttgcaggaagaacaaaggaagcaggaaaatgctcttaaacccaaaggggcttcactgaagagcccacttccaagtcaataaaaagcaactcctgcctcccttcctca

SEQ ID NO: 154543 - DNA, 451 bp, Homo sapiens
  Payload ID: 10374
  Gene Symbol: MRPL52
  Gene Name: mitochondrial ribosomal protein L52
  ENST ID: ENST00000555536
  CDS Start-End: 225-383
gcaggtgtccggaggctgcactgcagcgtagccgcttgggcgggcggccagtggcgactacagcagggactggctgccaacccctccggctacgggccccttaccgagctcccagactggtcatatgcgggggtatgatcctgcttaattggataattggtgactgaggaagatggtgaagattttttctacttgttatttactatggccgccctgctcccccaatgaaaggccagcttcgaagaaaagctgaaagggagacgtttgcagtgagtgagacgagttgtactgctgtcacaggaaatggacgctggattacaagcatggcagctcaggcagcagaagttgcaggaagaacaaaggaagcaggaaaatgctcttaaacccaaaggggcttcactgaagagcccacttccaagtcaataaaaagcaactcctgcctcccttcctc

SEQ ID NO: 154544 - DNA, 220 bp, Homo sapiens
  Payload ID: 10374
  Gene Symbol: MRPL52
  Gene Name: mitochondrial ribosomal protein L52
  ENST ID: ENST00000556465
  CDS Start-End: 4-220
agcatggctgctttagggactgttctcttcagtgtccggaggctgcactgcagcgtagccgcttgggcgggcggccagtggcgactacagcagggactggctgccaacccctccggctacgggccccttaccgagctcccagactggtcatatgcggagacgagttgtactgctgtcacaggaaatggacgctggattacaagcatggcagctcaggcag

SEQ ID NO: 154545 - DNA, 1162 bp, Homo sapiens
  Payload ID: 10375
  Gene Symbol: MRPL53
  Gene Name: mitochondrial ribosomal protein L53
  Uniprot ID: Q96EL3
  ENST ID: ENST00000258105
  CDS Start-End: 663-1001
gctagaatgcacttcaacttaagtcctgggagctacgctaattcatggagaaccacagaggtttaataggcatttctatacctggatcagccccaaggacagtattaccctgtactgcccttcctattactattttcagtcatttactaatattgggctgtagtactttcacgtttaagctttggctattcagagctcactacgtttaatcttcagttacctgaatggtgtttaccttctggtgtggatcatcccggcttgtgttagtgctctctctttggaagaagccaggatttaagatcgagttagcctagatgtggcccagcagggtacagaaggggaaaggctgcagaaaacgggcgtattttcgtgcaaagaggtttttgcgccatttatttatggttttcaccgtcgtatgagaggactattcatgataggctgtatttgctgacagcctactttgggctcccccatgcgttgtgccgaaaccacctctttctttcctgccttcctccgcctgggctaggaagcccagagctgcggttcgcaggcctgctaagcagccggcggccggaagtctatcccgcagaagcgcagccattcacggcctcacgcaatgcgacacttccgcctgcacgagttcttccggggcggaggtcaccatggcagctgccttggctcggcttggtctgcggcctgtcaaacaggttcgggttcagttctgtcccttcgagaaaaacgtggaatcgacgaggaccttcctgcagacggtgagcagtgagaaggtccgctccactaatctcaactgctcagtgattgcggacgtgaggcatgacggctccgagccctgcgtggacgtgctgttcggagacgggcatcgcctgattatgcgcggcgctcatctcaccgctctggaaatgctcaccgccttcgcctcccacatccgggccagggacgcggcgggcagcggggacaagccgggcgctgatactggtcgctgacagcgccaaagagaccaacaagatgattttagcgtggactaggacacttaacctaagaagagtttcacttaatcattcaaatcactatctgaagggtcacggagcgcaaaataaagtttaaaaccctgctaccacaatgtttctggaacaagactagatca

SEQ ID NO: 154546 - DNA, 386 bp, Homo sapiens
  Payload ID: 10375
  Gene Symbol: MRPL53
  Gene Name: mitochondrial ribosomal protein L53
  ENST ID: ENST00000409710
  CDS Start-End: 28-240
acgagttcttccggggcggaggtcaccatggcagctgccttggctcggcttggtctgcggcctgtcaaacaggttcgggttcagttctgtcccttcgagaaaaacgtggaatcgacgaggagacgggcatcgcctgattatgcgcggcgctcatctcaccgctctggaaatgctcaccgccttcgcctcccacatccgggccagggacgcggcgggcagcggggacaagccgggcgctgatactggtcgctgacagcgccaaagagaccaacaagatgattttagcgtggactaggacacttaacctaagaagagtttcacttaatcattcaaatcactatctgaagggtcacggagcgcaaaataaagtttaaaaccctgctacc

SEQ ID NO: 154547 - DNA, 626 bp, Homo sapiens
  Payload ID: 10376
  Gene Symbol: MRPL54
  Gene Name: mitochondrial ribosomal protein L54
  Uniprot ID: Q6P161
  ENST ID: ENST00000330133
  CDS Start-End: 38-454
ccggaaacgtgcacttgcaagctgcccgcaatacgtcatggcgaccaaacgccttttcggggctacccggacgtgggccggctggggggcctgggagctcctaaaccccgccacttccggaagactcctggcccgggattatgccaagaaaccagttatgaagggggccaaatcgggaaaaggtgcagtgaccagcgaggccctcaaggaccccgacgtatgcacagatcctgtccagctcaccacatatgccatgggcgtcaacatctacaaggaagggcaggatgtacccctgaaaccggatgctgagtaccctgaatggctgttcgagatgaacttgggtcccccaaagaccctggaggagctggaccccgagagccgggagtactggcggcggctgcggaaacagaacatctggcgccacaaccggctgagcaagaacaagaggttgtagcatggagggcccggcatcgctgacccccacgccgagggcttgccgttttcccggaggacgtggacttttgtgagacaagaggcggctccccagcctgggtttccatgtgaccccacagtggggctggaccagggccctggaggccaataaagagctttctgggtagacccta

SEQ ID NO: 154548 - DNA, 491 bp, Homo sapiens
  Payload ID: 10376
  Gene Symbol: MRPL54
  Gene Name: mitochondrial ribosomal protein L54
  ENST ID: ENST00000589174
  CDS Start-End: 1-230
cgaccaaacgccttttcggggctacccggacgtgggccggctggggggcctgggagctcctaaaccccgccacttccggaagactcctggcccgggattatgccaagaaaccagtccaccctctggagtcggctttcggcaccctgaccctgacccagggtctgaccctaggcctgagtgaggactggcctccctgcagtcccaacaactcctgccctgcctggctgtgatggggcgggatcacgagggctggagtccaccagattagaggaggctgagggtgacacgtagttagggagtgatggggcctcttgctgggggtagatcacctcatggaccccacgtcctgcagaacccccaagggtcatgccctcggccccacccttgccacagcagccccacccatgcctaggtgggtgccctgggggatttggactgggctcacccaccctccggcttcctctgtccacaagctggatgggcggggcggg

SEQ ID NO: 154549 - DNA, 632 bp, Homo sapiens
  Payload ID: 10377
  Gene Symbol: MRPL55
  Gene Name: mitochondrial ribosomal protein L55
  Uniprot ID: Q7Z7F7
  ENST ID: ENST00000295008
  CDS Start-End: 165-551
agtgacgtcgtgggctgcagcgcagcagcacccaacgcatctagcaggaaaggagagggagctttccccgaagaccctcctggaccagccccaggctcctgtgctggttgcacgccagggcctgtactgaccacctccacgtgccactggggctgtaaggaggaatggcggccgtgggcagcctgcttggccggctgaggcagagcaccgtgaaggccaccggacctgcactccgccgcctgcacacatcctcctggcgagctgacagcagcagggcctcactcactcgtgtgcaccgccaggcttatgcacgactctaccccgtgctgctggtgaagcaggatggctccaccatccacatccgctacagggagccacggcgcatgctggcgatgcccatagatctggacaccctgtctcctgaggagcgccgggccaggctgcggaagcgtgaggctcagctccagtcgaggaaggagtacgagcaggagctcagtgatgacttgcatgtggagcgctaccgacagttctggaccaggaccaagaagtgaccgtggctccagccaccccgggacattgctaagatgggagggctgttcttaaatcactcgttcttgaagctgccacctgga

SEQ ID NO: 154550 - DNA, 744 bp, Homo sapiens
  Payload ID: 10377
  Gene Symbol: MRPL55
  Gene Name: mitochondrial ribosomal protein L55
  Uniprot ID: Q7Z7F7
  ENST ID: ENST00000336520
  CDS Start-End: 277-663
agtgacgtcgtgggctgcagcgcagcagcacccaacgcagtgagtaccttgatctcctgcgtggcctcgtccctggtcttagttccaccgggcagcgggagtcaggaccgcctgtcctcagacccctccgcagcgactgtggcggccgcagtctagcaggaaaggagagggagctttccccgaagaccctcctggaccagccccaggctcctgtgctggttgcacgccagggcctgtactgaccacctccacgtgccactggggctgtaaggaggaatggcggccgtgggcagcctgcttggccggctgaggcagagcaccgtgaaggccaccggacctgcactccgccgcctgcacacatcctcctggcgagctgacagcagcagggcctcactcactcgtgtgcaccgccaggcttatgcacgactctaccccgtgctgctggtgaagcaggatggctccaccatccacatccgctacagggagccacggcgcatgctggcgatgcccatagatctggacaccctgtctcctgaggagcgccgggccaggctgcggaagcgtgaggctcagctccagtcgaggaaggagtacgagcaggagctcagtgatgacttgcatgtggagcgctaccgacagttctggaccaggaccaagaagtgaccgtggctccagccaccccgggacattgctaagatgggagggctgttcttaaatcactcgttcttgaagctgccacctgga

SEQ ID NO: 154551 - DNA, 722 bp, Homo sapiens
  Payload ID: 10377
  Gene Symbol: MRPL55
  Gene Name: mitochondrial ribosomal protein L55
  Uniprot ID: Q7Z7F7
  ENST ID: ENST00000336300
  CDS Start-End: 255-641
gcctgccagtgacgtcgtgggctgcagcgcagcagcacccaacgcagtgagtaccttgatctcctgcgtggcctcgtccctggtcttagttccaccgggcagcgggagtcaggaccgcctgtcctcagacccctccgcagcgactgtggcggccgcaggcggttctgagaagtccaagggttgctgggagaggttggttgcacgccagggcctgtactgaccacctccacgtgccactggggctgtaaggaggaatggcggccgtgggcagcctgcttggccggctgaggcagagcaccgtgaaggccaccggacctgcactccgccgcctgcacacatcctcctggcgagctgacagcagcagggcctcactcactcgtgtgcaccgccaggcttatgcacgactctaccccgtgctgctggtgaagcaggatggctccaccatccacatccgctacagggagccacggcgcatgctggcgatgcccatagatctggacaccctgtctcctgaggagcgccgggccaggctgcggaagcgtgaggctcagctccagtcgaggaaggagtacgagcaggagctcagtgatgacttgcatgtggagcgctaccgacagttctggaccaggaccaagaagtgaccgtggctccagccaccccgggacattgctaagatgggagggctgttcttaaatcactcgttcttgaagctgccacctgga

SEQ ID NO: 154552 - DNA, 661 bp, Homo sapiens
  Payload ID: 10377
  Gene Symbol: MRPL55
  Gene Name: mitochondrial ribosomal protein L55
  Uniprot ID: Q7Z7F7
  ENST ID: ENST00000348259
  CDS Start-End: 194-580
gcagcgcagcagcacccaacgcagtgagtaccttgatctcctgcgtggcctcgtccctggtcttagttccaccgggcagcgggagtcaggaccgcctgtcctcagacccctccgcagcgactgtggcggccgcaggttgcacgccagggcctgtactgaccacctccacgtgccactggggctgtaaggaggaatggcggccgtgggcagcctgcttggccggctgaggcagagcaccgtgaaggccaccggacctgcactccgccgcctgcacacatcctcctggcgagctgacagcagcagggcctcactcactcgtgtgcaccgccaggcttatgcacgactctaccccgtgctgctggtgaagcaggatggctccaccatccacatccgctacagggagccacggcgcatgctggcgatgcccatagatctggacaccctgtctcctgaggagcgccgggccaggctgcggaagcgtgaggctcagctccagtcgaggaaggagtacgagcaggagctcagtgatgacttgcatgtggagcgctaccgacagttctggaccaggaccaagaagtgaccgtggctccagccaccccgggacattgctaagatgggagggctgttcttaaatcactcgttcttgaagctgccacctgga

SEQ ID NO: 154553 - DNA, 1423 bp, Homo sapiens
  Payload ID: 10377
  Gene Symbol: MRPL55
  Gene Name: mitochondrial ribosomal protein L55
  ENST ID: ENST00000366731
  CDS Start-End: 1175-1342
agtgacgtcgtgggctgcagcgcagcagcacccaacgcagtgagtaccttgatctcctgcgtggcctcgtccctggtcttagttccaccgggcagcgggagtcaggaccgcctgtcctcagacccctccgcagcgactgtggcggccgcagtctagcaggaaaggagagggagctttccccgaagaccctcctggaccagccccaggctcctgtgctggtgaggccgagggagagggatgtgggcataggacacgtagcaggatttccattttagaggcagccggacctgtcttcaggtcccttccttggtgagagacaggggtacgccagaggaagctgggcgctcggcctctgtgcagcctcatctcctggaatctgagtattgaaaactgggcttttacttcgcacacctcagcacagactcccatgggaatccaggtcacagcaaagcagccctgggcctccattctcctttaagcaagcatgacaatcctcacttcactgagtttttattaaaactagcaatgaccttagaaagcaaggcatgacctcagctccacttttgaggctgcagtccattcagagaggtttcgcagactcggtaacggccagaacagacagcctgggccctgccgcaggctgactcagaatctttgggagtagtgaccaacttctgcttttggaaaaacctctacaggcggttctgagaagtccaagggttgctgggagaggttggttgcacgccagggcctgtactgaccacctccacgtgccactggggctgtaaggaggaatggcggccgtgggcagcctgcttggtccttgctattgtccactgtcccctgtgctggaagctttgtgcccttgctcagcctggcagcctcttcctggctagggggccagaacgcctctgaccacagcctgtggctcctgaggaagccccgaggctcatcctgccccggcacgggtcaccagctctgccggctgaggcagagcaccgtgaaggccaccggacctgcactccgccgcctgcacacatcctcctggcgagctgacagcagcagggcctcactcactcgtgtgcaccgccaggcttatgcacgactctaccccgtgctgctggtgaagcaggatggctccaccatccacatccgctacagggagccacggcgcatgctggcgatgcccatagatctggacaccctgtctcctgaggagcgccgggccaggctgcggaagcgtgaggctcagctccagtcgaggaaggagtacgagcaggagctcagtgatgacttgcatgtggagcgctaccgacagttctggaccaggaccaagaagtgaccgtggctccagccaccccgggacattgctaagatgggagggctgttcttaaatcactcgttcttgaagctgccacctgga

SEQ ID NO: 154554 - DNA, 722 bp, Homo sapiens
  Payload ID: 10377
  Gene Symbol: MRPL55
  Gene Name: mitochondrial ribosomal protein L55
  ENST ID: ENST00000366732
  CDS Start-End: 474-641
cttagaaagcaaggcatgacctcagctccacttttgaggctgcagtccattcagagaggtttcgcagactcggtaacggccagaacagacagcctgggccctgccgcaggctgactcagaatctttgggagtagtgaccaacttctgcttttggaaaaacctctacaggcggttctgagaagtccaagggttgctgggagaggttggttgcacgccagggcctgtactgaccacctccacgtgccactggggctgtaaggaggaatggcggccgtgggcaccggctgaggcagagcaccgtgaaggccaccggacctgcactccgccgcctgcacacatcctcctggcgagctgacagcagcagggcctcactcactcgtgtgcaccgccaggcttatgcacgactctaccccgtgctgctggtgaagcaggatggctccaccatccacatccgctacagggagccacggcgcatgctggcgatgcccatagatctggacaccctgtctcctgaggagcgccgggccaggctgcggaagcgtgaggctcagctccagtcgaggaaggagtacgagcaggagctcagtgatgacttgcatgtggagcgctaccgacagttctggaccaggaccaagaagtgaccgtggctccagccaccccgggacattgctaagatgggagggctgttcttaaatcactcgttcttgaagctgccacctgga

SEQ ID NO: 154555 - DNA, 834 bp, Homo sapiens
  Payload ID: 10377
  Gene Symbol: MRPL55
  Gene Name: mitochondrial ribosomal protein L55
  Uniprot ID: Q7Z7F7
  ENST ID: ENST00000366733
  CDS Start-End: 367-753
tgggaatccaggtcacagcaaagcagccctgggcctccattctcctttaagcaagcatgacaatcctcacttcactgagtttttattaaaactagcaatgaccttagaaagcaaggcatgacctcagctccacttttgaggctgcagtccattcagagaggtttcgcagactcggtaacggccagaacagacagcctgggccctgccgcaggctgactcagaatctttgggagtagtgaccaacttctgcttttggaaaaacctctacaggcggttctgagaagtccaagggttgctgggagaggttggttgcacgccagggcctgtactgaccacctccacgtgccactggggctgtaaggaggaatggcggccgtgggcagcctgcttggccggctgaggcagagcaccgtgaaggccaccggacctgcactccgccgcctgcacacatcctcctggcgagctgacagcagcagggcctcactcactcgtgtgcaccgccaggcttatgcacgactctaccccgtgctgctggtgaagcaggatggctccaccatccacatccgctacagggagccacggcgcatgctggcgatgcccatagatctggacaccctgtctcctgaggagcgccgggccaggctgcggaagcgtgaggctcagctccagtcgaggaaggagtacgagcaggagctcagtgatgacttgcatgtggagcgctaccgacagttctggaccaggaccaagaagtgaccgtggctccagccaccccgggacattgctaagatgggagggctgttcttaaatcactcgttcttgaagctgccacctgga

SEQ ID NO: 154556 - DNA, 990 bp, Homo sapiens
  Payload ID: 10377
  Gene Symbol: MRPL55
  Gene Name: mitochondrial ribosomal protein L55
  Uniprot ID: Q7Z7F7
  ENST ID: ENST00000366734
  CDS Start-End: 523-909
aggcagccggacctgtcttcaggtcccttccttggtgagagacaggggtacgccagaggaagctgggcgctcggcctctgtgcagcctcatctcctggaatctgagtattgaaaactgggcttttacttcgcacacctcagcacagactcccatgggaatccaggtcacagcaaagcagccctgggcctccattctcctttaagcaagcatgacaatcctcacttcactgagtttttattaaaactagcaatgaccttagaaagcaaggcatgacctcagctccacttttgaggctgcagtccattcagagaggtttcgcagactcggtaacggccagaacagacagcctgggccctgccgcaggctgactcagaatctttgggagtagtgaccaacttctgcttttggaaaaacctctacaggcggttctgagaagtccaagggttgctgggagaggttgcaggttgcacgccagggcctgtactgaccacctccacgtgccactggggctgtaaggaggaatggcggccgtgggcagcctgcttggccggctgaggcagagcaccgtgaaggccaccggacctgcactccgccgcctgcacacatcctcctggcgagctgacagcagcagggcctcactcactcgtgtgcaccgccaggcttatgcacgactctaccccgtgctgctggtgaagcaggatggctccaccatccacatccgctacagggagccacggcgcatgctggcgatgcccatagatctggacaccctgtctcctgaggagcgccgggccaggctgcggaagcgtgaggctcagctccagtcgaggaaggagtacgagcaggagctcagtgatgacttgcatgtggagcgctaccgacagttctggaccaggaccaagaagtgaccgtggctccagccaccccgggacattgctaagatgggagggctgttcttaaatcactcgttcttgaagctgccacctgga

SEQ ID NO: 154557 - DNA, 1212 bp, Homo sapiens
  Payload ID: 10377
  Gene Symbol: MRPL55
  Gene Name: mitochondrial ribosomal protein L55
  Uniprot ID: Q7Z7F7
  ENST ID: ENST00000366735
  CDS Start-End: 745-1131
gggagctttccccgaagaccctcctggaccagccccaggctcctgtgctggtgaggccgagggagagggatgtgggcataggacacgtagcaggatttccattttagaggcagccggacctgtcttcaggtcccttccttggtgagagacaggggtacgccagaggaagctgggcgctcggcctctgtgcagcctcatctcctggaatctgagtattgaaaactgggcttttacttcgcacacctcagcacagactcccatgggaatccaggtcacagcaaagcagccctgggcctccattctcctttaagcaagcatgacaatcctcacttcactgagtttttattaaaactagcaatgaccttagaaagcaaggcatgacctcagctccacttttgaggctgcagtccattcagagaggtttcgcagactcggtaacggccagaacagacagcctgggccctgccgcaggctgactcagaatctttgggagtagtgaccaacttctgcttttggaaaaacctctacaggcggttctgagaagtccaagggttgctgggagaggttggtgagtggcgtggtgattacatgtgtcttggaagcatcctgggctgggatttgataagaaaccattaggtggaagaaccttccttttaaaaaagatctcttcattctctgcctagcaggttgcacgccagggcctgtactgaccacctccacgtgccactggggctgtaaggaggaatggcggccgtgggcagcctgcttggccggctgaggcagagcaccgtgaaggccaccggacctgcactccgccgcctgcacacatcctcctggcgagctgacagcagcagggcctcactcactcgtgtgcaccgccaggcttatgcacgactctaccccgtgctgctggtgaagcaggatggctccaccatccacatccgctacagggagccacggcgcatgctggcgatgcccatagatctggacaccctgtctcctgaggagcgccgggccaggctgcggaagcgtgaggctcagctccagtcgaggaaggagtacgagcaggagctcagtgatgacttgcatgtggagcgctaccgacagttctggaccaggaccaagaagtgaccgtggctccagccaccccgggacattgctaagatgggagggctgttcttaaatcactcgttcttgaagctgccacctgga

SEQ ID NO: 154558 - DNA, 660 bp, Homo sapiens
  Payload ID: 10377
  Gene Symbol: MRPL55
  Gene Name: mitochondrial ribosomal protein L55
  Uniprot ID: Q7Z7F7
  ENST ID: ENST00000366736
  CDS Start-End: 193-579
caggaaaggagagggagctttccccgaagaccctcctggaccagccccaggctcctgtgctgtgaccaacttctgcttttggaaaaacctctacaggcggttctgagaagtccaagggttgctgggagaggttggttgcacgccagggcctgtactgaccacctccacgtgccactggggctgtaaggaggaatggcggccgtgggcagcctgcttggccggctgaggcagagcaccgtgaaggccaccggacctgcactccgccgcctgcacacatcctcctggcgagctgacagcagcagggcctcactcactcgtgtgcaccgccaggcttatgcacgactctaccccgtgctgctggtgaagcaggatggctccaccatccacatccgctacagggagccacggcgcatgctggcgatgcccatagatctggacaccctgtctcctgaggagcgccgggccaggctgcggaagcgtgaggctcagctccagtcgaggaaggagtacgagcaggagctcagtgatgacttgcatgtggagcgctaccgacagttctggaccaggaccaagaagtgaccgtggctccagccaccccgggacattgctaagatgggagggctgttcttaaatcactcgttcttgaagctgccacctgga

SEQ ID NO: 154559 - DNA, 705 bp, Homo sapiens
  Payload ID: 10377
  Gene Symbol: MRPL55
  Gene Name: mitochondrial ribosomal protein L55
  Uniprot ID: Q7Z7F7
  ENST ID: ENST00000366738
  CDS Start-End: 130-624
gcagtctagcaggaaaggagagggagctttccccgaagaccctcctggaccagccccaggctcctgtgctggttgcacgccagggcctgtactgaccacctccacgtgccactggggctgtaaggaggaatggcggccgtgggcagcctgcttggcctggcagcctcttcctggctagggggccagaacgcctctgaccacagcctgtggctcctgaggaagccccgaggctcatcctgccccggcacgggtcaccagctctgccggctgaggcagagcaccgtgaaggccaccggacctgcactccgccgcctgcacacatcctcctggcgagctgacagcagcagggcctcactcactcgtgtgcaccgccaggcttatgcacgactctaccccgtgctgctggtgaagcaggatggctccaccatccacatccgctacagggagccacggcgcatgctggcgatgcccatagatctggacaccctgtctcctgaggagcgccgggccaggctgcggaagcgtgaggctcagctccagtcgaggaaggagtacgagcaggagctcagtgatgacttgcatgtggagcgctaccgacagttctggaccaggaccaagaagtgaccgtggctccagccaccccgggacattgctaagatgggagggctgttcttaaatcactcgttcttgaagctgccacctgga

SEQ ID NO: 154560 - DNA, 641 bp, Homo sapiens
  Payload ID: 10377
  Gene Symbol: MRPL55
  Gene Name: mitochondrial ribosomal protein L55
  Uniprot ID: Q7Z7F7
  ENST ID: ENST00000366739
  CDS Start-End: 174-560
ccccatgcagtctagcaggaaaggagagggagctttccccgaagaccctcctggaccagccccaggctcctgtgctggcggttctgagaagtccaagggttgctgggagaggttggttgcacgccagggcctgtactgaccacctccacgtgccactggggctgtaaggaggaatggcggccgtgggcagcctgcttggccggctgaggcagagcaccgtgaaggccaccggacctgcactccgccgcctgcacacatcctcctggcgagctgacagcagcagggcctcactcactcgtgtgcaccgccaggcttatgcacgactctaccccgtgctgctggtgaagcaggatggctccaccatccacatccgctacagggagccacggcgcatgctggcgatgcccatagatctggacaccctgtctcctgaggagcgccgggccaggctgcggaagcgtgaggctcagctccagtcgaggaaggagtacgagcaggagctcagtgatgacttgcatgtggagcgctaccgacagttctggaccaggaccaagaagtgaccgtggctccagccaccccgggacattgctaagatgggagggctgttcttaaatcactcgttcttgaagctgccacctgga

SEQ ID NO: 154561 - DNA, 644 bp, Homo sapiens
  Payload ID: 10377
  Gene Symbol: MRPL55
  Gene Name: mitochondrial ribosomal protein L55
  Uniprot ID: Q7Z7F7
  ENST ID: ENST00000366740
  CDS Start-End: 177-563
ccccatgcagtctagcaggaaaggagagggagctttccccgaagaccctcctggaccagccccaggctcctgtgctggcggttctgagaagtccaagggttgctgggagaggttgcaggttgcacgccagggcctgtactgaccacctccacgtgccactggggctgtaaggaggaatggcggccgtgggcagcctgcttggccggctgaggcagagcaccgtgaaggccaccggacctgcactccgccgcctgcacacatcctcctggcgagctgacagcagcagggcctcactcactcgtgtgcaccgccaggcttatgcacgactctaccccgtgctgctggtgaagcaggatggctccaccatccacatccgctacagggagccacggcgcatgctggcgatgcccatagatctggacaccctgtctcctgaggagcgccgggccaggctgcggaagcgtgaggctcagctccagtcgaggaaggagtacgagcaggagctcagtgatgacttgcatgtggagcgctaccgacagttctggaccaggaccaagaagtgaccgtggctccagccaccccgggacattgctaagatgggagggctgttcttaaatcactcgttcttgaagctgccacctgga

SEQ ID NO: 154562 - DNA, 603 bp, Homo sapiens
  Payload ID: 10377
  Gene Symbol: MRPL55
  Gene Name: mitochondrial ribosomal protein L55
  Uniprot ID: Q7Z7F7
  ENST ID: ENST00000366741
  CDS Start-End: 136-522
ccccatgcagtctagcaggaaaggagagggagctttccccgaagaccctcctggaccagccccaggctcctgtgctggttgcacgccagggcctgtactgaccacctccacgtgccactggggctgtaaggaggaatggcggccgtgggcagcctgcttggccggctgaggcagagcaccgtgaaggccaccggacctgcactccgccgcctgcacacatcctcctggcgagctgacagcagcagggcctcactcactcgtgtgcaccgccaggcttatgcacgactctaccccgtgctgctggtgaagcaggatggctccaccatccacatccgctacagggagccacggcgcatgctggcgatgcccatagatctggacaccctgtctcctgaggagcgccgggccaggctgcggaagcgtgaggctcagctccagtcgaggaaggagtacgagcaggagctcagtgatgacttgcatgtggagcgctaccgacagttctggaccaggaccaagaagtgaccgtggctccagccaccccgggacattgctaagatgggagggctgttcttaaatcactcgttcttgaagctgccacctgga

SEQ ID NO: 154563 - DNA, 630 bp, Homo sapiens
  Payload ID: 10377
  Gene Symbol: MRPL55
  Gene Name: mitochondrial ribosomal protein L55
  Uniprot ID: Q7Z7F7
  ENST ID: ENST00000366742
  CDS Start-End: 163-549
gctgcacctgtgataagcccttgtccccatgcagtctagcaggaaaggagagggagctttccccgaagaccctcctggaccagccccaggctcctgtgctgcaggttgcacgccagggcctgtactgaccacctccacgtgccactggggctgtaaggaggaatggcggccgtgggcagcctgcttggccggctgaggcagagcaccgtgaaggccaccggacctgcactccgccgcctgcacacatcctcctggcgagctgacagcagcagggcctcactcactcgtgtgcaccgccaggcttatgcacgactctaccccgtgctgctggtgaagcaggatggctccaccatccacatccgctacagggagccacggcgcatgctggcgatgcccatagatctggacaccctgtctcctgaggagcgccgggccaggctgcggaagcgtgaggctcagctccagtcgaggaaggagtacgagcaggagctcagtgatgacttgcatgtggagcgctaccgacagttctggaccaggaccaagaagtgaccgtggctccagccaccccgggacattgctaagatgggagggctgttcttaaatcactcgttcttgaagctgccacctgga

SEQ ID NO: 154564 - DNA, 726 bp, Homo sapiens
  Payload ID: 10377
  Gene Symbol: MRPL55
  Gene Name: mitochondrial ribosomal protein L55
  Uniprot ID: Q7Z7F7
  ENST ID: ENST00000366744
  CDS Start-End: 259-645
gcgcagcagcacccaacgcagtgagtaccttgatctcctgcgtggcctcgtccctggtcttagttccaccgggcagcgggagtcaggaccgcctgtcctcagacccctccgcagcgactgtggcggccgcagtgaccaacttctgcttttggaaaaacctctacaggcggttctgagaagtccaagggttgctgggagaggttgcacgccagggcctgtactgaccacctccacgtgccactggggctgtaaggaggaatggcggccgtgggcagcctgcttggccggctgaggcagagcaccgtgaaggccaccggacctgcactccgccgcctgcacacatcctcctggcgagctgacagcagcagggcctcactcactcgtgtgcaccgccaggcttatgcacgactctaccccgtgctgctggtgaagcaggatggctccaccatccacatccgctacagggagccacggcgcatgctggcgatgcccatagatctggacaccctgtctcctgaggagcgccgggccaggctgcggaagcgtgaggctcagctccagtcgaggaaggagtacgagcaggagctcagtgatgacttgcatgtggagcgctaccgacagttctggaccaggaccaagaagtgaccgtggctccagccaccccgggacattgctaagatgggagggctgttcttaaatcactcgttcttgaagctgccacctgga

SEQ ID NO: 154565 - DNA, 565 bp, Homo sapiens
  Payload ID: 10377
  Gene Symbol: MRPL55
  Gene Name: mitochondrial ribosomal protein L55
  Uniprot ID: Q7Z7F7
  ENST ID: ENST00000366746
  CDS Start-End: 98-484
agtgacgtcgtgggctgcagcgcagcagcacccaacgcagttgcacgccagggcctgtactgaccacctccacgtgccactggggctgtaaggaggaatggcggccgtgggcagcctgcttggccggctgaggcagagcaccgtgaaggccaccggacctgcactccgccgcctgcacacatcctcctggcgagctgacagcagcagggcctcactcactcgtgtgcaccgccaggcttatgcacgactctaccccgtgctgctggtgaagcaggatggctccaccatccacatccgctacagggagccacggcgcatgctggcgatgcccatagatctggacaccctgtctcctgaggagcgccgggccaggctgcggaagcgtgaggctcagctccagtcgaggaaggagtacgagcaggagctcagtgatgacttgcatgtggagcgctaccgacagttctggaccaggaccaagaagtgaccgtggctccagccaccccgggacattgctaagatgggagggctgttcttaaatcactcgttcttgaagctgccacctgga

SEQ ID NO: 154566 - DNA, 603 bp, Homo sapiens
  Payload ID: 10377
  Gene Symbol: MRPL55
  Gene Name: mitochondrial ribosomal protein L55
  Uniprot ID: Q7Z7F7
  ENST ID: ENST00000366747
  CDS Start-End: 136-522
agtgacgtcgtgggctgcagcgcagcagcacccaacgcagcggttctgagaagtccaagggttgctgggagaggttggttgcacgccagggcctgtactgaccacctccacgtgccactggggctgtaaggaggaatggcggccgtgggcagcctgcttggccggctgaggcagagcaccgtgaaggccaccggacctgcactccgccgcctgcacacatcctcctggcgagctgacagcagcagggcctcactcactcgtgtgcaccgccaggcttatgcacgactctaccccgtgctgctggtgaagcaggatggctccaccatccacatccgctacagggagccacggcgcatgctggcgatgcccatagatctggacaccctgtctcctgaggagcgccgggccaggctgcggaagcgtgaggctcagctccagtcgaggaaggagtacgagcaggagctcagtgatgacttgcatgtggagcgctaccgacagttctggaccaggaccaagaagtgaccgtggctccagccaccccgggacattgctaagatgggagggctgttcttaaatcactcgttcttgaagctgccacctgga

SEQ ID NO: 154567 - DNA, 685 bp, Homo sapiens
  Payload ID: 10377
  Gene Symbol: MRPL55
  Gene Name: mitochondrial ribosomal protein L55
  Uniprot ID: Q7Z7F7
  ENST ID: ENST00000391867
  CDS Start-End: 219-605
cgcagcgcctgccagtgacgtcgtgggctgcagcgcagcagcacccaacgcatctagcaggaaaggagagggagctttccccgaagaccctcctggaccagccccaggctcctgtgctggcggttctgagaagtccaagggttgctgggagaggttgcaggttgcacgccagggcctgtactgaccacctccacgtgccactggggctgtaaggaggaatggcggccgtgggcagcctgcttggccggctgaggcagagcaccgtgaaggccaccggacctgcactccgccgcctgcacacatcctcctggcgagctgacagcagcagggcctcactcactcgtgtgcaccgccaggcttatgcacgactctaccccgtgctgctggtgaagcaggatggctccaccatccacatccgctacagggagccacggcgcatgctggcgatgcccatagatctggacaccctgtctcctgaggagcgccgggccaggctgcggaagcgtgaggctcagctccagtcgaggaaggagtacgagcaggagctcagtgatgacttgcatgtggagcgctaccgacagttctggaccaggaccaagaagtgaccgtggctccagccaccccgggacattgctaagatgggagggctgttcttaaatcactcgttcttgaagctgccacctgg

SEQ ID NO: 154568 - DNA, 767 bp, Homo sapiens
  Payload ID: 10377
  Gene Symbol: MRPL55
  Gene Name: mitochondrial ribosomal protein L55
  ENST ID: ENST00000411464
  CDS Start-End: 639-767
caggaaaggagagggagctttccccgaagaccctcctggaccagccccaggctcctgtgctggtgaggccgagggagagggatgtgggcataggacacgtagcaggatttccattttagaggcagccggacctgtcttcaggtcccttccttggtgagagacaggggtacgccagaggaagctgggcgctcggcctctgtgcagcctcatctcctggaatctgagtattgaaaactgggcttttacttcgcacacctcagcacagactcccatgggaatccaggtcacagcaaagcagccctgggcctccattctcctttaagcaagcatgacaatcctcacttcactgagtttttattaaaactagcaatgaccttagaaagcaaggcatgacctcagctccacttttgaggctgcagtccattcagagaggtttcgcagactcggtaacggccagaacagacagcctgggccctgccgcaggctgactcagaatctttgggagtagtgaccaacttctgcttttggaaaaacctctacaggcggttctgagaagtccaagggttgctgggagaggttggttgcacgccagggcctgtactgaccacctccacgtgccactggggctgtaaggaggaatggcggccgtgggcagcctgcttggccggctgaggcagagcaccgtgaaggccaccggacctgcactccgccgcctgcacacatcctcctggcgagctgacagcagcagggcctcactcactcgtgtg

SEQ ID NO: 154569 - DNA, 864 bp, Homo sapiens
  Payload ID: 10377
  Gene Symbol: MRPL55
  Gene Name: mitochondrial ribosomal protein L55
  Uniprot ID: Q7Z7F7
  ENST ID: ENST00000430433
  CDS Start-End: 290-784
cgcagcgcctgccagtgacgtcgtgggctgcagcgcagcagcacccaacgcagtgagtaccttgatctcctgcgtggcctcgtccctggtcttagttccaccgggcagcgggagtcaggaccgcctgtcctcagacccctccgcagcgactgtggcggccgcagtctagcaggaaaggagagggagctttccccgaagaccctcctggaccagccccaggctcctgtgctggttgcacgccagggcctgtactgaccacctccacgtgccactggggctgtaaggaggaatggcggccgtgggcagcctgcttggcctggcagcctcttcctggctagggggccagaacgcctctgaccacagcctgtggctcctgaggaagccccgaggctcatcctgccccggcacgggtcaccagctctgccggctgaggcagagcaccgtgaaggccaccggacctgcactccgccgcctgcacacatcctcctggcgagctgacagcagcagggcctcactcactcgtgtgcaccgccaggcttatgcacgactctaccccgtgctgctggtgaagcaggatggctccaccatccacatccgctacagggagccacggcgcatgctggcgatgcccatagatctggacaccctgtctcctgaggagcgccgggccaggctgcggaagcgtgaggctcagctccagtcgaggaaggagtacgagcaggagctcagtgatgacttgcatgtggagcgctaccgacagttctggaccaggaccaagaagtgaccgtggctccagccaccccgggacattgctaagatgggagggctgttcttaaatcactcgttcttgaagctgccacctgg

SEQ ID NO: 154570 - DNA, 544 bp, Homo sapiens
  Payload ID: 10377
  Gene Symbol: MRPL55
  Gene Name: mitochondrial ribosomal protein L55
  ENST ID: ENST00000457264
  CDS Start-End: 316-544
cagtgacgtcgtgggctgcagcgcagcagcacccaacgcagtgagtaccttgatctcctgcgtggcctcgtccctggtcttagttccaccgggcagcgggagtcaggaccgcctgtcctcagacccctccgcagcgactgtggcggccgcagtctagcaggaaaggagagggagctttccccgaagaccctcctggaccagccccaggctcctgtgctggcggttctgagaagtccaagggttgctgggagaggttggttgcacgccagggcctgtactgaccacctccacgtgccactggggctgtaaggaggaatggcggccgtgggcagcctgcttggccggctgaggcagagcaccgtgaaggccaccggacctgcactccgccgcctgcacacatcctcctggcgagctgacagcagcagggcctcactcactcgtgtgcaccgccaggcttatgcacgactctaccccgtgctgctggtgaagcaggatggctccaccatccacatccgctacagggagccacggcgcatgctggcgg

SEQ ID NO: 154571 - DNA, 790 bp, Homo sapiens
  Payload ID: 10377
  Gene Symbol: MRPL55
  Gene Name: mitochondrial ribosomal protein L55
  ENST ID: ENST00000483159
  CDS Start-End: 777-790
gcagcagcacccaacgcagtgagtaccttgatctcctgcgtggcctcgtccctggtcttagttccaccgggcagcgggagtcaggaccgcctgtcctcagacccctccgcagcgactgtggcggccgcagtctagcaggaaaggagagggagctttccccgaagaccctcctggaccagccccaggctcctgtgctggtgaggccgagggagagggatgtgggcataggacacgtagcaggatttccattttagaggcagccggacctgtcttcaggtcccttccttggtgagagacaggggtacgccagaggaagctgggcgctcggcctctgtgcagcctcatctcctggaatctgagtattgaaaactgggcttttacttcgcacacctcagcacagactcccatgggaatccaggtcacagcaaagcagccctgggcctccattctcctttaagcaagcatgacaatcctcacttcactgagtttttattaaaactagcaatgaccttagaaagcaaggcatgacctcagctccacttttgaggctgcagtccattcagagaggtttcgcagactcggtaacggccagaacagacagcctgggccctgccgcaggctgactcagaatctttgggagtagtgaccaacttctgcttttggaaaaacctctacaggcggttctgagaagtccaagggttgctgggagaggttgcaggttgcacgccagggcctgtactgaccacctccacgtgccactggggctgtaaggaggaatggcggccgtggg

SEQ ID NO: 154572 - DNA, 224 bp, Homo sapiens
  Payload ID: 10377
  Gene Symbol: MRPL55
  Gene Name: mitochondrial ribosomal protein L55
  ENST ID: ENST00000495434
  CDS Start-End: 199-224
acgtcgtgggctgcagcgcagcagcacccaacgcatctagcaggaaaggagagggagctttccccgaagaccctcctggaccagccccaggctcctgtgctggcggttctgagaagtccaagggttgctgggagaggttggttgcacgccagggcctgtactgaccacctccacgtgccactggggctgtaaggaggaatggcggccgtgggcagcctgcttgg

SEQ ID NO: 154573 - DNA, 694 bp, Homo sapiens
  Payload ID: 10377
  Gene Symbol: MRPL55
  Gene Name: mitochondrial ribosomal protein L55
  ENST ID: ENST00000459783
  CDS Start-End: 446-613
ctagcaggttgcacgccagggcctgtactgaccacctccacgtgccactggggctgtaaggaggaatggcggccgtgggcagcctgcttggtccttgctattgtccactgtcccctgtgctggaagctttgtgcccttgctcagcctggcagcctcttcctggctagggggccagaacgcctctgaccacagcctgtggctcctgaggaagccccgaggctcatcctgccccggcacgggtcaccagctctgccggctgaggcagagcaccgtgaaggccaccggacctgcactccgccgcctgcacacatcctcctggcgagctgacagcagcagggcctcactcactcgtgtgcaccgccaggcttatgcacgactctaccccgtgctgctggtgaagcaggatggctccaccatccacatccgctacagggagccacggcgcatgctggcgatgcccatagatctggacaccctgtctcctgaggagcgccgggccaggctgcggaagcgtgaggctcagctccagtcgaggaaggagtacgagcaggagctcagtgatgacttgcatgtggagcgctaccgacagttctggaccaggaccaagaagtgaccgtggctccagccaccccgggacattgctaagatgggagggctgttcttaaatcactcgttcttgaagctgccacctgga

SEQ ID NO: 154574 - DNA, 636 bp, Homo sapiens
  Payload ID: 10377
  Gene Symbol: MRPL55
  Gene Name: mitochondrial ribosomal protein L55
  ENST ID: ENST00000464148
  CDS Start-End: 565-636
gccagtgacgtcgtgggctgcagcgcagcagcacccaacgcaaggcagccggacctgtcttcaggtcccttccttggtgagagacaggggtacgccagaggaagctgggcgctcggcctctgtgcagcctcatctcctggaatctgagtattgaaaactgggcttttacttcgcacacctcagcacagactcccatgggaatccaggtcacagcaaagcagccctgggcctccattctcctttaagcaagcatgacaatcctcacttcactgagtttttattaaaactagcaatgaccttagaaagcaaggcatgacctcagctccacttttgaggctgcagtccattcagagaggtttcgcagactcggtaacggccagaacagacagcctgggccctgccgcaggctgactcagaatctttgggagtagtgaccaacttctgcttttggaaaaacctctacaggcggttctgagaagtccaagggttgctgggagaggttgcaggttgcacgccagggcctgtactgaccacctccacgtgccactggggctgtaaggaggaatggcggccgtgggcagcctgcttggccggctgaggcagagcaccgtgaaggccaccggacctgcactccgc

SEQ ID NO: 154575 - DNA, 2246 bp, Homo sapiens
  Payload ID: 10378
  Gene Symbol: MRPL57
  Gene Name: mitochondrial ribosomal protein L57
  Uniprot ID: Q9BQC6
  ENST ID: ENST00000309594
  CDS Start-End: 79-387
gcgagacgggtgcgcttacgccacggcgtctgctggcggccgcggagacgcagagtcttgagcagcgcggcaggcaccatgttcctgactgcgctcctctggcgcggccgcattcccggccgtcagtggatcgggaagcaccggcggccgcggttcgtgtcgttgcgcgccaagcagaacatgatccgccgcctggagatcgaggcggagaaccattactggctgagcatgccctacatgacccgggagcaggagcgcggccacgccgcggtgcgcaggagggaggccttcgaggccataaaggcggccgccacttccaagttccccccgcatagattcattgcggaccagctcgaccatctcaatgtcaccaagaaatggtcctaatcctgagtcgtcacccttggattttatggatcacggagctgaccatctttacctggtcctggaactgaaaaactgtagcttgtgtgaaaatgagcctttggaccagtctttattaaaacaaacaaacatgagtagtctgcatatcgaatatctagagctctaaacccccaatacttaaaagtctaattgctgtcctgtggtttcattagtctgataggaagatagggatttcctcagtcacagatgatattttgaaggaaagctgcaataaagccacaatgatttgaggtctttgcttaagtatgagatacttgatgggggctttatcatgcaacattagtttgcttaccttaagaattgcccaaaaatgaaagaaaatatgagcttttcagttaaacatactcctaaaaacattttccgggattttactactaaaattggacatttaagcgaagtaaaagaggccgggtgcggtggctcacgcctgtaatcccaacactttaggagtccaaggcgggcggatcacttgaggtcaggagttcaagaccagcttggccaaggtgataaaacccgtctctactaatacaaaaaaaattagctgggtatgttggtgcaggcttgcaatcccagctacttgggacgctgaggtgggaggatcgcctgaacctcagaggcagaggttgcaatgaagcggaggttgcagtgagccgagagcatgccgctgcactccagcctgggagactgcatctcaaaaaagaaaaataaacgaagtaaaagatatttatcagagctgttacaggaaggtgtattttttagctattttggcagggtgctgtggtgcttgcatgtagtcccagctattcaggaatattgcttgagtccagcttgggcaacatagcgagaccctatctaaaataacaataatatatggccaggcgggatggctcacgcctgtaatcccagcactttgggaggctgaggcgggcagatcacttgaggccaggagttcaagaccagcccaaccaacatggtgaaaccctgtctccactgaaaatacataaaattagccgggtgcagtggtgaggcctgtaatcccagctactcaggaggctgaggcaggagaatcgcttgcacccaggaggtggaggctgcagtaagtcgagattgtgtcactgcactctagcctgggcgacagaaaaagaaaatttaggtggggaaaaaaatcagaattgcgtctgtgggaacaggaataaaggagaaaccactattgactgggaagacacacaaagaactttgtcaaagttgtatggctgaggcccacacggtggctcacttctgtaatcccatcactttgggaggcttaggcagaaggatcacctgagatcaggagttccagaccagcctggccaacatggcgaaaccccatctctactaaaaatacaaaaattagccgggcgtggtggcttacgcctgtaatcccagcactttgggaggccaaggtgggcggatcacaaggtcaggagttcgagaccagcctggccaatatggtgaaaccccatctctactaaaaatataaaaatcagcaaaaaaaatttagccaggcttggtcatgcatgcctgtaatcctagctactgggaaggctgaggaaggagaattgcttgaacccaggtggtggaggttgcagtgagctgagatcgtgccactgctctccagcctgcatgacgggagtgagacaccatctcaaaaaatacatataataatataaataaaaatatcttttttgaaaataatttaatataccatgtaatttaccagttgaagatgttcgctttcagaatataataaaaatagtcaaaaa

SEQ ID NO: 154576 - DNA, 882 bp, Homo sapiens
  Payload ID: 10379
  Gene Symbol: MRPL9
  Gene Name: mitochondrial ribosomal protein L9
  ENST ID: ENST00000368829
  CDS Start-End: 6-707
tgaacatggcggcgcccgttgtcacggccccgggcagagctctgctgcgggcgggcgctggacggctgcttcggggaggcgtccaggagctactgcggccgcgacatgaagggaacgcccctgacctggcctgcaacttcagcctttctcaaaatcggggcacggtcatcgtggagcgctggtggaaggtaccgctggccggggagggccggaagccgcgcctgcaccggcgacatcgcgtctataagctggtggaggacacgaagcatcggcccaaagaaaacctggagctcatcctgacgcagtcggtggagaatgttggagtccggggtgacctggtctcagtgaagaaatctttaggccggaatcgactccttcctcagggactggctgtatatgcatcccctgaaaacaagaagctgtttgaagaggagaaattgctgagacaagaaggaaaattagagaagatccagaccaaggcaggtgaggcgcttggtgttgtggttgccccacatacattaaagttaccagaagagcctatcacacggtggggcgagtattggtgtgaggtgacggtaaatgggcttgatactgtgagagtgcctatgtctgtcgtgaactttgagaagcccaagaccaaaagatataagtactggttagcccagcaagctgccaaggctatggcccccaccagcccccagatctaaatctactctccctccaaggcagcaaagcagaatcgggagcagtggagcagaaatgtgcaagcaccctgatctcactcccagctctgaccaaatacagaattttagagaacatctgaagacatcagactgcactgcgtatacatgttgaattcttcatttttgccatctttaactg

SEQ ID NO: 154577 - DNA, 1296 bp, Homo sapiens
  Payload ID: 10379
  Gene Symbol: MRPL9
  Gene Name: mitochondrial ribosomal protein L9
  Uniprot ID: Q9BYD2
  ENST ID: ENST00000368830
  CDS Start-End: 86-889
ggcgcgccgcaggcagcactggcgggggcctttcctgccgccgacgccggggtcctccctcaggtctcattctgtgcctgtgaacatggcggcgcccgttgtcacggccccgggcagagctctgctgcgggcgggcgctggacggctgcttcggggaggcgtccaggagctactgcggccgcgacatgaagggaacgcccctgacctggcctgcaacttcagcctttctcaaaatcggggcacggtcatcgtggagcgctggtggaaggtaccgctggccggggagggccggaagccgcgcctgcaccggcgacatcgcgtctataagctggtggaggacacgaagcatcggcccaaagaaaacctggagctcatcctgacgcagtcggtggagaatgttggagtccggggtgacctggtctcagtgaagaaatctttaggccggaatcgactccttcctcagggactggctgtatatgcatcccctgaaaacaagaagctgtttgaagaggagaaattgctgagacaagaaggaaaattagagaagatccagaccaaggcaggtgaggcgacagtgaaatttctaaaaagctgtcgcctggaggtagggatgaagaacaatgtcaaatgggagctgaaccctgaaatagttgcccgccacttctttaagaatcttggtgttgtggttgccccacatacattaaagttaccagaagagcctatcacacggtggggcgagtattggtgtgaggtgacggtaaatgggcttgatactgtgagagtgcctatgtctgtcgtgaactttgagaagcccaagaccaaaagatataagtactggttagcccagcaagctgccaaggctatggcccccaccagcccccagatctaaatctactctccctccaaggcagcaaagcagaatcgggagcagtggagcagaaatgtgcaagcaccctgatctcactcccagctctgaccaaatacagaattttagagaacatctgaagacatcagactgcactgcgtatacatgttgaattcttcatttttgccatctttaactgtcatcactggggcagggaagtcctgttccagaagtaccaggctgtagatttgataagctagatgcagtagaccgaaaccatccaaaacctgtttagcttcttcctccattggagtttattgggacaaacaggagagccagccattgtctccagtacttgcctcattctcatcatccaaactgaacatttgtatcccaagcagaaataaagagaatatgttctttttaagtaa

SEQ ID NO: 154578 - DNA, 2110 bp, Homo sapiens
  Payload ID: 10380
  Gene Symbol: MRPS10
  Gene Name: mitochondrial ribosomal protein S10
  Uniprot ID: P82664
  ENST ID: ENST00000053468
  CDS Start-End: 17-622
ggtcgggaccggcaagatggcggcgcggacagcgttcggtgctgtgtgccggcgcctctggcagggattggggaatttttctgtaaacacttctaagggcaatacagccaaaaatggtggcttgcttctcagtaccaatatgaagtgggtacagttttcaaacctacacgttgatgttccaaaggatttgaccaaacctgtggtaacaatctctgatgaaccagacatattatataagcgcctctcggttttggtgaaaggtcacgataaggctgtattggacagttatgaatattttgctgtgcttgctgctaaagaacttggtatctctattaaagtacatgaacctccaaggaaaatagagcgatttactcttctccaatcagtgcatatttacaagaagcacagagttcagtatgaaatgagaacactttacagatgtttagagttagaacatctaactggaagcacagcagatgtctacttggaatatattcagcgaaacttacctgaaggggttgccatggaagtaacaaagacacaattagaacagttaccagaacacatcaaggagccaatctgggaaacactatcagaagaaaaagaagaaagcaagtcataaagcctcagggaggccatttttgcctaaatttgaaatgagggtgggccagatgagtatgtttaagtggagagtgcttccagctgagatgatttgagtctgccctaactgctccattgagttctcgtgccctcatcagctgagggcagggaatggaactttaatggaagaaccacttttatctattctttttattcattgtttcagttctgatttcagcaaacatgagcaaaccactttgactgaaagcagaaagagtgaaaattctattttgttacgctactggtgttcaattattagtttgtaccatttttaatttatgtcagttgatgcatctgaaaataagtgcttggagtgttcgtacccttatttttttttaagattcctagaaggaatctttggttaattcagattgagcagttaaagtttttgctatttacctttgtgcaggctggcatatgctaatttgggggtggtaaccaaccgattttatctcatgtaagcattacattttgaagactgaatatacttcacagcagatcaaacacatttatggcatgcactgacctcttcttggagcccagaactttatagagttgcctaccagggttactgtaatggaatttatgatcttaagaaattactagttgtattatttatcctatgattcattcattcaataagcttttactgcataaactttacatccagcactgtagttaagtacccaaaattgaatagaaataatggcttttgaaaatcgcacaaagcaggccaggcacggtggctcacgcctgtaatcccagcattttgggaggccgaggcaggcggatcacgaggtcaagagatccagaccatcctggctaacacggtgaaaccccgtctctaataaaaatacaaaaattagctggacatggtggcacgtgcctgtaatcccagctactcaggaggctgaggcaggagaattgcgtgaacccgggcccggtggaggctgcagtgagacgagatcgcgccactgcactccagcctggcgacagagcgagacgccgtctcaaaaaaaaaaaaagaaaattgtgcaaagcataggtaaatatttttctttattaagcttctcactgagaagccctctttattttggtaaatgtcactctgtttgttaggagatgtctgcttttccatgaaatgaaatagtggctaaagccctgaaagaggcaagactacaatgggctgaaacagttggtatagcaaccccagagaagtgcttcattttctttttatagtagaagcaggtccatgtcttttgtggtttcctgcacatctttggagtagttatgacttctcagtttttccccccttaaactgcattgcctattcttttttcctgacatgctatcaggtatcagtgtgttgaatacatactgcttgtgtatcagacttacgttactgtcatcaccattaaaagaattgcagctttgtgccccatgaccttca

SEQ ID NO: 154579 - DNA, 3644 bp, Homo sapiens
  Payload ID: 10381
  Gene Symbol: MRPS11
  Gene Name: mitochondrial ribosomal protein S11
  Uniprot ID: P82912
  ENST ID: ENST00000325844
  CDS Start-End: 266-850
agtcccggaactgctagaacgaaccattcgcatatggagggggtgacccaccatctcagaacattaaaaaagggaaagaatcccctggtgaactacagtgaaagtcttattgagcatttaaatggaaataaaaatattcagtggacctaatgaagagtagatgactttcccttctgtcccctccccgacaggcactcatggtaccggcgccggcgcagctgtgactgtcgctgcagacggaaactgactggggtcaattcaagtcatgcaggctgtgagaaacgcggggtcgcggttcctgcggtcctggacttggccccagacagccggcagggtcgtggccagaacgccggccgggaccatctgcacaggcgctcgacagctccaagacgctgcggccaagcagaaagttgaacagaacgcggctcccagccacaccaagttcagcatttaccctcccattccaggagaggagagctctctgaggtgggcaggaaagaaatttgaggagatcccaattgcacacattaaagcatcccacaacaacacacagatccaggtagtctctgctagtaatgagccccttgcctttgcttcctgtggcacagagggatttcggaatgccaagaagggcacaggcatcgcagcacagacagcaggcatagccgcagcggcgagagctaaacaaaagggcgtgatccacatccgagttgtggtgaaaggcctggggccaggacgcttgtctgccatgcacggactgatcatgggcggcctggaagtgatctcaatcacagacaacaccccaatcccacacaacggctgccgccccaggaaggctcggaagctgtgatgggaaggaggcctgcacttggacctgacctcaagcctcagctccagtgggaccttgtaaaatgctccctgtcagagctctccagaatatgcttgttggagatccttcaggcagtaagggagagttttgcctccttacacagtggcctttgcttgcacctccagctggagatgggtgtgccccagaagtaagctttgcatctcttacaagaggggagctacaggggcagccgtggcctaggcccaaactctgctctgagaaaataaatatctgtaccacctgtcataattttgagattttttgctttcagagttacgtaattcctaattcctcttgaaaaagagagtgtgaaatgaggtgaggcctcagatgaaagtaaaatataaatgtgagttgctatttaccagacacttctggtttcagatatttcttttctagccccttacccaagatttctagagctaatcctagtaacttttcttattaatgacttataatttggccccaaattggagctttttgccacctacctctggattctgatggatttcgccattatgggcatgtttaaagttagccctaaacacaggattttctacaagtggacagtcaaactccccacactaaagtggcagtcatcgtttacactccatgggcttcagcagtcccagcactaacgagagagtgccctaaaagcggggagggtagagttgtacaaaacatgattcttggccaggcacggtggctcacacctgtaaccctggcactttgggaggccaaggcgggtggatcacttgagtccagttagagaccagcctgggcaacatggtgaaaccccctctctactaaaaatacaaaaattaaccaggcatggtggtgtgcgcctgtaatcccagctactctggaggctgaggcatgaaaatcgcttgaacccaggaggtggaggctgcagtgagctgagatcatcctactgcactccagcccaggtgacagcgagactgtctcaaaaaaataaataaatataaataaaaatttaaaaaaattaaaaaaaaaaacctgatgattctctagaaaatagggtggatggcaggatgggcttgagtagagtccaaatctagaagtgcagaaagcaagttgataaggaacctgggtagtgctggcagtggggcacaactcaggacccccaggcaggactgactgctcctctgttggggctctagggttcctggatacggcacagaggccaaaggtgggggctctagagacacgaccagagagtcccctcttccacaggcaaagactaagggtgagagtatcaccagaagctgagaaggagtggtcaagtacacaaaagcactgttcctcccagatgagtgcaggaagggctgctgaccagaaggggaaggcactgtggagttttacttctgtgtccagccagctaagtactgtgatctgcctgaactcagtataggaaaagacacagatgcccccttaaataggcaagaggctgtgttaggacaaagaaaggaggaagatcacgaaccaagacatgaatttagaggaaaaatgcctccctactgccttctctttagtccttagcaggtcctatgaaggccatcttgtgacagtgaccaaagaagcccaaccggaggcttcttggatcaaagccactgtcggaaggaattagactgtttcaccgcaaaactacatataaacacaatgcattaaaacatggtgcacttgaaaattgcacttcgcgatttgatatggtttggtggacagagggcccgtagccatcagacagttcaatcagggtctgagcaggaaacagctcacaaggtttaagagaaaagctcaatgaaagctctttgcagaggcatgggtaagattaaggaaataaagaaggtggactacaaagcagctgccaccctaggctagaagaggcagggaagaacagttcctagaacctggcaggagctgccacagcagcagagtgcacctctgccaaaaccatggcctgagggagagggaagaaatgcctggctgttcccggcctgtagtcccttgctggggtcccccttggctgatcccaaaaggaagcaaaaaggaagggaactcagtgttgtggtacttggaggctcagcctcccaggctgcagagtggatctggaggggcacgtagaggatagtaaacacaggaggcttctgtggcttctgtaagtcctccatacaccataggtttttattttggttttggtttttgagtctcgttgtcacccaggctggattgcagtggtacgaccatggttcactgcagcctcaaactcctgggctcaagtgatcctccagcttcagcctcctgtgagcatctgggactacaggcgcatgccaccacacatggataatttttgtattttttgtattgagaccaggtcttgaactcctggtctcaagcagtccccccacctcggcctcccaaagtgctgggataacaggcgtgagccactgcgcctgatccacacaccatagtttttaaaatgttattttactcacaagagggctttggaaaggaagatcctgcccagcagagcctacatgcgcagacaggacagaggacccttaaggatcaatggtcttgttgccggaaatggatgtctggcgcaacccccggagctagttttggggaggccgccttgttgactgtgcactggaaaatgcacattgctttatcgtgagctctcggtgcacagtgtggtttccaggctctgagtggccaataaagctggtgctgtctt

SEQ ID NO: 154580 - DNA, 766 bp, Homo sapiens
  Payload ID: 10381
  Gene Symbol: MRPS11
  Gene Name: mitochondrial ribosomal protein S11
  Uniprot ID: P82912
  ENST ID: ENST00000353598
  CDS Start-End: 1-486
atgcaggctgtgagaaacgcggggtcgcggttcctgcggtcctggacttggccccagacagccggcagggtcgtggccagaacgccggccgggaccatctgcacaggcgctcgacagctccaagacgctgcggccaagcagaaagttgaacagaacgcggctcccagccacaccaagttcagcacacagatccaggtagtctctgctagtaatgagccccttgcctttgcttcctgtggcacagagggatttcggaatgccaagaagggcacaggcatcgcagcacagacagcaggcatagccgcagcggcgagagctaaacaaaagggcgtgatccacatccgagttgtggtgaaaggcctggggccaggacgcttgtctgccatgcacggactgatcatgggcggcctggaagtgatctcaatcacagacaacaccccaatcccacacaacggctgccgccccaggaaggctcggaagctgtgatgggaaggaggcctgcacttggacctgacctcaagcctcagctccagtgggaccttgtaaaatgctccctgtcagagctctccagaatatgcttgttggagatccttcaggcagtaagggagagttttgcctccttacacagtggcctttgcttgcacctccagctggagatgggtgtgccccagaagtaagctttgcatctcttacaagaggggagctacaggggcagccgtggcctaggcccaaactctgctctgagaaaataaatatctgtaccacc

SEQ ID NO: 154581 - DNA, 1060 bp, Homo sapiens
  Payload ID: 10381
  Gene Symbol: MRPS11
  Gene Name: mitochondrial ribosomal protein S11
  ENST ID: ENST00000560708
  CDS Start-End: 266-622
agtcccggaactgctagaacgaaccattcgcatatggagggggtgacccaccatctcagaacattaaaaaagggaaagaatcccctggtgaactacagtgaaagtcttattgagcatttaaatggaaataaaaatattcagtggacctaatgaagagtagatgactttcccttctgtcccctccccgacaggcactcatggtaccggcgccggcgcagctgtgactgtcgctgcagacggaaactgactggggtcaattcaagtcatgcaggctgtgagaaacgcggggtcgcggttcctgcggtcctggacttggccccagacagccggcagggtcgtggccagaacgccggccgggaccatctgcacaggcgctcgacagctccaagacgctgcggccaagcagaaagttgaacagaacgcggctcccagccacaccaagttcagcatttaccctcccattccaggagaggagagctctctgaggtgggcaggaaagaaatttgaggagatcccaattgcacacattaaagcatcccacaacaaagggatttcggaatgccaagaagggcacaggcatcgcagcacagacagcaggcatagccgcagcggcgagagctaaacaaaagggcgtgatccacatccgagttgtggtgaaaggcctggggccaggacgcttgtctgccatgcacggactgatcatgggcggcctggaagtgatctcaatcacagacaacaccccaatcccacacaacggctgccgccccaggaaggctcggaagctgtgatgggaaggaggcctgcacttggacctgacctcaagcctcagctccagtgggaccttgtaaaatgctccctgtcagagctctccagaatatgcttgttggagatccttcaggcagtaagggagagttttgcctccttacacagtggcctttgcttgcacctccagctggagatgggtgtgccccagaagtaagctttgcatctcttacaagaggggagctacaggggcagccgtggcctaggcccaaactctgctctgagaaaataaatatct

SEQ ID NO: 154582 - DNA, 1207 bp, Homo sapiens
  Payload ID: 10382
  Gene Symbol: MRPS12
  Gene Name: mitochondrial ribosomal protein S12
  Uniprot ID: O15235
  ENST ID: ENST00000308018
  CDS Start-End: 471-887
gaaccgctctatgtccagctgagggagtgcgctgtagccctcgcgcgcatactcgtacaggaggttccggtttcgtttctctgtagtgaaacttctccttggactatcgttggagatgcagcctccccggggccggaacccccgacgagtcagcaaaggccacaagcgccgcgccatggacgcagccatcttggaccgggaacaaggcggcacttcgtcccgcccactccgcgtttagaccaattgcaaggcagcgaacctgaccgtgacgagccaatcagatcctgaggaaagttgaccgcgatagagtccttcgtcgcccaatcgtcgtctgtgtcccgcctcttcagtgacgcgaggcagaaccagccaatccctgcacggatagcgcccggaagaggctagaagctggattcagcgtgtccgcgacctcacctttaggtcctgtgagggacggcccaggtggcaggatgtcctggtctggccttctccatggcctcaacacgtccctaacttgtggcccagctctggttccccggctctgggctacctgctccatggctaccctgaaccagatgcaccgcctggggccccccaagcggccgcctcggaagctgggccccacggaaggccggccgcagctgaagggtgtggtcctgtgcacgtttacccgcaagccgaagaagcccaactcagccaatcgcaagtgctgtcgagtgcggctcagcactggccgcgaggccgtctgcttcatccctggggagggccacaccctgcaggagcaccagattgtccttgtggagggcggccgcacccaggacctgccaggcgtcaagctcaccgttgtgcgtggcaagtacgactgtggccacgtgcagaagaagtgacggctgggggcacagtgggctgggcgcccctgcagaacatgaaccttccgctcctggctgccacagggtcctccgatgctggcctttgcgcctctagaggcagccactcatggattcaagtcctggctccgcctcttccatcaggaccactattaagccataggagtcctgggggtgcaaagggtgcccctctgtcaacacccttggctcctgtgtttagaggggtggcctgaaggaccttttctgctgggacaagacactgtactgccctctgctgggaaggggttttaataaacagaccctggcgcttgtgatgtaaa

SEQ ID NO: 154583 - DNA, 929 bp, Homo sapiens
  Payload ID: 10382
  Gene Symbol: MRPS12
  Gene Name: mitochondrial ribosomal protein S12
  Uniprot ID: O15235
  ENST ID: ENST00000402029
  CDS Start-End: 193-609
gtcggtggaatcctggggtcctccaaatctaccaggccatctccccagtttcccagttcttcctgcgtgcgggcgagagtggttgggccctcgggaacccactcagagcgaggctaaatttacggagggactttctgttagcagcatgagggcctgtggttagacctatagagggacggcccaggtggcaggatgtcctggtctggccttctccatggcctcaacacgtccctaacttgtggcccagctctggttccccggctctgggctacctgctccatggctaccctgaaccagatgcaccgcctggggccccccaagcggccgcctcggaagctgggccccacggaaggccggccgcagctgaagggtgtggtcctgtgcacgtttacccgcaagccgaagaagcccaactcagccaatcgcaagtgctgtcgagtgcggctcagcactggccgcgaggccgtctgcttcatccctggggagggccacaccctgcaggagcaccagattgtccttgtggagggcggccgcacccaggacctgccaggcgtcaagctcaccgttgtgcgtggcaagtacgactgtggccacgtgcagaagaagtgacggctgggggcacagtgggctgggcgcccctgcagaacatgaaccttccgctcctggctgccacagggtcctccgatgctggcctttgcgcctctagaggcagccactcatggattcaagtcctggctccgcctcttccatcaggaccactattaagccataggagtcctgggggtgcaaagggtgcccctctgtcaacacccttggctcctgtgtttagaggggtggcctgaaggaccttttctgctgggacaagacactgtactgccctctgctgggaaggggttttaataaacagaccctggcgcttgtgatgtaaa

SEQ ID NO: 154584 - DNA, 1220 bp, Homo sapiens
  Payload ID: 10382
  Gene Symbol: MRPS12
  Gene Name: mitochondrial ribosomal protein S12
  Uniprot ID: O15235
  ENST ID: ENST00000407800
  CDS Start-End: 342-758
agctggattcagcgtgtccgcgacctcacctttaggtcctgtgaggtcggtggaatcctggggtcctccaaatctaccaggccatctccccagtttcccagttcttcctgcgtgcgggcgagagtggttgggccctcgggaacccactcagagcgaggctaaatttacggagggactttctgttagcagcatgagggcctgtggttagacctatagaggtatttcctttgatttaagccagaaagtcctgagagcggatcggggagcatttgcggatcggtcactttttcctcctttctgagtctcttatcccctaccacagggacggcccaggtggcaggatgtcctggtctggccttctccatggcctcaacacgtccctaacttgtggcccagctctggttccccggctctgggctacctgctccatggctaccctgaaccagatgcaccgcctggggccccccaagcggccgcctcggaagctgggccccacggaaggccggccgcagctgaagggtgtggtcctgtgcacgtttacccgcaagccgaagaagcccaactcagccaatcgcaagtgctgtcgagtgcggctcagcactggccgcgaggccgtctgcttcatccctggggagggccacaccctgcaggagcaccagattgtccttgtggagggcggccgcacccaggacctgccaggcgtcaagctcaccgttgtgcgtggcaagtacgactgtggccacgtgcagaagaagtgacggctgggggcacagtgggctgggcgcccctgcagaacatgaaccttccgctcctggctgccacagggtcctccgatgctggcctttgcgcctctagaggcagccactcatggattcaagtcctggctccgcctcttccatcaggaccactattaagccataggagtcctgggggtgcaaagggtgcccctctgtcaacacccttggctcctgtgtttagaggggtggcctgaaggaccttttctgctgggacaagacactgtactgccctctgctgggaaggggttttaataaacagaccctggcgcttgtgatgtaaatccccttgtggagtatttgccctctgtgtggctgtggcagtggacatctctgagcttcagtttcctccagaaaatagctccattggtggtatctcctttgtttggtttggtgaagattaaattcgatgctctatgtgcataa

SEQ ID NO: 154585 - DNA, 1207 bp, Homo sapiens; identical to SEQ ID NO: 154582
  Payload ID: 10382
  Gene Symbol: MRPS12
  Gene Name: Mitochondrial ribosomal protein S12
  ENST ID: ENST00000634246
  CDS Start-End: 471-887

SEQ ID NO: 154586 - DNA, 1220 bp, Homo sapiens; identical to SEQ ID NO: 154584
  Payload ID: 10382
  Gene Symbol: MRPS12
  Gene Name: Mitochondrial ribosomal protein S12
  ENST ID: ENST00000634704
  CDS Start-End: 342-758

SEQ ID NO: 154587 - DNA, 929 bp, Homo sapiens; identical to SEQ ID NO: 154583
  Payload ID: 10382
  Gene Symbol: MRPS12
  Gene Name: Mitochondrial ribosomal protein S12
  ENST ID: ENST00000634400
  CDS Start-End: 193-609

SEQ ID NO: 154588 - DNA, 2115 bp, Homo sapiens
  Payload ID: 10383
  Gene Symbol: MRPS14
  Gene Name: mitochondrial ribosomal protein S14
  Uniprot ID: O60783
  ENST ID: ENST00000476371
  CDS Start-End: 18-404
agtttgtagcggacaacatggcggccttcatgctgggctcgctgctgcggacgttcaagcagatggttccttcatcagcttcaggccaagttcgaagtcactatgtagactggagaatgtggcgcgatgtgaagagacgaaaaatggcctatgaatacgcagatgagaggctacgtattaattcactcaggaagaataccattttgccaaaaattcttcaggatgtggctgatgaagaaattgctgccctcccccgggatagctgtcctgttagaatcagaaatcggtgtgttatgacgtcccgtccgcgtggtgtgaagcggcgctggaggcttagtcgtatagtcttccgtcacttagctgaccatgggcaactttctgggatccagcgagcgacatggtaaatgagctccagaacctattgagcttgcagggaagccaagcttgcagttccagcaagcaaagattttttttaatagaccaaaccctaatctctacaggggcccagtacagttgtttggcctacctgatgctatctctaaactacttttaaaatgaagacatttgggtgtttcatgtcagtgaattatcttttctcttggacttaacaaacatactgttcccatacatagtacaaagagtagcataataaatattttctgtgaatgttttttataccctccttttaagtttaatcttttagtaacatataggggtttttgtattaagagcattatttcataaaatgctatcttatacataatccaactaattgacatgtagctcatgtatggcagtttgtaatcctggactagctttgctgacctgcagagctccccttaactattattgttagataaacagattggatagcaaggctgctgttctggattatctaatgctccacttcttcttgtgatggctgaacaaaagaaccactaagtgttttcttgtccatccttaagggactttaaaacaaattatgcctctttaagtccttgaaagtctccatctaaagaggaaaagtttgttggaacagtatatattccctatttttatgtttatttaatccataacagaaatgagtaagggtagcacaaagttctcattcagtaactcaacagtgtgatcatcagcccagtgataaaaatatacatactgaatggaagtacctacttaacatcaggaaaatattcctggagaacttaataaatcaggaggtgaggggtgagatttttttctgcacacagagggaacaaaagcacaaagaagcaaaggcactctgtagcatcagagaaccacagtcacttcagtagatcagaaatatgaagcacaagacaaggcccgtattgtggaggatctcacaaatcatgtgaaggaattaagactgacataccaggtattacagagttttaagcacaggaatgacatcatcagtttgtaatacaggtaagtgacagctgtgtggcagatggccatgagaggaaaaagctacaggcaagacaaccagttaggaggatgtcttagttgttgaggaagatgaaggcctgaactaacattgtggtattagtagaggagagaggacagatttttaaagttttaggaaagaaaattgggcaagacttacaagactgattatatctaagaggtaaagatggttctctgggttcctgataaaagtgtctagatagatggtagagggcaattccaagagggcaactccaagatagaaaatttggaaaaagaacaaatttaggggaaacagaagataagcgagttcaggttccagtcatgcggtgttggagatgcctgtgtcatctgatgaagactagtacgcagctggatagcagagtccgaaactcaggtggaggtgaagttatgagggaattatcacaatctagtttggattcatatttcttaaatatgtatgacaacttaccaactggaatgttctagctaatatctcaacttagaatccatctcactaccaatgggcaaacacttgtgttctaaagttacttgcaagtagtttatactgccaacttgatatatatacatgctatagtttgaacattttgtgtacttccaaaattcacattaaaatctaatccacaa

SEQ ID NO: 154589 - DNA, 910 bp, Homo sapiens
  Payload ID: 10383
  Gene Symbol: MRPS14
  Gene Name: mitochondrial ribosomal protein S14
  ENST ID: ENST00000367677
  CDS Start-End: 8-190
ggacaacatggcggccttcatgctgggctcgctgctgcggacgttcaagcaggtcaggcctctacttttatccacaccgctacccctcaccgctgaatctcataacccacgggtcccccacggctctgccacctgtagtgctcgatggttccttcatcagcttcaggccaagttcgaagtcactatgtagactggagaatgtggcgcgatgtgaagagacgaaaaatggcctatgaatacgcagatgagaggctacgtattaattcactcaggaagaataccattttgccaaaaattcttcaggatgtggctgatgaagaaattgctgccctcccccgggatagctgtcctgttagaatcagaaatcggtgtgttatgacgtcccgtccgcgtggtgtgaagcggcgctggaggcttagtcgtatagtcttccgtcacttagctgaccatgggcaactttctgggatccagcgagcgacatggtaaatgagctccagaacctattgagcttgcagggaagccaagcttgcagttccagcaagcaaagattttttttaatagaccaaaccctaatctctacaggggcccagtacagttgtttggcctacctgatgctatctctaaactacttttaaaatgaagacatttgggtgtttcatgtcagtgaattatcttttctcttggacttaacaaacatactgttcccatacatagtacaaagagtagcataataaatattttctgtgaatgttttttataccctccttttaagtttaatcttttagtaacatataggggtttttgtattaagagcattatttcataaaatgctatcttatacataatccaactaattgacatgtagctcatgtatggcagtttgtaatcctggactagctttgctgacctg

SEQ ID NO: 154590 - DNA, 1006 bp, Homo sapiens
  Payload ID: 10384
  Gene Symbol: MRPS15
  Gene Name: mitochondrial ribosomal protein S15
  Uniprot ID: P82914
  ENST ID: ENST00000373116
  CDS Start-End: 163-936
gtcacgccacctaatccattctctcggtcttcgtctgctccggtattgcaactgcctcgattggtcgatcctgggccagcatggcggcgcccatgtaacccggtccgtgccgcaaagcgaacggcggccgcggcgcgggccccgcgggggttagaggtcaccatgctgagggtcgcgtggaggacgctgagtttgattcggacccgggcagttacccaggtcctagtacccgggctgccgggcggtgggagcgccaagtttcctttcaaccagtggggcctgcagcctcgaagtctcctcctccaggccgcgcgcggatatgtcgtccggaaaccagcccagtctaggctggatgatgacccacctccctctacgctgctcaaagactaccagaatgtccctggaattgagaaggttgatgatgtcgtgaaaagactcttgtctttggaaatggccaacaagaaggagatgctaaaaatcaagcaagaacagtttatgaagaagattgttgcaaacccagaggacaccagatccctggaggctcgaattattgccttgtctgtcaagatccgcagttatgaagaacacttggagaaacatcgaaaggacaaagcccacaaacgctatctgctaatgagcattgaccagaggaaaaagatgctcaaaaacctccgtaacaccaactatgatgtctttgagaagatatgctgggggctgggaattgagtacaccttcccccctctgtattaccgaagagcccaccgccgattcgtgaccaagaaggctctgtgcattcgggttttccaggagactcaaaagctgaagaagcgaagaagagccttaaaggctgcagcagcagcccaaaaacaagcaaagcggaggaacccagacagccctgccaaagccataccaaagacactcaaagacagccaataaattctgttcaatcatttctttctgtcttgaagaatgataggagagatgatggggctctttttggcctgaa

SEQ ID NO: 154591 - DNA, 866 bp, Homo sapiens
  Payload ID: 10385
  Gene Symbol: MRPS16
  Gene Name: mitochondrial ribosomal protein S16
  ENST ID: ENST00000372940
  CDS Start-End: 212-511
attgtgggaagtatagggcggcaagcggaggaggcgtggcgagcggatcatccgcttccggagtcgaggttttcgggcttgtaccgcttggcggtgcggcctggtgtcggcttgcaggttctttctgtgtttgttctctgccctgccaaggccgtagagctggtgcgtgcgggtagcggggctctccgaggagccgcacgccggcggcaccatggtccacctcactactctcctctgcaaggcctaccgtgggggccacttaaccatccgccttgccctgggtggctgcaccaatcggccgttctaccgcattgtggctgctcacaacaagtgtcccagggatggccgtttcgtagagcagctgggctcctatgatccattgcccaacagtcatggagaaaaactcgttgccctcaacctagacaggatccgtcattggattggctgcggggcccacctctctaagcctatggaaaagcttctgggtctcaagtattcccatgtgttttaaaagcctgaagtcagtgagatgaaattcaacatcaagaatttgaagtaacttgtaaggaaaaataatataaagataccattggggcagtggctcacacctgtaatctcagcactttgggaggctgaggtggaaggatcacttgaagccagagtttgagaccagcctgtgcaacacagcaagaccccgtctctacaaaaacttaaaaaattagctggctgtggtgttgctcacccatagttccagctactcgggaagctgaggcagtaagatcacttgagcccaggaggccgatgctgcagtgaactgtgattgttccactacagtccagcctgggtgacagagaaaagaaaaagaa

SEQ ID NO: 154592 - DNA, 2634 bp, Homo sapiens
  Payload ID: 10385
  Gene Symbol: MRPS16
  Gene Name: mitochondrial ribosomal protein S16
  Uniprot ID: Q9Y3D3
  ENST ID: ENST00000372945
  CDS Start-End: 212-625
attgtgggaagtatagggcggcaagcggaggaggcgtggcgagcggatcatccgcttccggagtcgaggttttcgggcttgtaccgcttggcggtgcggcctggtgtcggcttgcaggttctttctgtgtttgttctctgccctgccaaggccgtagagctggtgcgtgcgggtagcggggctctccgaggagccgcacgccggcggcaccatggtccacctcactactctcctctgcaaggcctaccgtgggggccacttaaccatccgccttgccctgggtggctgcaccaatcggccgttctaccgcattgtggctgctcacaacaagtgtcccagggatggccgtttcgtagagcagctgggctcctatgatccattgcccaacagtcatggagaaaaactcgttgccctcaacctagacaggatccgtcattggattggctgcggggcccacctctctaagcctatggaaaagcttctgggtcttgctggctttttccctctgcatcctatgatgatcacaaatgctgagagactgcgaaggaaacgggcacgtgaagtcctgttagcttctcagaaaacagatgcagaagctacagatacagaggctacagaaacataaatgagctgactttagtgagcatagcagtgggaacaaggtcaaggtccttttgaaacactgcagcgatcttaattttgttagatttggagttcaataaatggagtatcctgagttgcccttgctcttctggcctggcctgcacagggcccagggagagatttgttcttgtgtgacttagagctgggtgtgggtactaattagcttttttcgactttgtcttgggatagacagtggctatgggaggattggacttttgagttgggctctgggtctcttggacaactttacaatttactggcttccaagacttcctgcttcaaaacccccagccagactattcatggcccattcagatcttcatgttcatcccacaagtgcaagaacagttaacctttcttaattgatttttgtaattggaggtttatattgtcttgcctaatgcatattctctttttttttttttttttgagacggagtcttgttctgttgccaggctggagtgcggtggtgcaatctcagctcactgcaatctccacctcctgggttcaagaggttctcctgcctcagcctcctgagtagccggggagctacaagcatgcaccaccacacccagctaattttttttttttttttgagaggagtctcgctctgtcgcccaggcttgagtgcagtggcgcgatctcggctcactgcaagctctgtctcctgggttcatgccattctcctgcttcagcctcccgagtagtcccaggagtagctgggactacaggtgcccaccaccacacccagctaatttttttgtatttttagtagagatggggtttcaccatgttatccaggatggttttgatctcctgacctcgtgatccgcccgccttggcctcccaaaagtgctgggattataggcgtgagccaccgcccgggcaaatttttgtatttttagtagagatggggtttcaccgtgttggccaggatggtctcaatctgaccttgtgatctgcccacctcggcctcccaaagtgctaggattactggcgtgagccaccactcctagccttaatgcatattcttaaatatacaaaggtagatttgttatgaaaattgctttggggctctaataacctaccttttaagaatgagaaactgctgggcttaagggagttcagtatgaatcaagattgaaccattcaaatgtggctgtgatttctgcatatatcatagatgggatccttctgagaatactggaatagggaattaggacaccaagccaattcagctgtgaaccttattcttgtacttttctttcttgctggtaattttatggagcaggttaagaaggctgctctgtgttaggataaactgtataccaataatgttgacaacctgtaatgagtgttgcattttacttcttgtatcttttccttcctaccttgatgccagtaatctataagggatctttatagtttgaatgtatttgaataacttcagtatactttagttctacttttttatttgactcacaaccattcttaggtctcaagtattcccatgtgttttaaaagcctgaagtcagtgagatgaaattcaacatcaagaatttgaagtaacttgtaaggaaaaataatataaagataccattggggcagtggctcacacctgtaatctcagcactttgggaggctgaggtggaaggatcacttgaagccagagtttgagaccagcctgtgcaacacagcaagaccccgtctctacaaaaacttaaaaaattagctggctgtggtgttgctcacccatagttccagctactcgggaagctgaggcagtaagatcacttgagcccaggaggccgatgctgcagtgaactgtgattgttccactacagtccagcctgggtgacagagaaaagaaaaagaaaacattacataatttggctagagcataataatttgattttctggtttttgaaaatttgagttgcaataaaaggatatttcagtgtgcgatttcaa

SEQ ID NO: 154593 - DNA, 1845 bp, Homo sapiens
  Payload ID: 10386
  Gene Symbol: MRPS17
  Gene Name: mitochondrial ribosomal protein S17
  Uniprot ID: Q9Y2R5
  ENST ID: ENST00000285298
  CDS Start-End: 130-522
atgcacggcctacgagaggggtagtgtgggactgagccaatgcgtacggcgtgacgccatcccgctgcgaccggcgctccccggggcaggtggctgcatagtcttggcggaggtgaccaaagccacgtaatgtccgtagttcgctcatccgtccatgccagatggattgtggggaaggtgattgggacaaaaatgcaaaagactgctaaagtgagagtgaccaggcttgttctggatccctatttattaaagtattttaataagcggaaaacctactttgctcacgatgcccttcagcagtgcacagttggggatattgtgcttctcagagctttacctgttccacgagcaaagcatgtgaaacatgaactggctgagatcgttttcaaagttggaaaagtcatagatccagtgacaggaaagccctgtgctggaactacctacctggagagtccgttgagttcggaaaccacccagctaagcaaaaatctggaagaactcaatatctcttcagcacagtgaagcgggagtggaagaaggatctaaagggaaaaactgacatgtttatgttatggaaaaagaaatttttctaagtttcatcacaaactgtgtccagtttctctgtggtgtttatgaaatagctaaaagcaaatgaagtaaagggcatactatggtttttcacaaaggtttatggtcgtgtttcaaattttcatcatttcagtgaacatacttccacgttacattaagtgtgcctagcagtctgttgcattttgtaagctcacagttttttgttttgagatggaatctcactctgtcacccaggctggagtgcagtggtgcaatcttggctcactgcaagctccgcctcccgggttcacgccgttctcctgcctcagcctcccgagtagctgggactacaggcgcctgccaccatgcccagctaatttttttttttttttttttggtatttttagtagagacggggtttcaccgtgttagccaggatggtcttgatctcctgacctcgtgatctgcctgccttggcctctcagagtgctgggattacaggcgtgagccactgtgcttagcaagctcactgttttagaaggttttatttttgtcttttgagacagggttttgctttgttgtgggggctggagtgcagtggtatgatcttggctcactgcagccttgacctccctggctctagcatctttccaccccagccttctgagtagctgggaacacaggagcgtaccactacacttggctgattttttgtaaattttgtagagacagggtctccctgtgttgcccaggttggtctcggactcctgggagcaatctgcccatcttggcctaacagtgctgggattacaggcctgagccactgtgcccagccggtttcctttatttcattcaaaggaattttgaatttatcttagaacctttattttgaaggaagaaagtcttttttttttttgagctggagtttcactcttgttgcccaggctggagtgcaatggcatgatctcagcccaccacgacctccgcctcccaggttcaagtgattctgcttcagcctcctgagtagctaggattacaggcatgtgccaccacgcccagctaattttgtatttttagtagggatggggtttctccatgtttgtcaggctagtcttgaactccggacctcaggtgatccgcccgcctgggcctctcaaagtgcttggattacaggcatgagccactgcatgtaatgaccagccactggtcagaattctttcaatcaagctgtgttaataagaatattgatgtgtggaaaataaaattttacaattctgt

SEQ ID NO: 154594 - DNA, 718 bp, Homo sapiens
  Payload ID: 10386
  Gene Symbol: MRPS17
  Gene Name: mitochondrial ribosomal protein S17
  ENST ID: ENST00000443449
  CDS Start-End: 332-718
cggggtattgctgccgggggaggatttgctggggacccaaggcaccctcgcgtgagagccctgagagcgaatcgcttcgtctgacctcggggttgtctggggcgagggcacgaatcaccccaacctttccgaagcctggtggaatggcttgtgaactgatctcaaaagcagcccaagtcatccgtcgctgggccggggagggggacaccgcggcggccccgccgagtgctacctgggcactgagcctgtggggagaggcgacccagcggggtggagagagataagggaccagtaacgtccagcgtttgtccgtggtgaccaaagccacgtaatgtccgtagttcgctcatccgtccatgccagatggattgtggggaaggtgattgggacaaaaatgcaaaagactgctaaagtgagagtgaccaggcttgttctggatccctatttattaaagtattttaataagcggaaaacctactttgctcacgatgcccttcagcagtgcacagttggggatattgtgcttctcagagctttacctgttccacgagcaaagcatgtgaaacatgaactggctgagatcgttttcaaagttggaaaagtcatagatccagtgacaggaaagccctgtgctggaactacctacctggagagtccgttgagttcggaaaccacccagctaagcaaaaatctggaagaactcaatatctcttcagca

SEQ ID NO: 154595 - DNA, 785 bp, Homo sapiens
  Payload ID: 10387
  Gene Symbol: MRPS18A
  Gene Name: mitochondrial ribosomal protein S18A
  Uniprot ID: Q9NVS2
  ENST ID: ENST00000372116
  CDS Start-End: 13-396
aggtttttgaagatggcggccctcaaggctctggtgtccggctgtgggcggcttctccgtgggctactagcgggcccggcagcgaccagctggtctcggcttccagctcgcgggttcagggaagtggtggagacccaagaagggaagacaactataattgaaggccgtatcacagcgactcccaaggagagtccaaatcctcctaacccctctggccagtgccccatctgccgttggaacctgaagcacaagtataactatgacgatgttctgctgcttagccagttcatccggcctcatggaggcatgctgccccgaaagatcacaggcctatgccaggaagaacaccgcaagatcgaggagtgtgtgaagatggcccaccgagcaggtacctgacgcgctgggctcctggctccgtcaagcccatctacaaaaaaggcccccgctggaacagggtgcgcatgcccgtggggtcaccccttctgagggacaatgtctgctactcaagaacaccttggaagctgtatcactgacagagagcagtgcttccagagttcctcctgcacctgtgctggggagtaggaggcccactcacaagcccttggccacaactatactcctgtcccaccccaccacgatggcctggtccctccaacatgcatggacaggggacagtgggactaacttcagtacccttggcctgcacagtagcaatgctgggagctagaggcaggcagggcagttgggtcccttgccagctgctatggggcttaggccatgctcag

SEQ ID NO: 154596 - DNA, 1062 bp, Homo sapiens
  Payload ID: 10387
  Gene Symbol: MRPS18A
  Gene Name: mitochondrial ribosomal protein S18A
  Uniprot ID: Q9NVS2
  ENST ID: ENST00000372133
  CDS Start-End: 13-603
aggtttttgaagatggcggccctcaaggctctggtgtccggctgtgggcggcttctccgtgggctactagcgggcccggcagcgaccagctggtctcggcttccagctcgcgggttcagggaagtggtggagacccaagaagggaagacaactataattgaaggccgtatcacagcgactcccaaggagagtccaaatcctcctaacccctctggccagtgccccatctgccgttggaacctgaagcacaagtataactatgacgatgttctgctgcttagccagttcatccggcctcatggaggcatgctgccccgaaagatcacaggcctatgccaggaagaacaccgcaagatcgaggagtgtgtgaagatggcccaccgagcaggtctattaccaaatcacaggcctcggcttcctgaaggagttgttccgaagagcaaaccccaactcaaccggtacctgacgcgctgggctcctggctccgtcaagcccatctacaaaaaaggcccccgctggaacagggtgcgcatgcccgtggggtcaccccttctgagggacaatgtctgctactcaagaacaccttggaagctgtatcactgacagagagcagtgcttccagagttcctcctgcacctgtgctggggagtaggaggcccactcacaagcccttggccacaactatactcctgtcccaccccaccacgatggcctggtccctccaacatgcatggacaggggacagtgggactaacttcagtacccttggcctgcacagtagcaatgctgggagctagaggcaggcagggcagttgggtcccttgccagctgctatggggcttaggccatgctcagtgctggggacaggagttttgcccaacgcagtgtcataaactgggttcatgggcttacccattgggtgtgcgctcactgcttgggaagtgcagggggtcctgggcacattgccagctgggtgctgagcattgagtcactgatctcttgtgatggggccaatgagtcaattgaattcatgggccaaacaggtcccatcctcttcatgac

SEQ ID NO: 154597 - DNA, 803 bp, Homo sapiens
  Payload ID: 10387
  Gene Symbol: MRPS18A
  Gene Name: mitochondrial ribosomal protein S18A
  ENST ID: ENST00000427312
  CDS Start-End: 13-803
aggtttttgaagatggcggccctcaaggctctggtgtccggctgtgggcggcttctccgtgggctactagcgggcccggcagcgaccagctggtctcggcttccagctcgcgggttcagggaagtggtggagacccaagaagggaagacaactataattgaaggccgtatcacagcgactcccaaggagagtccaaatcctcctaacccctctggccagtgccccatctgccgttggaacctgaagcacaagtataactatgacgatgttctgctgcttagccagttcatccggcctcatggaggcatgctgccccgaaagatcacaggcctatgccaggaagaacaccgcaagatcgaggagtgtgtgaagatggcccaccgagcaggtagaaggccctggggaccaagaggggcagagggctgcaggcactctctccccacccagctgccccatgtttcagcccctcctggaagaaaagtggatatccggagtgttaattatactcaccacccaatgccaaccttcccgctcccttgggctttccctctggccccctcagagctgcagagggagctgcaaagactatcccctcttccccgccactcaggtctattaccaaatcacaggcctcggcttcctgaaggagttgttccgaagagcaaaccccaactcaaccggtacctgacgcgctgggctcctggctccgtcaagcccatctacaaaaaaggcccccgctggaacagggtgcgcatgcccgtggggtcaccccttctgagggacaatgtctgctactcaagaac

SEQ ID NO: 154598 - DNA, 1532 bp, Homo sapiens
  Payload ID: 10388
  Gene Symbol: MRPS18B
  Gene Name: mitochondrial ribosomal protein S18B
  Uniprot ID: Q9Y676
  ENST ID: ENST00000259873
  CDS Start-End: 158-934
agcttctcccccatgccttccctttcacgcttccgtcctgacgcaaacgtggggccgccttccgcactgcgggcttgtccttggccctgccctactcagtttcctgaagcatgcgcagttgcctttccgtcaattcctgtcctgggcgtacgtcaagatggcggcgtctgtattaaacaccgtgctgaggcggcttcctatgctatctctcttccgaggttctcacagagttcaggttcccctccagactctttgcaccaaagctccctctgaggaagattctttgtcctcagttcccatttctccttataaggatgagccctggaaatatctggaatcagaagaataccaggagcgatatggttctcgccccgtctgggctgactaccgccgcaaccacaagggtggtgtacccccacagcggactcggaagacatgtattcgtcggaataaagttgttgggaatccctgccccatctgtcgagatcacaagttgcatgttgactttaggaacgtgaagctcttggagcaatttgtctgcgcccacacgggtatcatcttctatgctccatacacaggagtctgtgtgaagcagcacaagcggttgacccaggccatccagaaagccagggatcatggtctcctcatttaccacatcccccaggttgaaccacgggaccttgacttcagtacctctcatggggctgtgagtgctactccgccagcccccaccctggtctcaggtgacccctggtacccatggtacaactggaaacagccaccggagagagaactgtctcgccttcgccggctttaccagggtcatctccaagaagagagtggccccccacctgagtcaatgcccaagatgccccctagaacaccagcggaagcctcctccactgggcagacaggccctcagagtgctctgtaggagctgtagactgggaagagaggccaggcgtggtggctcactcctgtaatcccagcactttgggaagccaaggtgggctgatcacttgatcccaggagtttgagaccagcctgggcaccatggtgaaacctcgtctttaccaaaaaatacaaaaattagctgggtgtggtggtgcacacctgtagtctcaactattggggaggctaaggtaggatcacttgatcccaggaggcggaggttgcagtgagttgcagtcacacccctgcactccagcctgggtgacagctagaccctgtctcaaaaaaaaaaaaaaagactgggaagagagctagagggactaggagataatgtgtatgtaggtttatgtgatgggatatcaccctgaagagttgtgtcttttgtggccagtgacaaatccaggaaatgaatgttgctgatagggataaatcttgaggctgagggcgggtggtacagatgtgtatgggaaaccccaacccctatatattgtaaatagatgggctgggctaaacattgttgccgtttcatacttctaccaactcagcttttacacaataaagctctactgtctctggtttgc

SEQ ID NO: 154599 - DNA, 1252 bp, Homo sapiens
  Payload ID: 10388
  Gene Symbol: MRPS18B
  Gene Name: mitochondrial ribosomal protein S18B
  ENST ID: ENST00000400594
  CDS Start-End: 7-654
gtcaagatggcggcgtctgtattaaacaccgtgctgaggcggcttcctatgctatctctcttccgaggttctcacagagttcaggttcccctccagactctttgcaccaaagctccctctgaggaagattctttgtcctcagttcccatttctccttataaggatgagccctggaaatatctggaatcagaagaataccaggagcgatatggttctcgccccgtctgggctgactaccgccgcaaccacaagggtggtgtacccccacagcggactcggaagacatgtattaacgtgaagctcttggagcaatttgtctgcgcccacacgggtatcatcttctatgctccatacacaggtctcctcatttaccacatcccccaggttgaaccacgggaccttgacttcagtacctctcatggggctgtgagtgctactccgccagcccccaccctggtctcaggtgacccctggtacccatggtacaactggaaacagccaccggagagagaactgtctcgccttcgccggctttaccagggtcatctccaagaagagagtggccccccacctgagtcaatgcccaagatgccccctagaacaccagcggaagcctcctccactgggcagacaggccctcagagtgctctgtaggagctgtagactgggaagagaggccaggcgtggtggctcactcctgtaatcccagcactttgggaagccaaggtgggctgatcacttgatcccaggagtttgagaccagcctgggcaccatggtgaaacctcgtctttaccaaaaaatacaaaaattagctgggtgtggtggtgcacacctgtagtctcaactattggggaggctaaggtaggatcacttgatcccaggaggcggaggttgcagtgagttgcagtcacacccctgcactccagcctgggtgacagctagaccctgtctcaaaaaaaaaaaaaaagactgggaagagagctagagggactaggagataatgtgtatgtaggtttatgtgatgggatatcaccctgaagagttgtgtcttttgtggccagtgacaaatccaggaaatgaatgttgctgatagggataaatcttgaggctgagggcgggtggtacagatgtgtatgggaaaccccaacccctatatattgtaaatagatgggctgggctaaacattgttgccgtttcatacttctaccaactcagcttttacacaataaagctctactgtctctggtttgc

SEQ ID NO: 154600 - DNA, 1532 bp, Homo sapiens; identical to SEQ ID NO: 154598
  Payload ID: 10388
  Gene Symbol: MRPS18B
  Gene Name: mitochondrial ribosomal protein S18B
  Uniprot ID: Q9Y676
  ENST ID: ENST00000327800
  CDS Start-End: 158-934

SEQ ID NO: 154601 - DNA, 1252 bp, Homo sapiens; identical to SEQ ID NO: 154599
  Payload ID: 10388
  Gene Symbol: MRPS18B
  Gene Name: mitochondrial ribosomal protein S18B
  ENST ID: ENST00000440992
  CDS Start-End: 7-654

SEQ ID NO: 154602 - DNA, 1252 bp, Homo sapiens; identical to SEQ ID NO: 154599
  Payload ID: 10388
  Gene Symbol: MRPS18B
  Gene Name: mitochondrial ribosomal protein S18B
  ENST ID: ENST00000437247
  CDS Start-End: 7-654

SEQ ID NO: 154603 - DNA, 1252 bp, Homo sapiens; identical to SEQ ID NO: 154599
  Payload ID: 10388
  Gene Symbol: MRPS18B
  Gene Name: mitochondrial ribosomal protein S18B
  ENST ID: ENST00000428224
  CDS Start-End: 7-654

SEQ ID NO: 154604 - DNA, 1532 bp, Homo sapiens; identical to SEQ ID NO: 154598
  Payload ID: 10388
  Gene Symbol: MRPS18B
  Gene Name: mitochondrial ribosomal protein S18B
  Uniprot ID: Q9Y676
  ENST ID: ENST00000426945
  CDS Start-End: 158-934

SEQ ID NO: 154605 - DNA, 1532 bp, Homo sapiens; identical to SEQ ID NO: 154598
  Payload ID: 10388
  Gene Symbol: MRPS18B
  Gene Name: mitochondrial ribosomal protein S18B
  Uniprot ID: Q9Y676
  ENST ID: ENST00000430402
  CDS Start-End: 158-934

SEQ ID NO: 154606 - DNA, 1252 bp, Homo sapiens; identical to SEQ ID NO: 154599
  Payload ID: 10388
  Gene Symbol: MRPS18B
  Gene Name: mitochondrial ribosomal protein S18B
  ENST ID: ENST00000412843
  CDS Start-End: 7-654

SEQ ID NO: 154607 - DNA, 1252 bp, Homo sapiens; identical to SEQ ID NO: 154599
  Payload ID: 10388
  Gene Symbol: MRPS18B
  Gene Name: mitochondrial ribosomal protein S18B
  ENST ID: ENST00000418070
  CDS Start-End: 7-654

SEQ ID NO: 154608 - DNA, 1532 bp, Homo sapiens; identical to SEQ ID NO: 154598
  Payload ID: 10388
  Gene Symbol: MRPS18B
  Gene Name: mitochondrial ribosomal protein S18B
  Uniprot ID: Q9Y676
  ENST ID: ENST00000412451
  CDS Start-End: 158-934

SEQ ID NO: 154609 - DNA, 1532 bp, Homo sapiens; identical to SEQ ID NO: 154598
  Payload ID: 10388
  Gene Symbol: MRPS18B
  Gene Name: mitochondrial ribosomal protein S18B
  Uniprot ID: Q9Y676
  ENST ID: ENST00000454427
  CDS Start-End: 158-934

SEQ ID NO: 154610 - DNA, 1532 bp, Homo sapiens; identical to SEQ ID NO: 154598
  Payload ID: 10388
  Gene Symbol: MRPS18B
  Gene Name: mitochondrial ribosomal protein S18B
  Uniprot ID: Q9Y676
  ENST ID: ENST00000451032
  CDS Start-End: 158-934

SEQ ID NO: 154611 - DNA, 1643 bp, Homo sapiens
  Payload ID: 10389
  Gene Symbol: MRPS18C
  Gene Name: mitochondrial ribosomal protein S18C
  Uniprot ID: Q9Y3D5
  ENST ID: ENST00000295491
  CDS Start-End: 114-542
agcgttctcctgcggaacctttgaacggggtactcgagcccacaggggaagagcagcggaaggggcctttcggaacgatttggaacgaaaggaagtggaagaaacgcggaaccatggccgctgtggttgctgtttgcggtggtctagggaggaagaagttgacacacttggtaacggctgctgtcagccttacacatcccgggactcacacggtgctttggagaagaggttgttcacaacaggtatccagcaatgaggacctgcccatttcaatggaaaatccttataaagaacctcttaagaaatgtatcttgtgtggaaagcatgtagattataagaatgtacagcttttgtcccagtttgtttctccatttactggatgcatttatggaaggcacattacaggtctttgtgggaagaaacagaaagaaatcacaaaagcaattaagagagctcaaataatggggtttatgccagttacatacaaggatcctgcatatctcaaggaccctaaagtttgtaacatcagatatcgggaataaattctatcacgttaccactaataaacttattttacagtaagtggttgtatgatgccaatactgactcaaaccaacctttggatagaaaagtgtttgaggagtgaggtaaagaatgacacttccccttcataccaatgtccattaagcagattgcttatttaaaatgttaacactcatcacattttatctatgttgaataaaagtggttctgtgtgattgtcatttatatctgatccccaaatagctcatacaataatccattcaatagaatggaattaaaactgttcagaatgattttccaactagcaaatataagtatgcctggttaagatatcttccctttgtagaaatgttacattgggatggatagtggtgctgtcacagaaggacaaaatattcctagacgagtctaccctcaaaccagtagtgtcttttacatgaagagatgatttacacctaatagacattgaatatgatagacatacatgtatatatgtatcagttctgagttccactggcctatcccaaatacactggattaccaggcttgtactgtattcaaaatgatagatttgctaaatttcatgcaaaggactctaaactaggggagagattactgtttgtgttgtgttatagttgtgtaataattaaggctgccagatttagcaagtacaaatgtaggacaaatttaaattttagatgatgttttgcaaatttattgcatgatatccagcattttatctggcaactctagccataatgtacttctaaaaaagtatcacttaaggagaattttaatgactcagataaattttcatataaatttctttccatattttgaaaataaggctattcttgcttttccattttattttttaatagacatggtctcaatacgttgcccaggctggtctctaactcctaacttcaatcaatcctcctgacttgtcttccctaagtgctgggattacaggtgtgagccactgtgcctggtctcacttttccaattctaaagaatgtgtctgtgtaagccttcccctcaacaacttagtgaaaggtgaaaaaaaggtttggaaataaaagcatctgatgtttgaaaaa

SEQ ID NO: 154612 - DNA, 490 bp, Homo sapiens
  Payload ID: 10389
  Gene Symbol: MRPS18C
  Gene Name: mitochondrial ribosomal protein S18C
  ENST ID: ENST00000505719
  CDS Start-End: 1-279
gttgctgtttgcggtggtctagggaggaagaagttgacacacttggtaacggctgctgtcagccttacacatcccgggactcacacggtgctttggagaagaggttgttcacaacaggtatccagcaatgaggacctgcccatttcaatggaaaatccttataaagaacctcttaagaaatgtatcttgtgtggaaagcatgtagattataagaatgtacaggtctttgtgggaagaaacagaaagaaatcacaaaagcaattaagagagctcaaataatggggtttatgccagttacatacaaggatcctgcatatctcaaggaccctaaagtttgtaacatcagatatcgggaataaattctatcacgttaccactaataaacttattttacagtaagtggttgtatgatgccaatactgactcaaaccaacctttggatagaaaagtgtttgaggagtgaggtaaagaatgacacttccccttcata

SEQ ID NO: 154613 - DNA, 350 bp, Homo sapiens
  Payload ID: 10389
  Gene Symbol: MRPS18C
  Gene Name: mitochondrial ribosomal protein S18C
  ENST ID: ENST00000507349
  CDS Start-End: 24-230
ggaagtggaagaaacgcggaaccatggccgctgtggttgctgtttgcggtggtctagggaggaagaagttgacacacttggtaacggctgctgtcagccttacacatcccgggactcacacggtgctttggagaagaggttgttcacaacaggtatccagcaatgaggacctggtctttgtgggaagaaacagaaagaaatcacaaaagcaattaagagagctcaaataatggggtttatgccagttacatacaaggatcctgcatatctcaaggaccctaaagtttgtaacatcagatatcgggaataaattctatcacgttaccactaataaacttattttacagtaa

SEQ ID NO: 154614 - DNA, 855 bp, Homo sapiens
  Payload ID: 10389
  Gene Symbol: MRPS18C
  Gene Name: mitochondrial ribosomal protein S18C
  ENST ID: ENST00000509970
  CDS Start-End: 1-340
cgctgtggttgctgtttgcggtggtctagggaggaagaagttgacacacttggtaacggctgctgtcagccttacacatcccgggactcacacggtgctttggagaagaggttgttcacaacaggtatccagcaatgaggacctgcttttgtcccagtttgtttctccatttactggatgcatttatggaaggcacattacaggtctttgtgggaagaaacagaaagaaatcacaaaagcaattaagagagctcaaataatggggtttatgccagttacatacaaggatcctgcatatctcaaggaccctaaagtttgtaacatcagatatcgggaataaattctatcacgttaccactaataaacttattttacactgaagaaatacaactcagtcaatgaagctaaaggaataatgacatctcgttcaacaagggacagcatctatgatggggtctcacaagattatattggagcacatatagaaagctgatatatagcacttgatattggcattacagatcaaataggggaaatgactgatattcaataataatttggggacatttggttttccctatgaaaactaaaaagtaaaaatacatataggtttgtgtaagtatatgtttgcacaatgataaaactgcctaatgacacatttctcagaaggtacatagccttcattaagcaactcataactgtataaatctaatcaagatgtcaggttatcctaaaaaatgtcagtcattaacttgatatgaactctatctagaagtggttgacgtgtttgatatgttaacttacctttaattcctcttgtaatgaagcatacatttcatttatcttatgtacctc

SEQ ID NO: 154615 - DNA, 666 bp, Homo sapiens
  Payload ID: 10389
  Gene Symbol: MRPS18C
  Gene Name: mitochondrial ribosomal protein S18C
  ENST ID: ENST00000507019
  CDS Start-End: 96-440
ctttgaacggggtactcgagcccacaggggaagagcagcggaaggggcctttcggaacgatttggaacgaaaggaagtggaagaaacgcggaaccatggccgctgtggttgctgtttgcggtggtctagggaggaagaagttgacacacttggtaacggctgctgtcagccttacacatcccgggactcacacggtgctttggagaagaggttgttcacaacaggtatccagcaatgaggacctgcttttgtcccagtttgtttctccatttactggatgcatttatggaaggcacattacaggtctttgtgggaagaaacagaaagaaatcacaaaagcaattaagagagctcaaataatggggtttatgccagttacatacaaggatcctgcatatctcaaggaccctaaagtttgtaacatcagatatcgggaataaattctatcacgttaccactaataaacttattttacagtaagtggttgtatgatgccaatactgactcaaaccaacctttggatagaaaagtgtttgaggagtgaggtaaagaatgacacttccccttcataccaatgtccattaagcagattgcttatttaaaatgttaacactcatcacattttatctatgttgaataaaagtggttctgtgtgattgtcattta

SEQ ID NO: 154616 - DNA, 1510 bp, Homo sapiens
  Payload ID: 10390
  Gene Symbol: MRPS2
  Gene Name: mitochondrial ribosomal protein S2
  Uniprot ID: Q9Y399
  ENST ID: ENST00000241600
  CDS Start-End: 81-971
gccccgcgcggatggcgacggaaggggaggccgctcggcctggcctggagggagacctcgctctgccccgcgtcccagccatggcgacatcctcggccgcgctgccccgaatactcggcgcgggtgcccgggccccgtcgcgctggttgggctttctcgggaaggcgaccccccggcctgctcggccgagccgcaggacgcttggaagcgcgacggcccttatgatccgcgagtcggaggacagcaccgatttcaacgacaagattttgaatgagcccctcaagcactctgacttcttcaatgtcaaggaactgttttccgtgagaagcctcttcgatgcccgagtccatctgggacacaaagctggctgtcggcacaggtttatggagccgtacatctttgggagccgcctggaccacgacatcatcgacctggaacagacagccacgcacctccagctggccttgaacttcaccgcccacatggcctaccgcaagggcatcatcttgtttataagccgcaaccggcagttctcgtacctgattgagaacatggcccgtgactgtggcgagtacgcccacactcgctacttcaggggcggcatgctgaccaacgcgcgcctcctctttggccccacggtccgcctgccggacctcatcatcttcctgcacacgctcaacaacatctttgagccacacgtggccgtgagagacgcagccaagatgaacatccccacagtgggcatcgtggacaccaactgcaacccctgcctcatcacctaccctgtacccggcaatgacgactctccgctggctgtgcacctctactgcaggctcttccagacggccatcacccgggccaaggagaagcggcagcaggttgaggctctctatcgcctgcagggccagaaggagcccggggaccaggggccagcccaccctcctggggctgacatgagccattccctgtgatgttcactctcctcccaaagcaaaccacagccaagcctgtctgagctgggagtccccttccccagccctgggtcagcggcatcctcagtcgttgttacttactcagctgatgtcacagtgcagacatccaccgttccaccacagaaccagtggctgagcggaccaacgttgccatgtgcgtttgctctgtggggaacagagcacagagggtgagcgacatgtgcagaacggccccttggctgcagttaggacctcagtggctggtatggccaagctgctagaagatgctgctgtccctgtgatcccagcagccctcccttcaccgtgacccctgacctttgtcaggaaggtgcagtttttcttctcaatctaaatgcctttcaggtgggccgcttccttggctacctggttccagggggctgttttgtaatgagatgctgctggcaggccactcagaggctcccagctgggttggtgggacagccaggccagatgacctgattccagcaaaaataaaactcagatttgggcaaaatgag

SEQ ID NO: 154617 - DNA, 1640 bp, Homo sapiens
  Payload ID: 10390
  Gene Symbol: MRPS2
  Gene Name: mitochondrial ribosomal protein S2
  Uniprot ID: Q9Y399
  ENST ID: ENST00000371785
  CDS Start-End: 210-1100
aacctgccgggcgactccccaagggccgggaaggtcgggacggcgagagattccctgctgggaccgtcggaggtcccagccgcctggggacagcgctgtggctcctccgggcctgtaggcggcactgcggccccgcgcggatggcgacggaaggggaggccgctcggcctggcctggagggagacctcgctctgccccgcgtcccagccatggcgacatcctcggccgcgctgccccgaatactcggcgcgggtgcccgggccccgtcgcgctggttgggctttctcgggaaggcgaccccccggcctgctcggccgagccgcaggacgcttggaagcgcgacggcccttatgatccgcgagtcggaggacagcaccgatttcaacgacaagattttgaatgagcccctcaagcactctgacttcttcaatgtcaaggaactgttttccgtgagaagcctcttcgatgcccgagtccatctgggacacaaagctggctgtcggcacaggtttatggagccgtacatctttgggagccgcctggaccacgacatcatcgacctggaacagacagccacgcacctccagctggccttgaacttcaccgcccacatggcctaccgcaagggcatcatcttgtttataagccgcaaccggcagttctcgtacctgattgagaacatggcccgtgactgtggcgagtacgcccacactcgctacttcaggggcggcatgctgaccaacgcgcgcctcctctttggccccacggtccgcctgccggacctcatcatcttcctgcacacgctcaacaacatctttgagccacacgtggccgtgagagacgcagccaagatgaacatccccacagtgggcatcgtggacaccaactgcaacccctgcctcatcacctaccctgtacccggcaatgacgactctccgctggctgtgcacctctactgcaggctcttccagacggccatcacccgggccaaggagaagcggcagcaggttgaggctctctatcgcctgcagggccagaaggagcccggggaccaggggccagcccaccctcctggggctgacatgagccattccctgtgatgttcactctcctcccaaagcaaaccacagccaagcctgtctgagctgggagtccccttccccagccctgggtcagcggcatcctcagtcgttgttacttactcagctgatgtcacagtgcagacatccaccgttccaccacagaaccagtggctgagcggaccaacgttgccatgtgcgtttgctctgtggggaacagagcacagagggtgagcgacatgtgcagaacggccccttggctgcagttaggacctcagtggctggtatggccaagctgctagaagatgctgctgtccctgtgatcccagcagccctcccttcaccgtgacccctgacctttgtcaggaaggtgcagtttttcttctcaatctaaatgcctttcaggtgggccgcttccttggctacctggttccagggggctgttttgtaatgagatgctgctggcaggccactcagaggctcccagctgggttggtgggacagccaggccagatgacctgattccagcaaaaataaaactcagatttgggcaaaatgaga

SEQ ID NO: 154618 - DNA, 810 bp, Homo sapiens
  Payload ID: 10390
  Gene Symbol: MRPS2
  Gene Name: mitochondrial ribosomal protein S2
  ENST ID: ENST00000453385
  CDS Start-End: 1-810
cggaggggcccgttggggatgcggtggggagcgggcgtggtgcattcgggactcggcgccaggacctctatctacttccccccaggtgcccgggccccgtcgcgctggttgggctttctcgggaaggcgaccccccggcctgctcggccgagccgcaggacgcttggaagcgcgacggcccttatgatccgcgagtcggaggacagcaccgatttcaacgacaagattttgaatgagcccctcaagcactctgacttcttcaatgtcaaggaactgttttccgtgagaagcctcttcgatgcccgagtccatctgggacacaaagctggctgtcggcacaggtttatggagccgtacatctttgggagccgcctggaccacgacatcatcgacctggaacagacagccacgcacctccagctggccttgaacttcaccgcccacatggcctaccgcaagggcatcatcttgtttataagccgcaaccggcagttctcgtacctgattgagaacatggcccgtgactgtggcgagtacgcccacactcgctacttcaggggcggcatgctgaccaacgcgcgcctcctctttggccccacggtccgcctgccggacctcatcatcttcctgcacacgctcaacaacatctttgagccacacgtggccgtgagagacgcagccaagatgaacatccccacagtgggcatcgtggacaccaactgcaacccctgcctcatcacctaccctgtacccggcaatgacgactctccgctggctgtgcacctctactgcaggctcttccagacggcc

SEQ ID NO: 154619 - DNA, 1462 bp, Homo sapiens
  Payload ID: 10391
  Gene Symbol: MRPS21
  Gene Name: mitochondrial ribosomal protein S21
  ENST ID: ENST00000581066
  CDS Start-End: 448-711
ggggaaaggaaggctggcttggcgagagggcaggtttgcgggctttcgcccccttttccaaagaccaacaaagagtccttccccaactcccaactcaaccccttttggaactatgtgtggtggttgggaccctgtggcgcatccttgtcgctcgtgtccttctcatgcccggcgacgcgtctttgtggtaacgccctgctgccatctcttttcttctctatgcgaggatttggactggcagtgagaataagagacaacgattcacgtctactttctaggatgacttccatgtgctccatctcgcgcgtccctgagcatgttgaatttccaaatcctaaataagccgcgcggtgtagtttgtattatgttgcgtttctctttctgctttcctcgccctttctccatcatcctttaggctctacagagtgaaggtttaaatccaaggtcatggcaaaacatctgaagttcatcgccaggactgtgatggtacaggaagggaacgtggaaagcgcatacaggaccctaaacagaatcctcactatggatgggctcattgaggacattaagcatcggcggtattatgagaagccatgctgccggcgacagagggaaagctatgaaaggtgccggcggatctacaacatggaaatggctcgcaagatcaacttcttgatgcgaaagaatcgggcagatccgtggcagggctgctgaggcctgtgggtgggacacccagtgcgaaaccctcatccagttttctctccatctcttttctttgtacaatcccatttcctattaccattctctgcaataaactcaaatcacatgtctgcaagaaggcctccaaatatagaaacaatcccattagtcagcagtggaccctgtcttttattaagtgaaagaagaaactgagtctgaaagtactctaggagtagaatggtatttgccagggactggaggagggggcagtgaggagttattgtttaatgggtacagagtttcagtttgggcagatgaaaaagttcaggagacgatggcctggcatggtggctcacgcctgttatcccaacactttgggaggctgaggcgggcggctcacttgaggccaggagtttgagaccagcttggccaatgtggtgaaaccccatctctactaaaaatacaaaaaaaaattggccgggcgtggtggtgcacgcctgtaatcccagatacttgggtggctgaggcaggagaattgcttgaactggggaggaagaggttgcagtgagccaagatcatgccactgcactccaacctgggcgacagagtgagactccatctcaaaacaaaaaaacggagatggatgatgaatggtgatggcggttgctcaaaaagttgaatgtacttaatgccactgaactatacccttaaatggtcacgatggtaaattttgtgttttactacaataaaaacttttttgaaagtc

SEQ ID NO: 154620 - DNA, 1226 bp, Homo sapiens
  Payload ID: 10391
  Gene Symbol: MRPS21
  Gene Name: mitochondrial ribosomal protein S21
  ENST ID: ENST00000614145
  CDS Start-End: 212-475
aggtgtagagtccaggcccggggaagagaggcagtcaacagaggccagaaaggacgttgctatggtttccacgcacgttgtctccctcggcctgtttctttgcgcggcgctggcgattccgtaatttccgcttccggtagtgagaacccttccggtgggctaggtactgagcgcgcgaggctctacagagtgaaggtttaaatccaaggtcatggcaaaacatctgaagttcatcgccaggactgtgatggtacaggaagggaacgtggaaagcgcatacaggaccctaaacagaatcctcactatggatgggctcattgaggacattaagcatcggcggtattatgagaagccatgctgccggcgacagagggaaagctatgaaaggtgccggcggatctacaacatggaaatggctcgcaagatcaacttcttgatgcgaaagaatcgggcagatccgtggcagggctgctgaggcctgtgggtgggacacccagtgcgaaaccctcatccagttttctctccatctcttttctttgtacaatcccatttcctattaccattctctgcaataaactcaaatcacatgtctgcaagaaggcctccaaatatagaaacaatcccattagtcagcagtggaccctgtcttttattaagtgaaagaagaaactgagtctgaaagtactctaggagtagaatggtatttgccagggactggaggagggggcagtgaggagttattgtttaatgggtacagagtttcagtttgggcagatgaaaaagttcaggagacgatggcctggcatggtggctcacgcctgttatcccaacactttgggaggctgaggcgggcggctcacttgaggccaggagtttgagaccagcttggccaatgtggtgaaaccccatctctactaaaaatacaaaaaaaaattggccgggcgtggtggtgcacgcctgtaatcccagatacttgggtggctgaggcaggagaattgcttgaactggggaggaagaggttgcagtgagccaagatcatgccactgcactccaacctgggcgacagagtgagactccatctcaaaacaaaaaaacggagatggatgatgaatggtgatggcggttgctcaaaaagttgaatgtacttaatgccactgaactatacccttaaatggtcacgatggtaaattttgtgttttactacaataaaaacttttttgaaagtc

SEQ ID NO: 154621 - DNA, 1120 bp, Homo sapiens
  Payload ID: 10392
  Gene Symbol: MRPS22
  Gene Name: mitochondrial ribosomal protein S22
  Uniprot ID: P82650
  ENST ID: ENST00000310776
  CDS Start-End: 9-1091
tgataatcatggcgcccctcggaacaactgtattgctgtggagcctcttgaggagttctccgggcgtggaacgggtctgtttccgggctcgaatccagccctggcacggtggcctgctccaaccgctaccttgctctttcgagatggggctgccacgccgccggttcagctccgaggccgcagaatctggtagcccagagaccaagaaacctacatttatggatgaggaagttcaaagcatactcacgaaaatgacaggcttgaacttgcagaagacttttaagccagctatacaagaactgaagccaccaacctataagctaatgactcaggcacagttggaagaggctacaagacaggcagttgaggcagctaaagtacgattaaaaatgccaccagttctggaagagcgagtaccaataaatgatgtgttagctgaagataagattttggaaggaacagaaacaaccaaatatgtgtttactgatatatcatatagcataccacaccgggagcgttttattgtcgtcagagaaccaagtggcacactacgcaaagcctcttgggaagaacgggaccgaatgatacaagtttatttcccaaaagaaggtcgtaaaattttgacaccaataattttcaaggaagaaaatcttaggactatgtatagccaggacaggcatgttgatgtcctcaatctctgctttgcccagtttgagccagattccacagagtatatcaaggttcatcacaagacctatgaagatatagataaacgtggaaaatatgaccttttacgttcaacaagatactttggtggaatggtgtggtattttgtaaataataaaaagattgatggtttgctgattgaccagattcagagagatttaatcgatgatgcaaccaacttggtccagctgtatcacgtgctccatccagatggccagtcggctcaaggggccaaggatcaggctgctgagggaataaatttaatcaaggtctttgcaaaaacagaagcacagaagggagcctatatagaactaacactgcagacttatcaagaagcactcagtcgccattctgcagcttcctaaaaatattttaaaaatacatttattttact

SEQ ID NO: 154622 - DNA, 532 bp, Homo sapiens
  Payload ID: 10392
  Gene Symbol: MRPS22
  Gene Name: mitochondrial ribosomal protein S22
  ENST ID: ENST00000495225
  CDS Start-End: 378-532
gccacgaagcttccttttgagaagctgcttgtgttctgggcccccacccatgcagcgaatgaatgagcgttgaagttgagtttggacgtggttgcttcagtatccagcggtccttccctagcaacacaggccatttaggagcaccacctaaggcttcttccccttcctacagatggattgctgagttgatgagaggaggaactctgggacctgtgcctctgggaaagcagaatctttcagaagactggaagagaaaatctgaaggcagcaaatctcaggtgctagaacataaagtgaggactgagaagctggaaaagagagatggctgatgctgagtgctcagaggtggcttctggaagaaaaagacttgagctgagatggttcaaacaggcaggagtgaaggcattccaggctgggagcagagtatgagcaaaggcagggagattcctggcagtgactcagaatctggtagcccagagaccaagaaacctacatttatggatgaggaagttcaaagcatactcacgaaaat

SEQ ID NO: 154623 - DNA, 1547 bp, Homo sapiens
  Payload ID: 10392
  Gene Symbol: MRPS22
  Gene Name: mitochondrial ribosomal protein S22
  Uniprot ID: P82650
  ENST ID: ENST00000495075
  CDS Start-End: 433-1515
cctcttcctgggcggcgatctctgggacagatgcgcagaagacttcctgctcaacgacgacgtcctccctgagagcgcccaggaaaacgtccacttccagcccagcagacgagtcgtcctgcgctcctgagcgttcgtcgacagagctcaggaggacctctgggatcaggatgagggtgtgtccatcgagagacactcgcaggatcgacgttggcgggagctccagcaccaggtcgacgtcgtccaggggcacacgcagggcacagcccgcggccaggaccactatggagcactttgagtatatcatcccactgtctcctggagggcaagattcagccttaagggggttcccttgtatgtgagtgctgcaagaactgggtgtgactcggaatccctcccaaccacttccggcgcaagtggcttctgataatcatggcgcccctcggaacaactgtattgctgtggagcctcttgaggagttctccgggcgtggaacgggtctgtttccgggctcgaatccagccctggcacggtggcctgctccaaccgctaccttgctctttcgagatggggctgccacgccgccggttcagctccgaggccgcagaatctggtagcccagagaccaagaaacctacatttatggatgaggaagttcaaagcatactcacgaaaatgacaggcttgaacttgcagaagacttttaagccagctatacaagaactgaagccaccaacctataagctaatgactcaggcacagttggaagaggctacaagacaggcagttgaggcagctaaagtacgattaaaaatgccaccagttctggaagagcgagtaccaataaatgatgtgttagctgaagataagattttggaaggaacagaaacaaccaaatatgtgtttactgatatatcatatagcataccacaccgggagcgttttattgtcgtcagagaaccaagtggcacactacgcaaagcctcttgggaagaacgggaccgaatgatacaagtttatttcccaaaagaaggtcgtaaaattttgacaccaataattttcaaggaagaaaatcttaggactatgtatagccaggacaggcatgttgatgtcctcaatctctgctttgcccagtttgagccagattccacagagtatatcaaggttcatcacaagacctatgaagatatagataaacgtggaaaatatgaccttttacgttcaacaagatactttggtggaatggtgtggtattttgtaaataataaaaagattgatggtttgctgattgaccagattcagagagatttaatcgatgatgcaaccaacttggtccagctgtatcacgtgctccatccagatggccagtcggctcaaggggccaaggatcaggctgctgagggaataaatttaatcaaggtctttgcaaaaacagaagcacagaagggagcctatatagaactaacactgcagacttatcaagaagcactcagtcgccattctgcagcttcctaaaaatattttaaaaatacatttattttactaaa

SEQ ID NO: 154624 - DNA, 1099 bp, Homo sapiens
  Payload ID: 10392
  Gene Symbol: MRPS22
  Gene Name: mitochondrial ribosomal protein S22
  ENST ID: ENST00000465056
  CDS Start-End: 1-1080
atggcgcccctcggaacaactgtattgctgtggagcctcttgaggagttctccgggcgtggaacgggtctgtttccgggctcgaatccagccctggcacggtggcctgctccaaccgctaccttgctctttcgagatggggctgccacgccgccggttcagctccgaggccgaatctggtagcccagagaccaagaaacctacatttatggatgaggaagttcaaagcatactcacgaaaatgacaggcttgaacttgcagaagacttttaagccagctatacaagaactgaagccaccaacctataagctaatgactcaggcacagttggaagaggctacaagacaggcagttgaggcagctaaagtacgattaaaaatgccaccagttctggaagagcgagtaccaataaatgatgtgttagctgaagataagattttggaaggaacagaaacaaccaaatatgtgtttactgatatatcatatagcataccacaccgggagcgttttattgtcgtcagagaaccaagtggcacactacgcaaagcctcttgggaagaacgggaccgaatgatacaagtttatttcccaaaagaaggtcgtaaaattttgacaccaataattttcaaggaagaaaatcttaggactatgtatagccaggacaggcatgttgatgtcctcaatctctgctttgcccagtttgagccagattccacagagtatatcaaggttcatcacaagacctatgaagatatagataaacgtggaaaatatgaccttttacgttcaacaagatactttggtggaatggtgtggtattttgtaaataataaaaagattgatggtttgctgattgaccagattcagagagatttaatcgatgatgcaaccaacttggtccagctgtatcacgtgctccatccagatggccagtcggctcaaggggccaaggatcaggctgctgagggaataaatttaatcaaggtctttgcaaaaacagaagcacagaagggagcctatatagaactaacactgcagacttatcaagaagcactcagtcgccattctgcagcttcctaaaaatattttaaaaatacat

SEQ ID NO: 154625 - DNA, 1065 bp, Homo sapiens
  Payload ID: 10392
  Gene Symbol: MRPS22
  Gene Name: mitochondrial ribosomal protein S22
  ENST ID: ENST00000478464
  CDS Start-End: 106-1065
ggaaggtcagggaagggttcctggcaaatatgaccaaagctgagatctggttagccatgctaaggagaaagcaagaagcttctcaagcataggggacagtagcagatgtccagaaatgagactgagcacagatatttgggaacccattttggagcagaatctggtagcccagagaccaagaaacctacatttatggatgaggaagttcaaagcatactcacgaaaatgacaggcttgaacttgcagaagacttttaagccagctatacaagaactgaagccaccaacctataagctaatgactcaggcacagttggaagaggctacaagacaggcagttgaggcagctaaagtacgattaaaaatgccaccagttctggaagagcgagtaccaataaatgatgtgttagctgaagataagattttggaaggaacagaaacaaccaaatatgtgtttactgatatatcatatagcataccacaccgggagcgttttattgtcgtcagagaaccaagtggcacactacgcaaagcctcttgggaagaacgggaccgaatgatacaagtttatttcccaaaagaaggtcgtaaaattttgacaccaataattttcaaggaagaaaatcttaggactatgtatagccaggacaggcatgttgatgtcctcaatctctgctttgcccagtttgagccagattccacagagtatatcaaggttcatcacaagacctatgaagatatagataaacgtggaaaatatgaccttttacgttcaacaagatactttggtggaatggtgtggtattttgtaaataataaaaagattgatggtttgctgattgaccagattcagagagatttaatcgatgatgcaaccaacttggtccagctgtatcacgtgctccatccagatggccagtcggctcaaggggccaaggatcaggctgctgagggaataaatttaatcaaggtctttgcaaaaacagaagcacagaagggagcctatatagaactaacactgcagacttatcaagaagcactcagtcgccattctgcagcttcctaa

SEQ ID NO: 154626 - DNA, 827 bp, Homo sapiens
  Payload ID: 10392
  Gene Symbol: MRPS22
  Gene Name: mitochondrial ribosomal protein S22
  ENST ID: ENST00000466690
  CDS Start-End: 1-496
aacaactgtattgctgtggagcctcttgaggagttctccgggcgtggaacgggtctgtttccgggctcgaatccagccctggcacggtggcctgctccaaccgctaccttgctctttcgagatggggctgccacgccgccggttcagctccgaggccgcagaatctggtagcccagagaccaagaaacctacatttatggatgaggaagttcaaagcatactcacgaaaatgacaggcttgaacttgcagaagacttttaagccagctatacaagaactgaagccaccaacctataagctaatgactcaggcacagttggaagaggctacaagacaggcagttgaggcagctaaagtacgattaaaaatgccaccagttctggaagagcgagtaccaataaatgatgtgttagctgaagataagattttggaaggaacagaaacaaccaaatatgtgtttactgatatatcatatagcataccacaccggtgttgatggaagtttcatctatgttatcttcagaacacatttagagactcctacacctctgaaaacttgagagtcagtactgtttggttaatttatacattaatcaggagcgttttattgtcgtcagagaaccaagtggcacactacgcaaagcctcttgggaagaacgggaccgaatgatacaagtttatttcccaaaagaaggtcgtaaaattttgacaccaataattttcaaggaagaaaatcttaggactatgtatagccaggacaggcatgttgatgtcctcaatctctgctttgcccagtttgagccagattccacagagtatatcaaggt

SEQ ID NO: 154627 - DNA, 600 bp, Homo sapiens
  Payload ID: 10392
  Gene Symbol: MRPS22
  Gene Name: mitochondrial ribosomal protein S22
  ENST ID: ENST00000465373
  CDS Start-End: 1-600
ggaacaactgtattgctgtggagcctcttgaggagttctccgggcgtggaacgggtctgtttccgggctcgaatccagccctggcacggtggcctgctccaaccgctaccttgctctttcgagatggggctgccacgccgccggttcagctccgaggccgcttcttatttactaaagtccattttagcagaatctggtagcccagagaccaagaaacctacatttatggatgaggaagttcaaagcatactcacgaaaatgacaggcttgaacttgcagaagacttttaagccagctatacaagaactgaagccaccaacctataagctaatgactcaggcacagttggaagaggctacaagacaggcagttgaggcagctaaagtacgattaaaaatgccaccagttctggaagagcgagtaccaataaatgatgtgttagctgaagataagattttggaaggaacagaaacaaccaaatatgtgtttactgatatatcatatagcataccacaccgggagcgttttattgtcgtcagagaaccaagtggcacactacgcaaagcctcttgggaagaacgggaccgaatgatacaagtt

SEQ ID NO: 154628 - DNA, 363 bp, Homo sapiens
  Payload ID: 10392
  Gene Symbol: MRPS22
  Gene Name: mitochondrial ribosomal protein S22
  ENST ID: ENST00000480644
  CDS Start-End: 1-363
caaatatgtgtttactgatatatcatatagcataccacaccgggagcgttttattgtcgtcagagaaccaagtggcacactacgcaaagcctcttgggaagaacgggaccgaatgatacaagtttatttcccaaaagaaggtcgtaaaattttgacaccaataattttcaaggaagaaaatcttaggtttgagccagattccacagagtatatcaaggttcatcacaagacctatgaagatatagataaacgtggaaaatatgaccttttacgttcaacaagatactttggtggaatggtgtggtattttgtaaataataaaaagattgatggtttgctgattgaccagattcagagagattt

SEQ ID NO: 154629 - DNA, 1401 bp, Homo sapiens
  Payload ID: 10392
  Gene Symbol: MRPS22
  Gene Name: mitochondrial ribosomal protein S22
  Uniprot ID: P82650
  ENST ID: ENST00000498505
  CDS Start-End: 6-512
taatcatggcgcccctcggaacaactgtattgctgtggagcctcttgaggagttctccgggcgtggaacgggtctgtttccgggctcgaatccagccctggcacggtggcctgctccaaccgctaccttgctctttcgagatggggctgccacgccgccggttcagctccgaggccgaatctggtagcccagagaccaagaaacctacatttatggatgaggaagttcaaagcatactcacgaaaatgacaggcttgaacttgcagaagacttttaagccagctatacaagaactgaagccaccaacctataagctaatgactcaggcacagttggaagaggctacaagacaggcagttgaggcagctaaagtacgattaaaaatgccaccagttctggaagagcgagtaccaataaatgatgtgttagctgaagataagattttggaaggaacagaaacaaccaaatatgtgtttactgatatatcatatagcataccacaccggtgttgatggaagtttcatctatgttatcttcagaacacatttagagactcctacacctctgaaaacttgagagtcagtactgtttggttaatttatacattaatcaggagcgttttattgtcgtcagagaaccaagtggcacactacgcaaagcctcttgggaagaacgggaccgaatgatacaagtttatttcccaaaagaaggtcgtaaaattttgacaccaataattttcaaggaagaaaatcttaggactatgtatagccaggacaggcatgttgatgtcctcaatctctgctttgcccagtttgagccagattccacagagtatatcaaggttcatcacaagacctatgaagatatagataaacgtggaaaatatgaccttttacgttcaacaagatactttggtggaatggtgtggtattttgtaaataataaaaagattgatggtttgctgattgaccagattcagagagatttaatcgatgatgcaaccaacttggtccagctgtatcacgtgctccatccagatggccagtcggctcaaggggccaaggatcaggctgctgagggaataaatttaatcaaggtctttgcaaaaacagaagcacagaagggagcctatatagaactaacactgcagacttatcaagaagcactcagtcgccattctgcagcttcctaaaaatattttaaaaatacatttattttactaaatactgactacatttctctgttaatattgagctaaatgttaaaaaatggccagattaaaagatatcaatttgtagttctccctacaaagcaaaaattattaccctactcacttttcgtaggctacaaggatatttgagtgcctggttatgaatttctcaaatcatgttagatgagcgt

SEQ ID NO: 154630 - DNA, 5621 bp, Homo sapiens
  Payload ID: 10393
  Gene Symbol: MRPS23
  Gene Name: mitochondrial ribosomal protein S23
  Uniprot ID: Q9Y3D9
  ENST ID: ENST00000313608
  CDS Start-End: 47-619
tccggttccggtagcagctagtcacgctcggtaccaggcgcagatcatggcaggcagccggctggaaaccgtagggagcatcttctctcggactcgggacctggttcgggccggggtgctgaaggagaagcccctgtggtttgacgtatatgacgcctttcccccgctgagggagcccgtcttccaaaggcctcgagtgcgatatggcaaagccaaagctcccatccaagacatctggtaccacgaggatcggattagagcgaagttttattcagtgtatgggtctggtcaaagagcttttgatctattcaatccaaacttcaagtctacctgtcaacggtttgtggagaagtacactgagctacagaaacttggagaaacagatgaagagaagttatttgtggaaacagggaaggctttattggcagaaggtgtcattttaagacgagtaggcgaagcaaggactcaacacggaggtagtcacgtttcccggaaatccgaacacttgagtgtcagaccacagactgcgttggaagaaaacgagactcagaaagaagttccacaggaccagcatttggaggcacctgcagaccagtcgaaaggtctcttgcctccctgaaggacctgtatactgtgtatgctggcattcacactctactcactggctgaatgttgagctatttttaaacagttgaactgtgtaaatgtttcttgatctctaaggtattatgtttgccttctcttagttatttctgggttgtcacaaagctcagtatcatggtttgacagaagcagttatgtgaacttttatgttaggacattactaaataaagaattccctagctgcttataaagtaaatttactttgaattgtaaataacatgaagaaacctttataaagattgttcaaatgggactcaatctgactaggcttgctttgatgtttgttagtatgtgggctggctacatctgattcccgggtacatatttcttctgatccatcagacttatacgtgtacacatgttgtggaaccttggctagctggttttgtctgcagagaatctttgtacttcttgctatagaacgattatctctccacttgagaggccaagctgacttgcgctttgtggtaagagtgaggacctgtcattgctgatacacaaagaccaaaactgtaactttaatgtcatggattgagtgtgctggagacagttaacataggcctgcacagactaggctgttcagtaaatacttgttgaatgaatgagtgaacgaatggttatatccagctaaagactggattcatatggtgtagataacaggattgccaagaaaggaggcagctaatttaggtgatgctctccaccagcatccacctgcctccctggggccaaagtgtgcctacaagtccttatcaacttccctgccttcctcgtttccccaggttttactaaatacatgaaatatccctctgagattgcagcctttgtatatgtggtcaagccagtggtttttagctgttagtagtaagctgcttcagaaattccctattttaaaactcatgtagattttctacccagtgattctttgtgtatgctctcatctctcctggtacactgtgaggcaggtccacatctcacagtctgtatatagtacacatccatgcacgtgggtgcttggttcatgcaggtgaatgaatacattaggcaaaagcagctctcagccatgctgcttccccctcgacctttatcactgtttcacaactgcttgcatttggagaatgctttacttttccgtagggaagtaaatttcatccattcagagacattacacaaccattgagaccaaacatcgggccagaccttgggaagaggacttaaaaagcaggtgaaagacacagtctattctcagaggaacaattgaggggtcactcatctctttaaaccttaggtttctggttttttaagggcaggttttttttgccacaatgatgaatatttaaaaaatgtttttttccttcatgtctggattgatgtcccatttttgctatttttgtttgttttcctcctctgtagatttttaattttttttttttttttttttttttttttgcgatggagtatcactttgtttcccaggctggagtacagtggagccatcttggcccactgcaacctccgcctcccaggttcaagcagttcttctgcctcagcctcccaagtagctgggattacaggtgtatgctatgacgcccggctaatttttgtatttttagtagaaacgggcttttaaccatgttgcccaggctgatctcaaactgctggcctcaagtgatccacccatctcaacctcccaaaatgctgggattacgggtgttagccaccatgcctggccttaattttttttttttttaattttgttttaggagatgggggtctcactgtgttacccaggctgggtgcagtggtgcataccctgccgcagtcttaactcctgggctgaagccatcctggctcacttcccgaatagctaggactataggcatgtgccaccacgcctggctctttaacattttttttgtttgtttttttttgtagagatggagtcttgctatgttgcccaggctggcctggtctcaaactcctggcctcaagcgatcctcctgcctcagccgcccaaagtgctgggattacaggcctgagcgaccgtactggggctgaagacttttaaagaagttatttgttgcataattctttaaaaaaattatacatgcacatggttcaaaacttaacagtaaaaagctagtctcccacccctgttccccagccacccttttccccttccctgaggccatcactatcaccatttccttgtgcgctcttccagaaatattttgggcatggacaggacactatgcatactgttctgtaccttgcttttctagttactatgtctcagagatccactgtgatttaatcagtgcccgattgaagaaaatgttctttgttttactgtgttgcaaatgggctgctagagttatgggatgctggatcaaggagcagatcattttgagttttgatatcttcgtccatagaaattgtgcttaactatactctcatagcaatgtatgagaatgcgttcccctacacattctgatcttgttaaaccagactgggactctggaccagaagggaaagaccatccctgtatagcaaatatctggatggggagaaagctgctgtcactcattgacttctttaggttaagtcttagtgatcaaaacatagtgaaagatatgaagcttactttggaaactcagaactatttccacagtttgggcaaaagctgtcatcagatccccatcacgttttggagagaatggaagcatgaccgcattcttggctttaaagagcttaaaatcaggccgggctccatggctcacgcctgtaatcccagcactttgggaggccaaggtgggcggatcacctgaggtcaggagttcgagaccagcctggccaacatagtgaaaccccatctttactaaaaatacaaaaaaattagctgggcgtgcgggcgtgtgcctgtaataccagctacccgggaggctgaggcaggagaatcgctggaacccaggaggcagaggctgcagttgagccgagattgtgccactgcactccagcttgggcgacagagcaagaccctgtctcaaaaaaaaaaaaaaaaaaatcttaaaatcgagttgggactacaagagtgacttgtgaaacagcaagatgaacaggaatccttttaaactttgatataaaagtacagtagaggttcaggggcaaggaatcagttctggatttgtctaggaatactgcatgagagcctggaaaggcagtgggatggacatgtacatgcggtttctttgggcaggaacaccctcccttctaccatggtctgtaggaattgaaccttccgtgccgttttcaaatgctgtctgtgctcggaaaatacataatatcaagtcccttactgaaccccctacagattgtgttcataaggtgcttcactgctgttggtctacctggcctactgtttgtactcctgcctcatttactgtggccttcattcaagtagtaatgattatttacctattaagagtatagggtgggcgtggtggctcatgtaatcccagcactttgggaagtcaagatgggtagatcacttgaagtcaggagtttgagaccagcctgggcaacatgatgaaaccccatctctactaaaaatacaaaagttagctggatgtggtggcagcctcctgtaatcccaactactcggcaggctgaggcaggagaatcgcttgaacccaggaggtggaggttacagtgagctgagatcatgctacagcaccccagcctgggcgacagaagagagacactgtctcaaaaaaaaaaaaaaaaaaagtataaaggagggcagaaattcttattcttttaacccattgaaacattaaacagcctttcaggagcagaccctcctacggatttgctgaatccaaggcgaggaaggcatatatccaggttacagtgaagtttgccccagacaagtaatgaagatttgggttctagatctggatactccaggcagtttttactatgtgaccctgtgcctgtcacagtatttcagcctgtaaaatatggacaatgtttgcctttttggcttccagttagctttgtgaggattaattgagatgagtgcaaagctcatttgtaatgtgtggctggtggttttattactattttgagcagtagtggaaaagcccatttgaactggtaggatgagataagatcatggtggccttgacaactacatggaggagccagttgggtatgggaaagtttgagcagggaaagaaagaatgtagtgaaagcagtgtcaggtcaaagaaaggtttgcctaggagtgatgtaaagaatgggatggaggagtgggcagggaaggaggaaagaggagacatgtcagagggaccaaaaaggaggcagcaagtccaaggtcacaaacctgagtgactagaaaacttagcagcatcactaacacccagttggtgacgtggaactggtgctctcctgggagagagcttcaattctcaacctactaagttgaaggtgatggtgctatatctaagtggcagacagagataagggataggtgtctacaggggcaagatttggagccaggagaagaaatgagctctccaagggtagtggggagagatctgggatgttgggggctggcaggtaaatgctttaagtgatagaataggaggaatgagaaagccagcaaaagaaattcacgtcccatgtcttccatcatctatatgtctgacttgtttaagtggtcctggattcaccaaattttatagagctctgcctctgcctttattgggtaggcctgatttttgatgatgtccttaaaaggctagcctgattcttcttgtagttttgtagaacactttgtatcgagagttctctgataatgaaagtggtattacagaataatctgcccccgaaggactcctgattttgttaaagtgatacctttctctgtaaataaatgatggcgtgccacttaaaaa

SEQ ID NO: 154631 - DNA, 516 bp, Homo sapiens
  Payload ID: 10393
  Gene Symbol: MRPS23
  Gene Name: mitochondrial ribosomal protein S23
  ENST ID: ENST00000579380
  CDS Start-End: 332-516
tccggttccggtagcagctagtcacgctcggtaccaggcgcagatcatggcaggcagccggctggaaaccgtagggagcatcttctctcggtgtgtgctcccagccgtggtgggctgagggtgcctcccccaggctggggttctcagccggtcacgctcttccttggagcggacctgagcagggcgaggcgtattgcagggtgcgggggctgagctgggactcgggacctggttcgggccggggtgctgaaggagaagcccctgtggtttgacgtatatgacgcctttcccccgctgagggagcccgtcttccaaaggcctcgagtgcgatatggcaaagccaaagctcccatccaagacatctggtaccacgaggatcggattagagcgaagttttattcagtgtatgggtctggtcaaagagcttttgatctattcaatccaaacttcaagtctacctgtcaacggtttgtggagaagtacactgagctacagaaacttggagaaacagatgaa

SEQ ID NO: 154632 - DNA, 580 bp, Homo sapiens
  Payload ID: 10393
  Gene Symbol: MRPS23
  Gene Name: mitochondrial ribosomal protein S23
  ENST ID: ENST00000578444
  CDS Start-End: 35-493
agcagctagtcacgctcggtaccaggcgcagatcatggcaggcagccggctggaaaccgtagggagcatcttctctcggactcgggacctggttcgggccggggtgctgaaggagaagcccctgtggtttgacgtatatgacgcctttcccccgctgagggagcccgtcttccaaaggcctcgagtgcgatatggcaaagccaaagctcccatccaagacatctggtaccacgaggatcggattagagcgaagttttattcagtgtatgggtctggtcaaagagcttttgatctattcaatccaaacttcaagtctacctgtcaacggtttgtggagaagtacactgagctacagaaacttggagaaacagatgaagagaagttatttgtggaaacagggaaggctttattggcagaaggtgtcattttaagacgagtaggcgaagcaaggactgtgagtatttcattgttaaaattgttactgggtttatagttgtccctcagtatgcacaggggattggtgctagggcccctgcagataccaatattcacagatgctgaaataccttttataaagtgc

SEQ ID NO: 154633 - DNA, 707 bp, Homo sapiens
  Payload ID: 10394
  Gene Symbol: MRPS24
  Gene Name: mitochondrial ribosomal protein S24
  Uniprot ID: Q96EL2
  ENST ID: ENST00000317534
  CDS Start-End: 63-566
gtccgcggtcgtccccacccctcagcgcgctgtggtacgtcccgcgctccgcttggcccaagatggcggcctccgtgtgcagcgggttgctggggccacgggtgctgtcctggagccgagagctgccttgcgcttggcgcgccctgcacacctccccggtctgcgccaagaaccgggcggcccgagtacgcgtaagcaagggggacaagccggtgacctacgaggaggcacacgcgccgcactacatcgcccaccgtaaaggctggctgtcgctgcacacaggtaacctggatggagaggaccatgccgcagagcgaacggtggaggatgttttccttcgcaagttcatgtggggtaccttcccaggctgcctggctgaccagctggttttaaagcgccggggtaaccagttggagatctgtgccgtggtcctgaggcagttgtctccacacaagtactacttcctcgtgggctacagtgaaactttgctgtcctacttttacaaatgtcctgtgcgactccacctccaaactgtgccctcaaaggttgtgtataagtacctctagaacaatccccttttttccatcaagctgtagcctgcagagaatggaaacgtgggaaaggaatggtatgtgggggaaatgcatcccctcagaggactgaggcatagtctctcatctgctattgaataaagaccttctatcttg

SEQ ID NO: 154634 - DNA, 743 bp, Homo sapiens
  Payload ID: 10394
  Gene Symbol: MRPS24
  Gene Name: mitochondrial ribosomal protein S24
  ENST ID: ENST00000418740
  CDS Start-End: 388-606
cccgcgctccgcttggcccaagatggcggcctccgtgtgcagcgggttgctggggccacgggtgagtggggcgactcggcaggtccctgcgagtcggaggtggggtccctagtttccgcctcacgcgccctccctccacaggtgctgtcctggagccgagagctgccttgcgcttggcgcgccctgcacacctccccggtctgcgccaagaaccgggcggcccgagtacgcgtaagcaagggggacaagccggtgacctacgaggaggcacacgcgccgcactacatcgcccaccgtaaaggctggctgtcgctgcacacaggtaacctggatggagaggaccatgccgcagagcgaacggtggaggatgttttccttcgcaagttcatgtggggtaccttcccaggctgcctggctgaccagctggttttaaagcgccggggtaaccagttggagatctgtgccgtggtcctgaggcagttgtctccacacaagtactacttcctcgtgggctacagtgaaactttgctgtcctacttttacaaatgtcctgtgcgactccacctccaaactgtgccctcaaaggttgtgtataagtacctctagaacaatccccttttttccatcaagctgtagcctgcagagaatggaaacgtgggaaaggaatggtatgtgggggaaatgcatcccctcagaggactgaggcatagtctctcatctgctattgaataaagaccttctat

SEQ ID NO: 154635 - DNA, 4586 bp, Homo sapiens
  Payload ID: 10395
  Gene Symbol: MRPS25
  Gene Name: mitochondrial ribosomal protein S25
  Uniprot ID: P82663
  ENST ID: ENST00000253686
  CDS Start-End: 142-663
agcgtctcctgtgcgtctgcgcgggaagtggaacctggctctggggagaagccgcgtgagatccgcgcgggtgctagctagtcctttctcgtcgctgctcggctcgcggcccgtggggtcggccccgccaccgttgccgccatgcccatgaagggccgcttccccatccgccgcaccctgcaatatctgagccaggggaacgtggtgttcaaggactccgtgaaggtcatgacagtgaattacaacacgcatggggagctgggcgagggcgccaggaagtttgtgtttttcaacatacctcagattcaatacaaaaacccttgggtgcagatcatgatgtttaagaacatgacgccgtcacccttcctgcgattctacttagattctggggagcaggtcctggtggatgtggagaccaagagcaataaggagatcatggagcacatcagaaaaatcttggggaagaatgaggaaaccctcagggaagaggaggaggagaaaaagcagctttctcacccagccaacttcggccctcgaaagtactgcctgcgggagtgcatctgtgaagtggaagggcaggtgccctgccccagcctggtgccattacccaaggagatgagggggaagtacaaagccgctctgaaagccgatgcccaggactaaggcccacggtcactgtgggctggggtgatggtgtctgaccagtggggagattggaatgggattactttggcccagggaagcccctggttctgtccctggagactctggaaatccttttgcattaaaaggactttacacacctgtgtaaaaggatgtgggagaggagggtctgaagctgagctgctaaatgaatatccctgctctgctggtcaataaaacgcttcctaatagcagcttggcgtgtatctggtcctagtgaagaggaaggcctgtgtagcagaaaggctttgggcctgagaggttaaggccacagcctgttgacacctgttttggtcctgcgaccctttactggtctccgctggctttgaatcttcctctgggctctactctggagaacataagggctgctgtggttgagtctggctagcactgtctgtggttggcagtgtgtacacccctccgttcagttccttgggggtatttttcagaaatccaaaggcaacccttcgtgcagtgctcacttttttaagtacagttgattacccttgcctgctggggggcctagccatgggccagagatggaggagccccagtggctgacaggccagcctcactcaggcacgtacctgctgaccagtcagccactgccaacccatggcccagccactgtgtgcattagcagggaggtttgtaggccatggaggaaatgaggagacaccacctagtggagacattggggccctgctggggggatggtgtctatagctggctctgctggctccctcaggccctgcttaccaagctctggaggagggagtgctgcattactgagcaccttccttgttctttcctcataggacactgatgttactgtcactttagttatgctaaagtggaggtttcagcctccagaagacagcagagccttctagggtcaccttaagaataggtttagctaggctgggtgtggtggctcatgcctgtaatcccagcactttgggaggctgatgtgggcggatagttgagcccaggagttcgagaccagcctgggcaacatggcaagaccttgtctctacaaaaagtacaaaaattagatgggtgtggtgtttcgcgtctgtagtcccagctatttgggaagctgaggtgggaggatctcgagcctgcgagatcaaggctgcagtgaatcatgatcgtgcgctactgcactccagcctgggccacagagcaagactgtctcaagaaaaaaaattttttaaataagtttaattataaagtgaaggaccagttggaccacggacccctagaaactcagccaaggagacctgactttatctgagacaggaaggcagtggttaaaagaattaaaaaaggacagtggtgcttgacagagcaggactgaagttttcattcctctacctgctggggccttggtcaagtcctaaaagctttccaggtctgtaactggttttgtctgtaaaatggggaaaaggttaccttttctgccacatgaagtagctggctggtgaaatgatgtcatactacgatgtgtttcattaactgttggagattatcacattaaattgagcagatttggatcttttacatttgatgctcaagtttgattctgtaccagatctgggtttggggtgatggcttgtcgggggtgggaggggaaggtgggcagagactgatgtataatggacaggtgttccttgagtgacagacttacaaagggagtgtttaattgaaatctagcatcttgtctctctgctatcagcattttggctgggtggaaaaagctctcctccacagagagccctcccatgtctgctggtttcagttccccacccaactgactgaagtcttgaccttgataccacctgcctgggcgttctacttggctgcaagggctcttcagaaagcacctagttccttttggctttcatctgcagtgtaggtctccatagctagtgacacacaaagccttatgagagtattccttccctctagggcccaaagaggctgctaaccagcaggaatgtcctgaaccaaaaggagtggtgaccattctctagacagaataaatgtctggtccctaatgggacagataactagggtttgagttcaggcttgacacaggagcaatgggcagtgaggtggacagcccagaccctgaaaggacgtgtggagacagcagcagtcctgtggtgcagttactgcctgtgtggccagcttcacaggcagcagataatttgtggaaataaacattattttctttttttgttccctgtaggctacttgatcctggatagtttctctttaaacctttgtctttccctattttgtttagtagtgatgaaagatgggtttaaaatatacagaaatgggagaaaattaattagagaaaatgtgaggattttataattgataacatgttcttaattttacttgcacaagcagtgttcacagccttattctgaagtgaccacttttcttctctttgaggcactacctggcagcaccatctaaacctgtatcatctgctgtggtcccagttactcaggaggctgaggcaggaggatcacttgagcccaggaggttgaggctggagtgagccatgactgtaccactgcattccagcctgggtgacggagtgaggccctatctgcctgccagtgagttctgtcatgcatcagactttggacctcagaattttcacctggaacatgagaggtcagatgacataatgaatatgttctaacttctgaaacttttggagcttgtttttgcccttgatagcacgtatccttagagaataagcttgccaatttaaggcctgtctgtaatggcatctgaatgttccagcagcctaactgtgctctgctccagaaacatgtgtgtggcttccctacctccacaccaaggagctgccttgctgggtggatgtaaagactgtcctgccagggtttcccactaaaggtattaataagtccagtggaccacagagggcccaatccctcttggccgctaaggctaaggtaggagccagagagctgtagagacaggaccaccaggatgcttcatgtccataacacaagagagcgctgcattgtttgggggccaggcattactactatcatgaagaaaaatgaagagcaggatgcatgttagtctttaattcacttttaatagtataaacctcatttaggtagtagtattaagccacaacaataatgccacattgaaacagcatttaataaaatgcataaagctaattcatgcactgcaatactctatatacaaacacaacaatgcaaattcttcttcaagactgaagacattgattagatataaaattcagtttaaaaagaacatgctattttttaaatgccatcacataaacaaagtgatttcacagggagaagaaagctgtataaagctgcagctttcaacaggttttaaacctggcattaaaatgtaatggcaaaaccaatattttctatattgtgaagggcaaaggttacagaaacggtcccaagaaaatctaacacccaaattttcctttgatagatagatgcctttaaaagggctggtaatgcagttacattctaacagagaagtccaaactacaggtaaaaactacggcttgtactgtgaaaaatgtgcagcttttcagttataaaactagttgaacactggtttacaagataatccgtagaacagagagactgtagaaaaatattccagcacttgagttgtgtgtggcagcagcatttgagtccatgaatgctatggtcattaaaataattgattatactttcctaaagaaaagccattttttaatgcaaagtctactacttccaaatgttattccaaacattaaattttaacagtctatcaatcaataaatgttgaacattttt

SEQ ID NO: 154636 - DNA, 1119 bp, Homo sapiens
  Payload ID: 10395
  Gene Symbol: MRPS25
  Gene Name: mitochondrial ribosomal protein S25
  Uniprot ID: P82663
  ENST ID: ENST00000449354
  CDS Start-End: 67-504
agctagtcctttctcgtcgctgctcggctcgcggcccgtggggtcggccccgccaccgttgccgccatgcccatgaagggccgcttccccatccgccgcaccctgcaatatctgagccaggggaacgtggtgttcaaggactccgtgaaggtcatgacagtgaattacaacacgcatggggagctgggcgagggcgccaggaagtttgtgtttttcaacatacctcagattcaatacaaaaacccttgggtgcagatcatgatgtttaagaacatgacgccgtcacccttcctgcgattctacttagattctggggagcaggtcctggtggatgtggagaccaagagcaataaggagatcatggagcacatcagaaaaatcttggggaagaatgagcactacctggcagcaccatctaaacctgtatcatctgctgtggtcccagttactcaggaggctgaggcaggaggatcacttgagcccaggaggttgaggctggagtgagccatgactgtaccactgcattccagcctgggtgacggagtgaggccctatctgcctgccagtgagttctgtcatgcatcagactttggacctcagaattttcacctggaacatgagaggtcagatgacataatgaatatgttctaacttctgaaacttttggagcttgtttttgcccttgatagcacgtatccttagagaataagcttgccaatttaaggcctgtctgtaatggcatctgaatgttccagcagcctaactgtgctctgctccagaaacatgtgtgtggcttccctacctccacaccaaggagctgccttgctgggtggatgtaaagactgtcctgccagggtttcccactaaaggtattaataagtccagtggaccacagagggcccaatccctcttggccgctaaggctaaggtaggagccagagagctgtagagacaggaccaccaggatgcttcatgtccataacacaagagagcgctgcattgtttgggggccaggcattactactatcatgaagaaaaatgaagagcaggatgcatgttagtctttaattcacttttaatagtataaacctcatttaggtagtagtattaagccacaac

SEQ ID NO: 154637 - DNA, 590 bp, Homo sapiens
  Payload ID: 10395
  Gene Symbol: MRPS25
  Gene Name: mitochondrial ribosomal protein S25
  ENST ID: ENST00000420267
  CDS Start-End: 118-450
gaagtggaacctggctctggggagaagccgcgtgagatccgcgcgggtgctagctagtcctttctcgtcgctgctcggctcgcggcccgtggggtcggccccgccaccgttgccgccatgcccatgaagggccgcttccccatccgccgcaccctgcaatatctgagccaggggaacgtggtgttcaaggactccgtgaaggtcatgacagtgaattacaacacgcatggggagctgggcgagggcgccaggaagtttgtgtttttcaacatacctcagattcaatacaaaaacccttgggtgcagatcatgatgtttaagaacatgacgccgtcacccttcctgcgattctacttagattctggggagcaggtcctggtggatgtggagaccaagagcaataaggagatcatggagcacatcagaaaaatcttggggaagaatgagtgagttgtttggtttgacctggaaggaacaaacttctcagcccagagaatttgaggaagaaaggggtgtgtgggaagggtgttgagaggcactacctggcagcaccatctaaacctgtatcatctgctgtggtcccagttact

SEQ ID NO: 154638 - DNA, 723 bp, Homo sapiens
  Payload ID: 10395
  Gene Symbol: MRPS25
  Gene Name: mitochondrial ribosomal protein S25
  ENST ID: ENST00000447299
  CDS Start-End: 107-439
tggctctggggagaagccgcgtgagatccgcgcgggtgctagctagtcctttctcgtcgctgctcggctcgcggcccgtggggtcggccccgccaccgttgccgccatgcccatgaagggccgcttccccatccgccgcaccctgcaatatctgagccaggggaacgtggtgttcaaggactccgtgaaggtcatgacagtgaattacaacacgcatggggagctgggcgagggcgccaggaagtttgtgtttttcaacatacctcagattcaatacaaaaacccttgggtgcagatcatgatgtttaagaacatgacgccgtcacccttcctgcgattctacttagattctggggagcaggtcctggtggatgtggagaccaagagcaataaggagatcatggagcacatcagaaaaatcttggggaagaatgagtgagttgtttggtttgacctggaaggaacaaacttctcagcccagagaatttgaggaagaaaggggtgtgtgggaagggtgttgagagggaaaccctcagggaagaggaggaggagaaaaagcagctttctcacccagccaacttcggccctcgaaagtactgcctgcgggagtgcatctgtgaagtggaagggcaggtgccctgccccagcctggtgccattacccaaggagatgagggggaagtacaaagccgctctgaaagccgatgcccaggactaaggccca

SEQ ID NO: 154639 - DNA, 1281 bp, Homo sapiens
  Payload ID: 10395
  Gene Symbol: MRPS25
  Gene Name: mitochondrial ribosomal protein S25
  Uniprot ID: P82663
  ENST ID: ENST00000444840
  CDS Start-End: 124-513
gcgcgggaagtggaacctggctctggggagaagccgcgtgagatccgcgcgggtgctagctagtcctttctcgtcgctgctcggctcgcggcccgtggggtcggccccgccaccgttgccgccatgcccatgaagggccgcttccccatccgccgcaccctgcaatatctgagccaggggaacgtggtgttcaaggactccgtgaaggtcatgacagtgaattacaacacgcatggggagctgggcgagggcgccaggaagtttgtgtttttcaacatacctcagattcaatacaaaaacccttgggtgcagatcatgatgtttaagaacatgacgccgtcacccttcctgcgattctacttagggaaaccctcagggaagaggaggaggagaaaaagcagctttctcacccagccaacttcggccctcgaaagtactgcctgcgggagtgcatctgtgaagtggaagggcaggtgccctgccccagcctggtgccattacccaaggagatgagggggaagtacaaagccgctctgaaagccgatgcccaggactaaggcccacggtcactgtgggctggggtgatggtgtctgaccagtggggagattggaatgggattactttggcccagggaagcccctggttctgtccctggagactctggaaatccttttgcattaaaaggactttacacacctgtgtaaaaggatgtgggagaggagggtctgaagctgagctgctaaatgaatatccctgctctgctggtcaataaaacgcttcctaatagcagcttggcgtgtatctggtcctagtgaagaggaaggcctgtgtagcagaaaggctttgggcctgagaggttaaggccacagcctgttgacacctgttttggtcctgcgaccctttactggtctccgctggctttgaatcttcctctgggctctactctggagaacataagggctgctgtggttgagtctggctagcactgtctgtggttggcagtgtgtacacccctccgttcagttccttgggggtatttttcagaaatccaaaggcaacccttcgtgcagtgctcacttttttaagtacagttgattacccttgcctgctggggggcctagccatgggccagagatggaggagccccagtggctgacaggccagcctcactcaggcacgtacctgctgaccagtcagccactgccaacccatggcccagccactgtgtgcattagcagggaggtttgtaggccatggaggaaatgaggagacaccaccta

SEQ ID NO: 154640 - DNA, 1127 bp, Homo sapiens
  Payload ID: 10396
  Gene Symbol: MRPS26
  Gene Name: mitochondrial ribosomal protein S26
  Uniprot ID: Q9BYN8
  ENST ID: ENST00000380325
  CDS Start-End: 125-742
agaggccacacggccgggcggggcgtgagggacagcccgaggactacaggtcccaaggttccccgcgccgcttccggggcacggtggcgtcccggcaccgcggccgcagtgaggagactcggccatgctacgcgcgctgagccgcctgggcgcggggaccccgtgcaggccccgggcccctctggtgctgccagcgcgcggccgcaagacccgccacgacccgctggccaaatccaagatcgagcgagtgaacatgccgcccgcggtggaccctgcggagttcttcgtgctgatggagcgttaccagcactaccgccagaccgtgcgcgccctcaggatggagttcgtgtccgaggtgcagaggaaggtgcacgaggcccgagccggggttctggcggagcgcaaggccctgaaggacgccgccgagcaccgcgagctgatggcctggaaccaggcggagaaccggcggctgcacgagctgcggatagcgaggctgcggcaggaggagcgggagcaggagcagcggcaggcgttggagcaggcccgcaaggccgaagaggtgcaggcctgggcgcagcgcaaggagcgggaagtgctgcagctgcaggaagaggtgaaaaacttcatcacccgagagaacctggaggcacgggtggaagcagcattggactcccggaagaactacaactgggccatcaccagagaggggctggtggtcaggccacaacgcagggactcctaggggcccagtaaggacagtgcccgccagggaccatgtatgtatcatggcggaagagttggccctgacctggaataaagcagttggtgttgcttatgaggaaggttcagccttatccagcacagccttcacgttttgccctctgctgtcaccacttggtcagaaacttccaaacgcagtgccctgttctgccggtgtgtacagcctcagcgcaccaggagaccctagagtggtttccatctcacagagaatcagacagggccacagccccctcaggcagccaggtcatctgagtatcattaagagtagtgatgggaagattacagtctgagggccaaacgtgcctgcttcctgtttttgtaaataaagttttgttggaacacagcca

SEQ ID NO: 154641 - DNA, 2785 bp, Homo sapiens
  Payload ID: 10397
  Gene Symbol: MRPS27
  Gene Name: mitochondrial ribosomal protein S27
  Uniprot ID: Q92552
  ENST ID: ENST00000261413
  CDS Start-End: 41-1285
gtccgtaacccgttggctgttccttttggtacgctccaagatggctgcctccatagtgcggcgcgggatgctcctggcgcggcaagtggttcttcctcagctctctcctgcaggtaaaagatacctgctttcttcagcctatgtagacagccacaaatgggaagcaagagaaaaagaacattactgtcttgctgatcttgcatctttaatggataaaacatttgagagaaagttgcctgttagttctttaacaatatcacggcttatagacaacatttcctctcgggaagagatagatcatgcagagtattacctttacaagtttcgacacagccccaactgctggtacctgagaaactggactatccacacctggattaggcagtgtctaaaatatgatgcacaagacaaagccctatatacccttgtaaataaggttcaatatggaatttttccagataactttacattcaatttactgatggattctttcataaagaaagaaaattacaaagatgctttatctgtggtttttgaggtcatgatgcaagaagcctttgaagtgccttccacccaacttctctccctctatgttttatttcattgcctggcaaagaagacagacttcagttgggaagaggagaggaactttggtgcatcccttttgcttccaggcctaaaacaaaagaactcagtgggtttcagttcccagttgtatggctatgcacttcttgggaaggtggagttgcagcaagggctacgggctgtgtaccacaacatgcctctgatatggaaaccaggctaccttgacagagcccttcaagtgatggagaaagtggctgcctccccagaagacataaagctgtgtagagaagcgctcgatgtgctgggtgcagtgctgaaggctctgacttcagctgatggggcttcagaggagcagtcccaaaatgatgaagacaaccaggggtcagaaaaactggtggagcagttagacatcgaggaaacagagcagtccaagcttcctcaatacctggaacgatttaaggccttacattctaagcttcaagctctgggcaaaattgagtcagaaggtcttttaagtctgaccacccagcttgtcaaggaaaaactctccacctgtgaagcagaggacatcgccacctatgagcagaatctgcagcagtggcatctagaccttgtacagttgatccagagagaacagcaacagagggagcaagcgaagcaggagtaccaggctcagaaagcagcaaaggcatctgcctaatagggtcccccagggccccacctgtctcacaagaacttcactcaaccccgtgccaggactcagcagtggcctggacaacagcctcagcttcctctacccatcttcttttcttaaagcaggctatgtgccctacatggcaaggcaccatgactgcccatcgagatgccaagaagggctatggaactatgcaggtggctagtggtcagactgaagtcaccagctgaataccttaaggaggactcttgaggctcataatggagttcctggggcacagggattagttatgagcattaaagttcctaagacccagtgacagtactgggagaaaccaaggctgaagagtcaggttgaagcacaggcttttgttttttgttgtttttgttttttgagacagagtctcattctgtcacccaggctggagtgcagtggcgcaatcttggctcactgcaacctccgactcccaggttcaagcaattctcctgcctcggcctcctttagtaggtgggattacaggtgcataccaccacacctttctaatttttgcatttttagtagagatggggtttcaccatgttggtcaggctggtctcaacctcctgacctcaagtgatctgcccgcctcagcctcccaaagtgctgggatgataggcgtgagccaccacacccggccaagcacaggcttttgaatggtctccctctccccagcccaggtacatgaggccaaggtgaactgtgcatcctgagaccttgtgtccctgagtctcctttctgagtgcaagctgcactgtgagctggctgtgggatactcacacattcccacattctcctttctgccacatctcgcccttctggacctgcactgggagaaattcaggacaggagtgaactcaaggccatgaactcactggatttccatttttaggcacccatagggatgtttttaggatgtaagtttctgaggagaaagctagctctagcatgaagcttttttggattggcttctccatcgtgttggggtaacattttttttccaattttttttttcccaaaacatcgtctcagctcatttatcaagtaggtaaaatgagccttttgtgtacacacagaggcacatgtgcatgcacacacaacttgtgaacacacatttctgttaaagaagttagaaaatgagagatgggttggggcttgaagtgcatcagaggtatgaatgttgtaaaactgtcaggagatgtaaaattcctttctgaagtgtctcttctgtgaaagggttcagagcagattttgcttactatgtagtgttgcccttaagtacagtggtgtaattttattcaagattgtgctcttctatcaaaagcctctggaaataaatgttccgggatcatgttagtgtactctttatctttggggaaagggaggagggagagggactcattattgttactatgattttgaggagtgtactttaaaccctcccccattaaactatgggatttattgtaa

SEQ ID NO: 154642 - DNA, 956 bp, Homo sapiens
  Payload ID: 10397
  Gene Symbol: MRPS27
  Gene Name: mitochondrial ribosomal protein S27
  ENST ID: ENST00000508863
  CDS Start-End: 60-956
gatggctgcctccatagtgcggcgcgggatgctcctggcgcgctgatcttgcatctttaatggataaaacatttgagagaaagttgcctgttagttctttaacaatatcacggcttatagacaacatttcctctcgggaagagatagatcatgcagagtattacctttacaagtttcgacacagccccaactgctggtacctgagaaactggactatccacacctggattaggcagtgtctaaaatatgatgcacaagacaaagccctatatacccttgtaaataaggttcaatatggaatttttccagataactttacattcaatttactgatggattctttcataaagaaagaaaattacaaagatgctttatctgtggtttttgaggtcatgatgcaagaagcctttgaagtgccttccacccaacttctctccctctatgttttatttcattgcctggcaaagaagacagacttcagttgggaagaggagaggaactttggtgcatcccttttgcttccaggcctaaaacaaaagaactcagtgggtttcagttcccagttgtatggctatgcacttcttgggaaggtggagttgcagcaagggctacgggctgtgtaccacaacatgcctctgatatggaaaccaggctaccttgacagagcccttcaagtgatggagaaagtggctgcctccccagaagacataaagctgtgtagagaagcgctcgatgtgctgggtgcagtgctgaaggctctgacttcagctgatggggcttcagaggagcagtcccaaaatgatgaagacaaccaggggtcagaaaaactggtggagcagttagacatcgaggaaacagagcagtccaagcttcctcaatacctggaacgatttaaggccttacattctaagcttcaagctctgggcaaaattgagtcagaaggtcttttaagtctg

SEQ ID NO: 154643 - DNA, 1369 bp, Homo sapiens
  Payload ID: 10397
  Gene Symbol: MRPS27
  Gene Name: mitochondrial ribosomal protein S27
  Uniprot ID: Q92552
  ENST ID: ENST00000513900
  CDS Start-End: 11-1297
acgctccaagatggctgcctccatagtgcggcgcgggatgctcctggcgcggcaagtggttcttcctcagctctctcctgcaggtaaaagatacctgctttcttcagcctatgtagacagccacaaatgggaagcaagagaaaaagaacattactgtcttgctgatcttgcatctttaatggataaaacatttgagagaaagttgcctgttagttctttaacaatatcacggcttatagacaacatttcctctcgggaagagatagatcatgcagagtattacctttacaaaaagggagaatgctcatccagcaatccacagaattattccaggtttcgacacagccccaactgctggtacctgagaaactggactatccacacctggattaggcagtgtctaaaatatgatgcacaagacaaagccctatatacccttgtaaataaggttcaatatggaatttttccagataactttacattcaatttactgatggattctttcataaagaaagaaaattacaaagatgctttatctgtggtttttgaggtcatgatgcaagaagcctttgaagtgccttccacccaacttctctccctctatgttttatttcattgcctggcaaagaagacagacttcagttgggaagaggagaggaactttggtgcatcccttttgcttccaggcctaaaacaaaagaactcagtgggtttcagttcccagttgtatggctatgcacttcttgggaaggtggagttgcagcaagggctacgggctgtgtaccacaacatgcctctgatatggaaaccaggctaccttgacagagcccttcaagtgatggagaaagtggctgcctccccagaagacataaagctgtgtagagaagcgctcgatgtgctgggtgcagtgctgaaggctctgacttcagctgatggggcttcagaggagcagtcccaaaatgatgaagacaaccaggggtcagaaaaactggtggagcagttagacatcgaggaaacagagcagtccaagcttcctcaatacctggaacgatttaaggccttacattctaagcttcaagctctgggcaaaattgagtcagaaggtcttttaagtctgaccacccagcttgtcaaggaaaaactctccacctgtgaagcagaggacatcgccacctatgagcagaatctgcagcagtggcatctagaccttgtacagttgatccagagagaacagcaacagagggagcaagcgaagcaggagtaccaggctcagaaagcagcaaaggcatctgcctaatagggtcccccagggccccacctgtctcacaagaacttcactcaaccccgtgccaggactcagcagtggcct

SEQ ID NO: 154644 - DNA, 1183 bp, Homo sapiens
  Payload ID: 10397
  Gene Symbol: MRPS27
  Gene Name: mitochondrial ribosomal protein S27
  ENST ID: ENST00000515404
  CDS Start-End: 155-748
cttttggtacgctccaagatggctgcctccatagtgcggcgcgggatgctcctggcgcggtaaaagatacctgctttcttcagcctatgtagacagccacaaatgggaagcaagagaaaaagaacattactgtcttgctgatcttgcatctttaatggataaaacatttgagagaaagttgcctgttagttctttaacaatatcacggcttatagacaacatttcctctcgggaagagatagatcatgcagagtattacctttacaagtttcgacacagccccaactgctggtacctgagaaactggactatccacacctggattaggcagtgtctaaaatatgatgcacaagacaaagccctatatacccttgtaaataaggttcaatatggaatttttccagataactttacattcaatttactgatggattctttcataaagaaagaaaattacaaagatgctttatctgtggtttttgaggtcatgatgcaagaagcctttgaagtgccttccacccaacttctctccctctatgttttatttcattgcctggcaaagaagacagacttcagttgggaagaggagaggaactttggtgcatcccttttgcttccaggcctaaaacaaaagaactcagtgggtttcagttcccagttgtatggctatgcacttcttggtaagctaaatgatccttacaaatactgttcttcatggttagaattgttgcattcttccagttcataataaaattgtaatttgatttaaatttaccagtgaaatccaattagccttcgtttttagacataaaaatagaccttgatggccttacagttactccataagagagtaaagagggttcttaaaacctgccatcactggcaaagcaagaactagttctggtggatataggtaataatattcagtggtaatcagtctgaagaagggataaagaaagggatgttctggccctgtttagggagactagctagtagaatcttttccagtattaacaaagatctttctgtctctttagatctaaagtccagaaggtaagaaattaagagttagagttgaacttgtatctttggtattgttttcaggtaagggaagataaactaagagcagaagtagtagcacttcaggaaaagtggagtggttcatgggtaccatgtgattgca

SEQ ID NO: 154645 - DNA, 2628 bp, Homo sapiens
  Payload ID: 10397
  Gene Symbol: MRPS27
  Gene Name: mitochondrial ribosomal protein S27
  ENST ID: ENST00000457646
  CDS Start-End: 171-1247
aacccgttggctgttccttttggtacgctccaagatggctgcctccatagtgcggcgcgggatgctcctggcgcggtaaaagatacctgctttcttcagcctatgtagacagccacaaatgggaagcaagagaaaaagaacattactgtcttgctgatcttgcatctttaatggataaaacatttgagagaaagttgcctgttagttctttaacaatatcacggcttatagacaacatttcctctcgggaagagatagatcatgcagagtattacctttacaagtttcgacacagccccaactgctggtacctgagaaactggactatccacacctggattaggcagtgtctaaaatatgatgcacaagacaaagccctatatacccttgtaaataaggttcaatatggaatttttccagataactttacattcaatttactgatggattctttcataaagaaagaaaattacaaagatgctttatctgtggtttttgaggtcatgatgcaagaagcctttgaagtgccttccacccaacttctctccctctatgttttatttcattgcctggcaaagaagacagacttcagttgggaagaggagaggaactttggtgcatcccttttgcttccaggcctaaaacaaaagaactcagtgggtttcagttcccagttgtatggctatgcacttcttgggaaggtggagttgcagcaagggctacgggctgtgtaccacaacatgcctctgatatggaaaccaggctaccttgacagagcccttcaagtgatggagaaagtggctgcctccccagaagacataaagctgtgtagagaagcgctcgatgtgctgggtgcagtgctgaaggctctgacttcagctgatggggcttcagaggagcagtcccaaaatgatgaagacaaccaggggtcagaaaaactggtggagcagttagacatcgaggaaacagagcagtccaagcttcctcaatacctggaacgatttaaggccttacattctaagcttcaagctctgggcaaaattgagtcagaaggtcttttaagtctgaccacccagcttgtcaaggaaaaactctccacctgtgaagcagaggacatcgccacctatgagcagaatctgcagcagtggcatctagaccttgtacagttgatccagagagaacagcaacagagggagcaagcgaagcaggagtaccaggctcagaaagcagcaaaggcatctgcctaatagggtcccccagggccccacctgtctcacaagaacttcactcaaccccgtgccaggactcagcagtggcctggacaacagcctcagcttcctctacccatcttcttttcttaaagcaggctatgtgccctacatggcaaggcaccatgactgcccatcgagatgccaagaagggctatggaactatgcaggtggctagtggtcagactgaagtcaccagctgaataccttaaggaggactcttgaggctcataatggagttcctggggcacagggattagttatgagcattaaagttcctaagacccagtgacagtactgggagaaaccaaggctgaagagtcaggttgaagcacaggcttttgttttttgttgtttttgttttttgagacagagtctcattctgtcacccaggctggagtgcagtggcgcaatcttggctcactgcaacctccgactcccaggttcaagcaattctcctgcctcggcctcctttagtaggtgggattacaggtgcataccaccacacctttctaatttttgcatttttagtagagatggggtttcaccatgttggtcaggctggtctcaacctcctgacctcaagtgatctgcccgcctcagcctcccaaagtgctgggatgataggcgtgagccaccacacccggccaagcacaggcttttgaatggtctccctctccccagcccaggtacatgaggccaaggtgaactgtgcatcctgagaccttgtgtccctgagtctcctttctgagtgcaagctgcactgtgagctggctgtgggatactcacacattcccacattctcctttctgccacatctcgcccttctggacctgcactgggagaaattcaggacaggagtgaactcaaggccatgaactcactggatttccatttttaggcacccatagggatgtttttaggatgtaagtttctgaggagaaagctagctctagcatgaagcttttttggattggcttctccatcgtgttggggtaacattttttttccaattttttttttcccaaaacatcgtctcagctcatttatcaagtaggtaaaatgagccttttgtgtacacacagaggcacatgtgcatgcacacacaacttgtgaacacacatttctgttaaagaagttagaaaatgagagatgggttggggcttgaagtgcatcagaggtatgaatgttgtaaaactgtcaggagatgtaaaattcctttctgaagtgtctcttctgtgaaagggttcagagcagattttgcttactatgtagtgttgcccttaagtacagtggtgtaattttattcaagattgtgctcttctatcaaaagcctctggaaataaatgttccgggatca

SEQ ID NO: 154646 - DNA, 504 bp, Homo sapiens
  Payload ID: 10397
  Gene Symbol: MRPS27
  Gene Name: mitochondrial ribosomal protein S27
  ENST ID: ENST00000522095
  CDS Start-End: 8-292
ctccaagatggctgcctccatagtgcggcgcgggatgctcctggcgcggcaagtggttcttcctcagctctctcctgcaggtaaaagatacctgctttcttcagcctatgtagacagccacaaatgggaagcaagagaaaaagaacattactgtcttgctgatcttgcatctttaatggataaaacatttgagagaaagttgcctgttagttctttaacaatatcacggcttatagacaacatttcctctcgggaagagatagatcatgcagagtattacctttacaagtaagttttccatttgatttggctatgtactctgtgatttcacaccccttttttacataaaagttggtatatgttgtgtataattttgacaccttctaagtttatattttaaagatcttttcatatgagtatagagagagtttctgattttttataactgcattttattccatactgtgagtttattatttaaaccagttccctttttatggacct

SEQ ID NO: 154647 - DNA, 850 bp, Homo sapiens
  Payload ID: 10398
  Gene Symbol: MRPS28
  Gene Name: mitochondrial ribosomal protein S28
  Uniprot ID: Q9Y2Q9
  ENST ID: ENST00000276585
  CDS Start-End: 24-587
caaaggtcagaggtaaagaagtcatggcggcgctgtgtcggacccgtgctgtggctgccgagagccattttctgcgagtgtttctcttcttcaggccctttcggggtgtaggcactgagagtggatccgaaagtggtagttccaatgccaaggagcctaagacgcgcgcaggcggtttcgcgagcgcgttggagcggcactcggagcttctacagaaggtggagcccctacagaagggttctccaaaaaatgtggaatcctttgcatctatgctgagacattctcctcttacacagatgggacctgcaaaggataaactggtcattggacggatctttcatattgtggagaatgatctgtacatagattttggtggaaagtttcattgtgtatgtagaagaccagaagtggatggagagaaataccagaaaggaaccagggtccggttgcggctattagatcttgaacttacgtctaggttcctgggagcaacaacagatacaactgtactagaggctaatgcagttctcttgggaatccaggagagtaaagactcaagatcgaaagaagaacatcatgaaaaataaatgaactttgcttagtggattgactcctttgctgaagtcagttattcatcaagaatgcaattagactaattgtgaataaatgattgaatgaagatataataaataaaagctataattatagataactcttattagaattttctttagcaatattcccaccccccaccccttgttttgctcttaatgtttttttcctttggtggggatagtatacactgtactaagaaattgtcattcaataaatacgttttgagtgctgtcta

SEQ ID NO: 154648 - DNA, 487 bp, Homo sapiens
  Payload ID: 10398
  Gene Symbol: MRPS28
  Gene Name: mitochondrial ribosomal protein S28
  ENST ID: ENST00000518271
  CDS Start-End: 1-487
ggacccgtgctgtggctgccgagagccattttctgcgagtgtttctcttcttcaggccctttcggggtgtaggcactgagagtggatccgaaagtggtagttccaatgccaaggagcctaagacgcgcgcaggcggtttcgcgagcgcgttggagcggcactcggagcttctacagaagagatggggttttgccatgttgcccaggctggtcttgaactcctgggttcaagtgatcctcctgcgttggcctcccaaagtgctgggattacagatgacagatggttctccaaaaaatgtggaatcctttgcatctatgctgagacattctcctcttacacagatgggacctgcaaaggataaactggtcattggacggatctttcatattgtggagaatgatctgtacatagattttggtggaaagtttcattgtgtatgtagaagaccagaagtggatggagagaaataccagaaaggaaccagggt

SEQ ID NO: 154649 - DNA, 437 bp, Homo sapiens
  Payload ID: 10398
  Gene Symbol: MRPS28
  Gene Name: mitochondrial ribosomal protein S28
  ENST ID: ENST00000521605
  CDS Start-End: 42-302
cgcttgcggaggggaggtcaaaggtcagaggtaaagaagtcatggcggcgctgtgtcggacccgtgctgtggctgccgagagccattttctgcgagtgtttctcttcttcaggccctttcggggtgtaggcactgagagtggatccgaaagtggtagttccaatgccaaggagcctaagacgcgcgcaggcggtttcgcgagcgcgttggagcggcactcggagcttctacagaaggtggagcccctacagaaggaaataccagaaaggaaccagggtccggttgcggctattagatcttgaacttacgtctaggttcctgggagcaacaacagatacaactgtactagaggctaatgcagttctcttgggaatccaggagagtaaagactcaagatcgaaagaagaacatcatgaaaaataaatgaactttgctta

SEQ ID NO: 154650 - DNA, 555 bp, Homo sapiens
  Payload ID: 10398
  Gene Symbol: MRPS28
  Gene Name: mitochondrial ribosomal protein S28
  ENST ID: ENST00000519386
  CDS Start-End: 1-430
cttttgtgtggcatttgcgtactgggccgggtctgtccacactgcgcttgttttcctgggattgaatgctggtgggaagggttctccaaaaaatgtggaatcctttgcatctatgctgagacattctcctcttacacagatgggacctgcaaaggataaactggtcattggacggatctttcatattgtggagaatgatctgtacatagattttggtggaaagtttcattgtgtatgtagaagaccagaagtggatggagagaaataccagaaaggaaccagggtccggttgcggctattagatcttgaacttacgtctaggttcctgggagcaacaacagatacaactgtactagaggctaatgcagttctcttgggaatccaggagagtaaagactcaagatcgaaagaagaacatcatgaaaaataaatgaactttgcttagtggattgactcctttgctgaagtcagttattcatcaagaatgcaattagactaattgtgaataaatgattgaatgaagatataataaataaaagctataattatagataa

SEQ ID NO: 154651 - DNA, 403 bp, Homo sapiens
  Payload ID: 10398
  Gene Symbol: MRPS28
  Gene Name: mitochondrial ribosomal protein S28
  ENST ID: ENST00000519120
  CDS Start-End: 94-403
gggcggagcctggcttaggaaggggagctgaggtccggggcccagttttccggagttgcgggttctccaaaaaatgtggaatcctttgcatctatgctgagacattctcctcttacacagatgggacctgcaaaggataaactggtcattggacggatctttcatattgtggagaatgatctgtacatagattttggtggaaagtttcattgtgtatgtagaagaccagaagtggatggagagaaataccagaaaggaaccagggtccggttgcggctattagatcttgaacttacgtctaggttcctgggagcaacaacagatacaactgtactagaggctaatgcagttctcttgggaatccaggagagtaaagactcaagatcgaaagaagaacatcatg

SEQ ID NO: 154652 - DNA, 585 bp, Homo sapiens
  Payload ID: 10398
  Gene Symbol: MRPS28
  Gene Name: mitochondrial ribosomal protein S28
  ENST ID: ENST00000521434
  CDS Start-End: 168-545
gagttgcggtgcgttgtggctcagccctcggcccctagaatctgtgcttggtgtttttcttcctttcgttgtccttttgtgtggcatttgcgtactgggccgggtctgtccacactgcgcttgttttcctgggattgaatgctggtgggaagagatggggttttgccatgttgcccaggctggtcttgaactcctgggttcaagtgatcctcctgcgttggcctcccaaagtgctgggattacagatgacagatatgggacctgcaaaggataaactggtcattggacggatctttcatattgtggagaatgatctgtacatagattttggtggaaagtttcattgtgtatgtagaagaccagaagtggatggagagaaataccagaaaggaaccagggtccggttgcggctattagatcttgaacttacgtctaggttcctgggagcaacaacagatacaactgtactagaggctaatgcagttctcttgggaatccaggagagtaaagactcaagatcgaaagaagaacatcatgaaaaataaatgaactttgcttagtggattgactcctttgctgaagtca

SEQ ID NO: 154653 - DNA, 411 bp, Homo sapiens
  Payload ID: 10398
  Gene Symbol: MRPS28
  Gene Name: mitochondrial ribosomal protein S28
  ENST ID: ENST00000520946
  CDS Start-End: 86-411
tcgggaataggggcggagcctggcttaggaaggggagctgaggtccggggcccagttttccggagttgcgagatggggttttgccatgttgcccaggctggtcttgaactcctgggttcaagtgatcctcctgcgttggcctcccaaagtgctgggattacagatgacagatatgggacctgcaaaggataaactggtcattggacggatctttcatattgtggagaatgatctgtacatagattttggtggaaagtttcattgtgtatgtagaagaccagaagtggatggagagaaataccagaaaggaaccagggtccggttgcggctattagatcttgaacttacgtctaggttcctgggagcaacaacagatacaactgtactagaggctaatgcagttctcttggg

SEQ ID NO: 154654 - DNA, 783 bp, Homo sapiens
  Payload ID: 10398
  Gene Symbol: MRPS28
  Gene Name: mitochondrial ribosomal protein S28
  ENST ID: ENST00000518371
  CDS Start-End: 1-250
tatgctgagacattctcctcttacacagatgggacctgcaaaggataaactggtcattggacggatctttcatattgtggagaatgatctgtacatagattttggtggaaagtttcattgtgtatgtagaagaccagaagtggatggagagagtcccatttcgtggtatgctgtttggaggagattttcacaagtgatgataacctgtttttcttccaactctgactttggaaaacatcgtaaaagataaagaagttgtaatacaacatggatgaaccctgaaaacattatgccaaatgaaagaagccattcacaaaagatcatatattgtatgattccatttatatgaaatgttcagaatagacaaatccacagagacagaaagtagattagtcatccccagagtctagaataggggagggggagagattgctaatgagtacagggtttcttttttggggtgatgaaaatgttctaaaattaggttatggtaaaagctgtacagctctgagaatatattcaaagtcactgaattatacactttgggtagattttatgatatgtgaattatatctcaataaagctgttaaagttttagtataccactttagaatagtaaatatgttacatgtggactaaatcattagcctagcttcattttaatagaatgtaatatccacactgtaatatgtgaatctatacagctctaaaagatgactgtttaagacatttgtgtcttcttcaaccacatgatcagcagagttaaaaatgcacttgttcagc

SEQ ID NO: 154655 - DNA, 1678 bp, Homo sapiens
  Payload ID: 10399
  Gene Symbol: MRPS30
  Gene Name: mitochondrial ribosomal protein S30
  Uniprot ID: Q9NP92
  ENST ID: ENST00000507110
  CDS Start-End: 39-1358
gcttaagttgacctctgggtccggaatcgcgggcaaagatggcggcggccaggtgttggaggcctttgctacgcggtccgaggctttcattgcacaccgcggctaatgccgccgccacggctacagaaacgacctgccaagacgtcgcggcgacccccgtcgcgcggtacccgccgattgtggcctccatgacagccgacagcaaagctgcacggctgcggcggatcgagcgctggcaggcgacggtgcacgctgcggagtcggtagacgagaagctgcgaatcctcaccaagatgcagtttatgaagtacatggtttacccgcagaccttcgcgctgaatgccgaccgctggtaccagtacttcaccaagaccgtgttcctgtcgggtctgccgccgcccccagcggagcccgagcccgagcccgaacccgaacctgaacctgcgctggacctcgcggcgctgcgtgcggtcgcctgcgactgcctgctgcaggagcacttctacctgcggcgcaggcggcgcgtgcaccgttacgaggagagcgaggtcatatctttgcccttcctggatcagctggtgtcaaccctcgtgggcctcctcagcccacacaacccggccctggccgctgccgccctcgattatagatgcccagttcatttttactgggtgcgtggtgaagaaattattcctcgtggtcatcgaagaggtcgaattgatgacttgcgataccagatagatgataaaccaaacaaccagattcgaatatccaagcaactcgcagagtttgtgccattggattattctgttcctatagaaatccccactataaaatgtaaaccagacaaacttccattattcaaacggcagtatgaaaaccacatatttgttggctcaaaaactgcagatccttgctgttacggtcacacccagtttcatctgttacctgacaaattaagaagggaaaggcttttgagacaaaactgtgctgatcagatagaagttgtttttagagctaatgctattgcaagcctttttgcttggactggagcacaagctatgtatcaaggattctggagtgaagcagatgttactcgaccttttgtctcccaggctgtgatcacagatggaaaatacttttcctttttctgctaccagctaaatactttggcactgactacacaagctgatcaaaataaccctcgtaaaaatatatgttggggtacacaaagtaagcctctttatgaaacaattgaggataatgatgtgaaaggttttaatgatgatgttctacttcagatagttcactttctactgaatagaccaaaagaagaaaaatcacagctgttggaaaactgaaaaagcatatttgattgagaactgtgggaatatttaaattttactgaaggaacaataatgatgagatttgtaactgtcaactattaaatacattgatttttgagacaaatatttcttatgtcaacctgttattagatctcttactctgctcaaattcatcactgaaagatttaattttagttaccttttgttgatttaaaaataattgcatttgtatattgctaactgataagacaaattgagttattgagctattaaatgcacattttaatataaatgcagaaatcccaaataaaatgctaacatactgaattcagtaa

SEQ ID NO: 154656 - DNA, 1156 bp, Homo sapiens
  Payload ID: 10399
  Gene Symbol: MRPS30
  Gene Name: mitochondrial ribosomal protein S30
  ENST ID: ENST00000622078
  CDS Start-End: 39-1052
tatgaagtacatggtttacccgcagaccttcgcgctgaatgccgaccgctggtaccagtacttcaccaagaccgtgttcctgtcgggtctgccgccgcccccagcggagcccgagcccgagcccgaacccgaacctgaacctgcgctggacctcgcggcgctgcgtgcggtcgcctgcgactgcctgctgcaggagcacttacctgcggcgcggcggcgcgtgcaccgttacgaggagagcgaggtcatatctttgcccttcctggatcagctggtgtcaaccctcgtgggcctcctcagcccacacaacccggccctggccggccgccctcgattatagatgcccagttcatttttactgggtgcgtggtgaagaaattattcctcgtggtcatcgaagaggtcgaattgatgacttgcgataccagatagatgataaaccaaacaaccagattcgaatatccaagcaactcgcagagtttgtgccattggattattctgttcctatagaaatccccactataaaatgtaaaccagacaaacttccattattcaaacggcagtatgaaaaccacatatttgttggctcaaaaactgcagatccttgctgttacggtcacacccagtttcatctgttacctgacaaattaagaagggaaaggcttttgagacaaaactgtgctgatcagatagaagttgtttttagagctaatgctattgcaagcctttttgcttggactggagcacaagctatgtatcaaggattctggagtgaagcagatgttactcgaccttttgtctcccaggctgtgatcacagatggaaaatacttttcctttttctgctaccagctaaatactttggcactgactacacaagctgatcaaaataaccctcgtaaaaatatatgttggggtacacaaagtaagcctctttatgaaacaattgaggataatgatgtgaaaggttttaatgatgatgttctacttcagatagttcactttctactgaatagaccaaaagaagaaaaatcacagctgttggaaaactgaaaaagcatatttgattgagaactgtgggaatatttaaattttactgaaggaacaataatgatgagatttgtaactgtcaactattaaatacattgatttttgag

SEQ ID NO: 154657 - DNA, 1462 bp, Homo sapiens
  Payload ID: 10400
  Gene Symbol: MRPS31
  Gene Name: mitochondrial ribosomal protein S31
  Uniprot ID: Q92665
  ENST ID: ENST00000323563
  CDS Start-End: 38-1225
tttcagttgtgttcttggttcatttcgtgtctcggcgatgtttcctagagtctcgacgttcctacctcttcgccccctttcccgccaccctttgtcctctggaagcccggagacatcagcggctgcgattatgctactcactgttcggcacggaacagtcaggtaccgcagttcagcgctgttggcccggacaaaaaataacatccaaagatattttggcactaacagtgtgatctgtagcaagaaagataagcagtctgttcgaactgaggagacttccaaggagacttcagagagccaagacagtgaaaaggaaaatacgaaaaaagacttgttaggcattattaagggcatgaaagttgaattaagcacagtaaatgtacgaacaacaaagccccccaaaagaagaccacttaaaagtttggaagctacacttggcaggcttcgaagagctacagaatatgctccaaagaagagaattgagcccctgagtcctgagttggtggcagctgcatctgctgtggcagattctctcccttttgataagcaaacaaccaagtcagagctgctgagccagctccagcagcatgaggaagagtcaagggcacagagagatgcaaagcgacctaaaattagtttcagtaacataatatcagatatgaaagttgccagatctgctacagctagagttcgttcaagaccagagcttcggattcagtttgatgaaggctatgacaattatcctggccaggagaagacggatgatcttaaaaaaaggaaaaatatattcacagggaaaagacttaatatttttgacatgatggcagttactaaagaagcacctgaaacagacacatcaccttcactttgggatgtggaatttgctaagcagttagccacagtaaatgaacaaccccttcagaatggatttgaagagctgatccagtggacaaaagaggggaaactatgggagttcccaattaacaatgaagcaggttttgatgatgatggttcagaatttcatgaacatatatttctggagaaacacctggagagctttccaaaacaaggaccaattcgccacttcatggagctggtgacttgtggcctttccaaaaacccatatcttagtgttaaacagaaggttgaacacatagagtggtttagaaattattttaatgaaaaaaaggatattctaaaagaaagtaacatacagttcaattaagaccatggaaatttttatttcaaacaattagagatggatattacaactaaataaaataattttactagagtttgtatatgttatgttgattattacatttgatttggctggtataaatgttacattgttttcaaaaatatgatggtaactgaaaaatattcttgcatggagaaaaatcatcagtattcataggttcaaaagaatatctgggaattagtaatacatttaagacaacaa

SEQ ID NO: 154658 - DNA, 4241 bp, Homo sapiens
  Payload ID: 10401
  Gene Symbol: MRPS33
  Gene Name: mitochondrial ribosomal protein S33
  Uniprot ID: Q9Y291
  ENST ID: ENST00000324787
  CDS Start-End: 101-421
gcgcgagcttggagccgggtagagggcgggccttccgggacgagggcgcgtgggtgaggaaggtcaggtctaggaactctaactccttgccactcaagaaatgtcctccctttcagaatatgccttccgcatgtctcgtctcagtgcccggctatttggtgaagtcaccaggcctactaattccaagtctatgaaagtggtgaaactgtttagtgaactgcccttggccaagaagaaggagacttatgattggtatccaaatcaccacacttacgctgaactcatgcagacgctccgatttcttggactctacagagatgagcatcaggattttatggatgagcaaaaacgactaaagaagcttcgtggaaaggagaaaccaaagaaaggagaagggaaaagagcagcaaaaaggaaatagtgttggtccctcaagagggagactttcttcctcagtggcggagagaagaaagtgcatttattgtctttccacctattggaggaatgtcatcttcctaaatgaagtttatttggaggaacacagtcatctccttggtgaaatctaatccggttacattgtggctggtttcttgaacacattctaactgtgcaaaattatcttggccttggccgtgtaatgtgaggtttacctgattctctaatgaaataaatacctaagttattgtttgatgatttgtttggggtgggatgggatgctgggggaatggaggggaaacctcattaagtgagcatcctatagtgtcctcatttctcccttcttgcttactgactcacccagccctaaacttctttcatcttgggcctttcagccactgtctccaccaccaagctcacaaactttgtgtgtgtcttcacctactcctttgagaaatctattaagatgaatttgtagagtaagtatcttttaaaaggaagtattgaatacctgctctgtacaagatattggggccctggtaatacacgtggttagcaagagaaatactccctacctcatgtaagtttcagtcttgtgggagggactaatattacataattacatacaattgtattacatgctacaaaggaaaaagccagacttctataagagcatggatggatggatgaatgcagagagagatagccagaagcccaaatcacattagggagtttaaagaaagcttccctaaagaaatgatatttaagccaggcgctgttgctcacacctgtaatcccaccactttgggaggccgaggtgggtggatcacaaggtcaagagatcgagaccattttggccaacatggtgaaaccccacctactaaaaatgcaaaaattagctgggcgtcgtggcatgcacctgtagtctcagctactcgggatgctgaggcaggagaatcgcttgaacccgggaggcaaaggttgcagtgagttgagatcacgccactgcactccagcctggcaacagagcaagactacatctcaaaaaaaaaatgatatttaagctgaaccttgaagaataaataagaggttgccaaaaggaaaatggtgagaaaggggtttgaggcagagagtactatttgcaaagccctaaggtatgaagaaattgtctgttcaagaaacactgagtttgttcatggttggctgtaagaaaacagaggccagatcatgaagggctttggaaattctgtggaaaagcttgaacataactagaagttctatgagggatgactgttgtatagatttgagtagctcgctgctggttttattgtattccagcaatgagtttccaaagaaattgtgaaggcttggccgggcacagtggctcacgcctgtaatcccagcactttgggaggtcgaggcgggtggatcacgaggtcaggggatcgagaccatcctggctaacatggtgaaaccccgtctctactaaaaaatgcaaaaaagttagccgggcgtggtggtgggtgcctgtagtcccagctacttgggaggctgaggcaggagaatggcagggaggcggagcttgcagtaagctgagatggtgccactgcactccagcctgggcaacaaagcgagactctgtctcaaaaaaaaaattgtgaaggcttctctgatttttttttccaacagttgttctgaatctttagcatgtccagtaattttttaataactttttattattgtagtaaaaacataaaattaatgatcttaaccatatttaagtgtacaatagtgtcaatattcaaacatattattcaaaaaataatcaaaatataaaagcattttagtgcgatagtatttattggagtatgtatagcagctactccagccacagttttctttctctgtaacactcaatgattcctgaagtagaaagattcccagtacatatgtttaaatgaatgctatttttaaagatacctaatccagatggtatggctagggcctattttatagcctgtttaaaaaaataaaataaaataaaattgggtggtttgtatgtggtagaagtgaattccagcaaaaggagaattcattcatttagacctttttttttgtttgagacggagtctcactctcaccagctggagtgcagtggcgcaatctcagctcactgcaagctccacctcccgggttcacgccattctcctgcctcagcctcccaagtagctgggactacaggcgcccaccaccacgcccggctaatattttgtatttttagtagagaaggtgtctcactgtgttagccaggatggtctcaacctcttgacctcctgatccacccacctcagactcccaaagtgctggaattacaggcatgagccaccacacccagcccatttagaactttttactgagcacctgccatgtgctcgacacgtgatagttgtagaggatacagagacaaatagacttagtccctaagactgtgtgaatgagcatgtgtgtattacaaagtattggcaagatctcagaaacgtgcttagaaaagtgcagatgcactgttattcttggccaatgcagctgagccaggtgtaggtggatgactaccccaggatgttgagctgagaaacaggatctcagcctgaacccaatgtagctcagcagatgtttgaattatgtgatctccagcttttgggaaagatctgaatgtaagaggaacttaagagaattagcatgatattttaaagagaataactgcattacattctaacagcagacctgagtcggaaaacaagtaaagaatcgatgtattggtttgccgatggaagagcttcagtgagatctcagaccctgaccctgcagtgagccttggcaatgattgacagggaagtttgtagataacgcagaagtagattagtgtgccactgctccaggctgaaaatcagaaatgaaagctaaaatacatttgtacataagctataccttcaattgatagagcaagctgtgtgactcaaaacagcctgtacagaagtacgatggaccagctggaaggtatcaatagaagataaggaaaagttaactcttgacaccagggaagtcaacaaatttcaggacaacagtgaccaatggttaagatggtgactaagtgtaatcagaaaaaaatctttaactccaagtttagactagccagtttgtttaattggatttctctggtcaaaacctaaactattggtgctttctaacctgtggggatcagtgtgcatagaccattttgccctcgatttcagcataacatagtaaaaagactgggttttagattcaaaagtcatgggtttgtgatacagtgtacttactgattatgtgacgtcagttacttctctgaacctctttccttctctataaaatcataatgcttcactggattaatgaaataagatatttgtgaaaagaactctgtaaattataaaaagttaaaaacttttacatatagcacattatgtgactagtaagtactgctgtgtcttactagcgcaattttctgtggcagcattgacacgtatctcctaaaaatataaagttccccacgtttacaagcagcatgataggttcaggaagaggaggtagatgagaggtaacatcttattatttatgtaattatgggctccataagtttattttttaagcaccatatatgtgtgtgtttcaaaataaacataaggcatcatatatttaaacatatataaccataatgcttgtatttataaatcattttccaagaaagaataaatcaaaatttgaaattc

SEQ ID NO: 154659 - DNA, 853 bp, Homo sapiens
  Payload ID: 10401
  Gene Symbol: MRPS33
  Gene Name: mitochondrial ribosomal protein S33
  Uniprot ID: Q9Y291
  ENST ID: ENST00000393008
  CDS Start-End: 157-477
gcaattactctcttccatattggttaacagtagaaggctcagtttctctgctcatcacacggccttcggcactgtagctttgggtggtgggctgcagattaattttgtaaccaccttaagaaaaatacggaactctaactccttgccactcaagaaatgtcctccctttcagaatatgccttccgcatgtctcgtctcagtgcccggctatttggtgaagtcaccaggcctactaattccaagtctatgaaagtggtgaaactgtttagtgaactgcccttggccaagaagaaggagacttatgattggtatccaaatcaccacacttacgctgaactcatgcagacgctccgatttcttggactctacagagatgagcatcaggattttatggatgagcaaaaacgactaaagaagcttcgtggaaaggagaaaccaaagaaaggagaagggaaaagagcagcaaaaaggaaatagtgttggtccctcaagagggagactttcttcctcagtggcggagagaagaaagtgcatttattgtctttccacctattggaggaatgtcatcttcctaaatgaagtttatttggaggaacacagtcatctccttggtgaaatctaatccggttacattgtggctggtttcttgaacacattctaactgtgcaaaattatcttggccttggccgtgtaatgtgaggtttacctgattctctaatgaaataaatacctaagttattgtttgatgatttgtttggggtgggatgggatgctgggggaatggaggggaaacctcattaagtgagcatcctatagtgtcctcatttctcccttcttgcttactgactcaccc

SEQ ID NO: 154660 - DNA, 744 bp, Homo sapiens
  Payload ID: 10401
  Gene Symbol: MRPS33
  Gene Name: mitochondrial ribosomal protein S33
  Uniprot ID: Q9Y291
  ENST ID: ENST00000469351
  CDS Start-End: 162-482
attcccaccaaaacatactaccgaaccgtgcatgcccttccaggagagccagacctttctaactctccccagcccaccacctccccgggtcctccgcacaggcggcggcgctagccttactgcgcaggcgccaggaactctaactccttgccactcaagaaatgtcctccctttcagaatatgccttccgcatgtctcgtctcagtgcccggctatttggtgaagtcaccaggcctactaattccaagtctatgaaagtggtgaaactgtttagtgaactgcccttggccaagaagaaggagacttatgattggtatccaaatcaccacacttacgctgaactcatgcagacgctccgatttcttggactctacagagatgagcatcaggattttatggatgagcaaaaacgactaaagaagcttcgtggaaaggagaaaccaaagaaaggagaagggaaaagagcagcaaaaaggaaatagtgttggtccctcaagagggagactttcttcctcagtggcggagagaagaaagtgcatttattgtctttccacctattggaggaatgtcatcttcctaaatgaagtttatttggaggaacacagtcatctccttggtgaaatctaatccggttacattgtggctggtttcttgaacacattctaactgtgcaaaattatcttggccttggccgtgtaatgtgaggtttacctgattctctaatgaaataaatacctaagttat

SEQ ID NO: 154661 - DNA, 688 bp, Homo sapiens
  Payload ID: 10401
  Gene Symbol: MRPS33
  Gene Name: mitochondrial ribosomal protein S33
  Uniprot ID: Q9Y291
  ENST ID: ENST00000496958
  CDS Start-End: 106-426
agattgttcttgatgaactgaatgcagctaatacattttcagtgccgttgatgcctctatgactccgtaaaataatcggaactctaactccttgccactcaagaaatgtcctccctttcagaatatgccttccgcatgtctcgtctcagtgcccggctatttggtgaagtcaccaggcctactaattccaagtctatgaaagtggtgaaactgtttagtgaactgcccttggccaagaagaaggagacttatgattggtatccaaatcaccacacttacgctgaactcatgcagacgctccgatttcttggactctacagagatgagcatcaggattttatggatgagcaaaaacgactaaagaagcttcgtggaaaggagaaaccaaagaaaggagaagggaaaagagcagcaaaaaggaaatagtgttggtccctcaagagggagactttcttcctcagtggcggagagaagaaagtgcatttattgtctttccacctattggaggaatgtcatcttcctaaatgaagtttatttggaggaacacagtcatctccttggtgaaatctaatccggttacattgtggctggtttcttgaacacattctaactgtgcaaaattatcttggccttggccgtgtaatgtgaggtttacctgattctctaatgaaataaatacctaagttat

SEQ ID NO: 154662 - DNA, 622 bp, Homo sapiens
  Payload ID: 10401
  Gene Symbol: MRPS33
  Gene Name: mitochondrial ribosomal protein S33
  ENST ID: ENST00000467334
  CDS Start-End: 71-361
ggtagagggcgggccttccgggacgagggcgcgtgggtgaggaaggtcaggtctagaatatgccttccgcatgtctcgtctcagtgcccggctatttggtgaagtcaccaggcctactaattccaagtctatgaaagtggtgaaactgtttagtgaactgcccttggccaagaagaaggagacttatgattggtatccaaatcaccacacttacgctgaactcatgcagacgctccgatttcttggactctacagagatgagcatcaggattttatggatgagcaaaaacgactaaagaagcttcgtggaaaggagaaaccaaagaaaggagaagggaaaagagcagcaaaaaggaaatagtgttggtccctcaagagggagactttcttcctcagtggcggagagaagaaagtgcatttattgtctttccacctattggaggaatgtcatcttcctaaatgaagtttatttggaggaacacagtcatctccttggtgaaatctaatccggttacattgtggctggtttcttgaacacattctaactgtgcaaaattatcttggccttggccgtgtaatgtgaggtttacctgattctctaatgaaataaatacctaagtta

SEQ ID NO: 154663 - DNA, 1040 bp, Homo sapiens
  Payload ID: 10402
  Gene Symbol: MRPS34
  Gene Name: mitochondrial ribosomal protein S34
  ENST ID: ENST00000177742
  CDS Start-End: 32-709
ccggccggaccgctgaggacgcggacccgccatggcgcggaagaaggtgcgtccgcggctgatcgcggagctggcccgccgcgtgcgcgccctgcgggagcaactgaacaggccgcgcgactcccagctctacgcggtggactacgagaccttgacgcggccgttctctggacgccggctgccggtccgggcctgggccgacgtgcgccgcgagagccgcctcttgcagctgctcggccgcctcccgctcttcggcctgggccgcctggtcacgcgcaagtcctggctgtggcagcacgacgagccgtgctactggcgcctcacgcgggtgcggcccgactacacggcgcagaacttggaccacgggaaggcctggggcatcctgaccttcaaagacgcctctttttcttcatcagggaagactgagagcgaggcgcgggagatcgaacacgtcatgtaccatgactggcggctggtgcccaagcacgaggaggaggccttcaccgcgttcacgccggcgccggaagacagcctggcctccgtgccgtacccgcctctcctccgggccatgattatcgcagaacgacagaaaaatggagacacaagcaccgaggagcccatgctgaatgtgcagaggatacgcatggaaccctgggattaccctgcaaaacaggaagacaaaggaagggccaagggcacccccgtctagaatgccagaaccagcgggtggccttaggggctgtgaggcagtggggaccttattgatgaaagaaaccgtctttgcgttacacccgagtctgcctctcggagcagggagctcaccttccgcgacgtgttctgagggtctgcatcttaggggggagggctggggcaaatcgccacctgtgcctttcctctggccctgctgcccccacacccaactccgagggcccacgctggggaaagcgggaagcgctcgctccctttcccccattagtgctctctctgcctggatcccggcagaagctatgaaagggaataaagagaaaagaagtacccag

SEQ ID NO: 154664 - DNA, 1024 bp, Homo sapiens
  Payload ID: 10402
  Gene Symbol: MRPS34
  Gene Name: mitochondrial ribosomal protein S34
  Uniprot ID: P82930
  ENST ID: ENST00000397375
  CDS Start-End: 37-693
gacttccggccggaccgctgaggacgcggacccgccatggcgcggaagaaggtgcgtccgcggctgatcgcggagctggcccgccgcgtgcgcgccctgcgggagcaactgaacaggccgcgcgactcccagctctacgcggtggactacgagaccttgacgcggccgttctctggacgccggctgccggtccgggcctgggccgacgtgcgccgcgagagccgcctcttgcagctgctcggccgcctcccgctcttcggcctgggccgcctggtcacgcgcaagtcctggctgtggcagcacgacgagccgtgctactggcgcctcacgcgggtgcggcccgactacacggcgcagaacttggaccacgggaaggcctggggcatcctgaccttcaaagggaagactgagagcgaggcgcgggagatcgaacacgtcatgtaccatgactggcggctggtgcccaagcacgaggaggaggccttcaccgcgttcacgccggcgccggaagacagcctggcctccgtgccgtacccgcctctcctccgggccatgattatcgcagaacgacagaaaaatggagacacaagcaccgaggagcccatgctgaatgtgcagaggatacgcatggaaccctgggattaccctgcaaaacaggaagacaaaggaagggccaagggcacccccgtctagaatgccagaaccagcgggtggccttaggggctgtgaggcagtggggaccttattgatgaaagaaaccgtctttgcgttacacccgagtctgcctctcggagcagggagctcaccttccgcgacgtgttctgagggtctgcatcttaggggggagggctggggcaaatcgccacctgtgcctttcctctggccctgctgcccccacacccaactccgagggcccacgctggggaaagcgggaagcgctcgctccctttcccccattagtgctctctctgcctggatcccggcagaagctatgaaagggaataaagagaaaagaagtacccag

SEQ ID NO: 154665 - DNA, 543 bp, Homo sapiens
  Payload ID: 10402
  Gene Symbol: MRPS34
  Gene Name: mitochondrial ribosomal protein S34
  ENST ID: ENST00000613089
  CDS Start-End: 1-531
atggcgcggaagaaggtgcgtccgcggctgatcgcggagctggcccgccgcgtgcgcgccctgcgggagcaactgaacaggccgcgcgactcccagctctacgcggtggactacgagaccttgacgcggccgttctctggacgccggctgccggtccgggcctgggccgacgtgcgccgcgagagccgcctcttgcagctgctcggccgcctcccgctcttcggcctgggccgcctggtcacgcgcaagtcctggctgtggcagcacgacgagccgtgctactggcgcctcacgcgggtgcggcccgactacacggcgcagaacttggaccacgggaaggcctggggcatcctgaccttcaaagacgcctctttttcttcatcagggaagactgagagcgaggcgcgggagatcgaacacgtcatgtaccatgactggcggctggtgcccaagcacgaggaggaggccttcaccgcgtcacgccgggccggaagacagctggcctcctgccgtcccgcctctgggccatgattatcgcagaac

SEQ ID NO: 154666 - DNA, 1888 bp, Homo sapiens
  Payload ID: 10403
  Gene Symbol: MRPS35
  Gene Name: mitochondrial ribosomal protein S35
  Uniprot ID: P82673
  ENST ID: ENST00000081029
  CDS Start-End: 72-1043
gcttagcggccccaggcccgcccctgacactgaacgccgcttgtcccctccggcttgccgtcctcgcagccatggcggccgccgcgctcccagcatggctgtctctgcagtcgagggcaaggactctgcgtgcattctccactgccgtctactcggccactccggtcccgacacctagcctgccggaaagaacacccggaaatgaaaggccaccaagaagaaaggcactacctcctaggacagagaaaatggctgttgaccaggactggcctagtgtttacccagttgcagcaccatttaaaccctctgcagtacctcttcctgttcgaatgggttatccagtaaaaaagggcgtgcccatggcaaaggagggaaatctagaacttttaaagattcccaattttctgcatttgactcctgtagcaattaaaaagcactgtgaagcccttaaagatttttgcactgagtggccagccgcactggacagtgacgagaaatgtgagaagcattttccaattgaaattgacagcactgattatgtttcatcaggaccatctgttcggaaccccagagcacgagtagtagtcttaagagtaaagctttccagtttgaatttagatgatcacgcaaagaagaaattaattaaacttgtaggagagcgatactgcaagaccacagatgtgcttaccatcaaaacagataggtgccctttaaggaggcagaattacgattatgcagtgtatctactaacagtgttataccatgagtcttggaatactgaagaatgggaaaaaagtaagactgaagcagacatggaagagtatatatgggaaaatagctcatcagaaagaaatatcctggaaacgcttctccagatgaaagctgctgagaaaaatatggaaataaataaagaagagctccttggtactaaagaaattgaagagtacaaaaagtctgttgttagtcttaaaaatgaggaggaaaatgaaaattccatttctcagtacaaagaatccgtgaagagactattaaatgtgacatgaattatggagtagaaaaatctgcttgatttattaattttatgatatatgtgatcagtatctaatttgatataaaattgaaaatgttaaaaaatcattttttttcctcagagttaaaattatttccctcatactaatgcttaatggcaatgattactccagagttttttaatttttacactggggcaatagactaggaggtctctgatttcttcttggtctaaagtgttttgattttatttctacataatagctttggtattcatgtatatacatgcatttaattgtgattttatcacctttcccatttctttccccacaagctggcatttcagtagttgcttttgaataatggttttggttacctgggaaggcaggcccagaacccatttccttgacttgcagttccgggctgtgttcacatgactgctgtctagctgatgcatttttcacatttgtcaactctggttagaaacaggtcctcaggagtattctctaacctgatattttctaaaaagatatgttgattcaactttgtttagcatcctactttctagattgtggggctcattttgccagggccaagctaccagaaaagtagaagtggagattacctggtatgtatctctctgggtgccccagttagagctgccacagctcaggaaaaagatgaggcataacgaccttgaatgtaattggagtaagtgacaaaataagaactaccctgggaaaccctgcattcaatgtagctgtcaattcagtatttttaagtacacctgtcagctgtttcttaccacttcgatggttgtgattaatttaaaatcaaaataaaggaattactgagttta

SEQ ID NO: 154667 - DNA, 557 bp, Homo sapiens
  Payload ID: 10403
  Gene Symbol: MRPS35
  Gene Name: mitochondrial ribosomal protein S35
  ENST ID: ENST00000536569
  CDS Start-End: 23-148
ccggcttgccgtcctcgcagccatggcggccgccgcgctcccagcatggctgtctctgcagtcgagggcaaggactctgcgtgcattctccactgccgtctactcggccactccggtcccgacacctagcctgcgcactacctcctaggacagagaaaatggctgttgaccaggactggcctagtgtttacccagttgcagcaccatttaaaccctctgcagtacctcttcctgttcgaatgggttatccagtaaaaaagggcgtgcccatggcaaaggagggaaatctagaacttttaaagattcccaattttctgcatttgactcctgtagcaattaaaaagcactgtgaagcccttaaagatttttgcactgagtggccagccgcactggacagtgacgagaaatgtgagaagcattttccaattgaaattgacagcactgattatgtttcatcaggaccatctgttcggaaccccagagcacgagtagtagtcttaagagtaaagctttccagtttgaatttagatgatcacgcaaagaagaaattaattaaa

SEQ ID NO: 154668 - DNA, 466 bp, Homo sapiens
  Payload ID: 10403
  Gene Symbol: MRPS35
  Gene Name: mitochondrial ribosomal protein S35
  ENST ID: ENST00000542791
  CDS Start-End: 1-117
gcggccgccgcgctcccagcatggctgtctctgcagtcgagggcaaggactctgcgtgcattctccactgccgtctactcggccactccggtcccgacacctagcctgcaatactgaagaatgggaaaaaagtaagactgaagcagacatggaagagtatatatgggaaaatagctcatcagaaagaaatatcctggaaacgcttctccagatgaaagctgctgagaaaaatatggaaataaataaagaagagctccttggtactaaagaaattgaagagtacaaaaagtctgttgttagtcttaaaaatgaggaggaaaatgaaaattccatttctcagtacaaagaatccgtgaagagactattaaatgtgacatgaattatggagtagaaaaatctgcttgatttattaattttatgatatatgtgatcagtatctaatttgatataaaattgaaaatgttaa

SEQ ID NO: 154669 - DNA, 750 bp, Homo sapiens
  Payload ID: 10403
  Gene Symbol: MRPS35
  Gene Name: mitochondrial ribosomal protein S35
  ENST ID: ENST00000542199
  CDS Start-End: 1-488
gggcaaggactctgcgtgcattctccactgccgtctactcggccactccggtcccgacacctagcctgccggaaagaacacccggaaatgaaaggccaccaagaagaaaggcactacctcctaggacagagaaaatggctgttgaccaggactggcctagtgtttacccagttgcagcaccatttaaaccctctgcagtacctcttcctgttcgaatgggttatccagtaaaaaagggcgtgcccatggcaaaggagggaaatctagaacttttaaagattcccaattttctgcatttgactcctgtagcaattaaaaagcactgtgaagcccttaaagatttttgcactgagtggccagccgcactggacagtgacgagaaatgtgagaagcattttccaattgaaattgacagcactgattatgtttcatcaggaccatctgttcggaaccccagagcacgagtagtagtcttaagagaaatgtaaaaaaatataatcccagcagaatgtgagaaggcctgctttcctgtgctctcaccaacctacatattacctgtcaacttgataggtaaagctttccagtttgaatttagatgatcacgcaaagaagaaattaattaaacttgtaggagagcgatactgcaagaccacagatgtgcttaccatcaaaacagataggtgccctttaaggaggcagaattacgattatgcagtgtatctactaacagtgttataccatgagtcttgg

SEQ ID NO: 154670 - DNA, 1715 bp, Homo sapiens
  Payload ID: 10403
  Gene Symbol: MRPS35
  Gene Name: mitochondrial ribosomal protein S35
  Uniprot ID: P82673
  ENST ID: ENST00000538315
  CDS Start-End: 10-594
ctcgcagccatggcggccgccgcgctcccagcatggctgtctctgcagtcgagggcaaggactctgcgtgcattctccactgccgtctactcggccactccggtcccgacacctagcctgccggaaagaacacccggaaatgaaaggccaccaagaagaaaggcactacctcctaggacagagaaaatggctgttgaccaggactggcctagtgtttacccagttgcagcaccatttaaaccctctgcagtacctcttcctgttcgaatgggttatccagtaaaaaagggcgtgcccatggcaaaggagggaaatctagaacttttaaagattcccaattttctgcatttgactcctgtagcaattaaaaagcactgtgaagcccttaaagatttttgcactgagtggccagccgcactggacagtgacgagaaatgtgagaagcattttccaattgaaattgacagcactgattatgtttcatcaggaccatctgttcggaaccccagagcacgagtagtagtcttaagagtgccctttaaggaggcagaattacgattatgcagtgtatctactaacagtgttataccatgagtcttggaatactgaagaatgggaaaaaagtaagactgaagcagacatggaagagtatatatgggaaaatagctcatcagaaagaaatatcctggaaacgcttctccagatgaaagctgctgagaaaaatatggaaataaataaagaagagctccttggtactaaagaaattgaagagtacaaaaagtctgttgttagtcttaaaaatgaggaggaaaatgaaaattccatttctcagtacaaagaatccgtgaagagactattaaatgtgacatgaattatggagtagaaaaatctgcttgatttattaattttatgatatatgtgatcagtatctaatttgatataaaattgaaaatgttaaaaaatcattttttttcctcagagttaaaattatttccctcatactaatgcttaatggcaatgattactccagagttttttaatttttacactggggcaatagactaggaggtctctgatttcttcttggtctaaagtgttttgattttatttctacataatagctttggtattcatgtatatacatgcatttaattgtgattttatcacctttcccatttctttccccacaagctggcatttcagtagttgcttttgaataatggttttggttacctgggaaggcaggcccagaacccatttccttgacttgcagttccgggctgtgttcacatgactgctgtctagctgatgcatttttcacatttgtcaactctggttagaaacaggtcctcaggagtattctctaacctgatattttctaaaaagatatgttgattcaactttgtttagcatcctactttctagattgtggggctcattttgccagggccaagctaccagaaaagtagaagtggagattacctggtatgtatctctctgggtgccccagttagagctgccacagctcaggaaaaagatgaggcataacgaccttgaatgtaattggagtaagtgacaaaataagaactaccctgggaaaccctgcattcaatgtagctgtcaattcagtatttttaagtacacctgtcagctgtttcttaccacttcgatggttgtgattaatttaaaatcaaaataaaggaattactgagttt

SEQ ID NO: 154671 - DNA, 1286 bp, Homo sapiens
  Payload ID: 10404
  Gene Symbol: MRPS36
  Gene Name: mitochondrial ribosomal protein S36
  Uniprot ID: P82909
  ENST ID: ENST00000256441
  CDS Start-End: 71-382
acagctgcccgggactccagtgatcgccgcggctcgctcgcgccccggaaactgccccttctcgggggtcatgatgggcagcaagatggcgtctgctagtagggtcgttcaggtagtcaaaccacacactccattaataaggtttcctgacagaagagacaatcctaaacccaatgtatcagaagctttgagatcagcagggctaccatctcactcttctgtaatttcacaacattctaaaggaagtaaatcaccagatttgctgatgtatcagggtccaccagacactgcagaaataataaaaacattacctcagaaatacagaaggaaacttgtgtctcaagaagaaatggaatttatccaacgtggaggtcctgaataaccatggtggctgctgtttgtcatcagacaatagaattgtctttacaataaaggacttccaaaatgacagatgagaaactgtatattaaacacctttaataaatattatgaaaaaaatgaaatatagaaaatttagatggacacttgtatttcctaatttatgtatcttggtcagcttctccacaagcttacctaattgtttatatactttatacttattaaagtatacatttttaaatgttagcctattaatttactcttgattatcaaacattaccagtgttgaactattaaaagcacacaatgtgtagtaaactatcataggattcccataatttcactttactttctgtttaggcatggaaaaatttatcagtcagaattgctgttttagggacatgattttcctgaaattgggtgaggatcagtgaaataattactctattacttgttcttaattctctgttctctaatgttttttcattcacaagtttactggagtataactggcttagtaagtatatcctactctgaatgataaaaatatagtcaagctaaaataggtgactatactattaagatagagatcatacaaaagattccaaagaaagtcaaaaagtgtaaaatggaaaataagagatcaaaatgaatatagcataggaataaagatttcactagaaattgcaatttattatgttttggaggttgtaaggaagtcttgttttttggtttattttactgttttgtgatcttgtatgcaaatcctgataaccattaaccttctcaaacttaatgtctgagagcctcataaaatcaacatatttacttattaagcagtttatgaaactttaatggggcccctcctgtgccaagggtacgtatattgtgaagtaaagcctcacaaa

SEQ ID NO: 154672 - DNA, 1200 bp, Homo sapiens
  Payload ID: 10404
  Gene Symbol: MRPS36
  Gene Name: mitochondrial ribosomal protein S36
  ENST ID: ENST00000512880
  CDS Start-End: 434-550
gatgggcagcaagatggcgtctgctagtagggtcgttcaggtaaagcaatttgtcgcgtttccgcatcttgggcggtagggacggtgctgactatggcgacggcgtcggggagtaaaggcggtggcagaggcagagcggtgaccgcgcctctgcggagggccagtgacggcgcccgcgggtgtgtgtgaggatgggactttgagcctgttggaccgggcagtgaggtgggtccggcgccgagggttcgagccttgcggcaaccgtgcagcatcttggcaggtagtcaaaccacacactccattaataaggtttcctgacagaagagacaatcctaaacccaatgtatcagaagctttgagatcagcagggctaccatctcactcttctgtaatttcacaacattctaaaggaagtaaatcaccagatttgctgatgtatcagggtccaccagacactgcagaaataataaaaacattacctcagaaatacagaaggaaacttgtgtctcaagaagaaatggaatttatccaacgtggaggtcctgaataaccatggtggctgctgtttgtcatcagacaatagaattgtctttacaataaaggacttccaaaatgacagatgagaaactgtatattaaacacctttaataaatattatgaaaaaaatgaaatatagaaaatttagatggacacttgtatttcctaatttatgtatcttggtcagcttctccacaagcttacctaattgtttatatactttatacttattaaagtatacatttttaaatgttagcctattaatttactcttgattatcaaacattaccagtgttgaactattaaaagcacacaatgtgtagtaaactatcataggattcccataatttcactttactttctgtttaggcatggaaaaatttatcagtcagaattgctgttttagggacatgattttcctgaaattgggtgaggatcagtgaaataattactctattacttgttcttaattctctgttctctaatgttttttcattcacaagtttactggagtataactggcttagtaagtatatcctactctgaatgataaaaatatagtcaagctaaaataggtgactatactattaagatagagatcatacaaaagattccaaagaaagtcaaaaagtgtaaaatggaaaataagagatcaaaatgaat

SEQ ID NO: 154673 - DNA, 1200 bp, Homo sapiens; identical to SEQ ID NO: 154672
  Payload ID: 10404
  Gene Symbol: MRPS36
  Gene Name: mitochondrial ribosomal protein S36
  ENST ID: ENST00000602380
  CDS Start-End: 434-550

SEQ ID NO: 154674 - DNA, 1286 bp, Homo sapiens
  Payload ID: 10404
  Gene Symbol: MRPS36
  Gene Name: mitochondrial ribosomal protein S36
  Uniprot ID: P82909
  ENST ID: ENST00000613100
  CDS Start-End: 71-382
acagctgcccgggactccagtgatcgccgcggctcgctcgcgccccggaaactgccccttctcgggggtcatgatgggcagcaagatggcgtctgctagtagggtcgttcaggtagtcaaaccacacactccattaataaggtttcctgacagaagagacaatcctaaacccaatgtatcagaagctttgagatcagcagggctaccatctcactcttctgtaatttcacaacattctaaaggaagtaaatcaccagatttgctgatgtatcagggtccaccggacactgcagaaataataaaaacattacctcagaaatacagaaggaaacttgtgtctcaagaagaaatggaatttatccaacgtggaggtcctgaataaccatggtggctgctgtttgtcatcagacaatagaattgtctttacaataaaggacttccaaaatgacagatgagaaactgtatattaaacacctttaataaatattatgaaaaaaatgaaatatagaaaatttagatggacacttgtatttcctaatttatgtatcttggtcagcttctccacaagcttacctaattgtttatatactttatacttattaaagtatacatttttaaatgttagcctattaatttactcttgattatcaaacattaccagtgttgaactattaaaagcacacaatgtgtagtaaactatcataggattcccataatttcactttactttctgtttaggcatggaaaaatttatcagtcagaattgctgttttagggacatgattttcctgaaattgggtgaggatcagtgaaataattactctattacttgttcttaattctctgttctctaatgttttttcattcacaagtttactggagtataactggcttagtaagtatatcctactctgaatgataaaaatatagtcaagctaaaataggtgactatactattaagatagagatcatacaaaagattccaaagaaagtcaaaaagtgtaaaatggaaaataagagatcaaaatgaatatagcataggaataaagatttcactagaaattgcaatttattatgttttggaggttgtaaggaagtcttgttttttggtttattttactgttttgtgatcttgtatgcaaatcctgataaccattaaccttctcaaacttaatgtctgagagcctcataaaatcaacatatttacttattaagcagtttatgaaactttaatggggcccctcctgtgccaagggtacgtatattgtgaagtaaagcctcacaaa

SEQ ID NO: 154675 - DNA, 1200 bp, Homo sapiens
  Payload ID: 10404
  Gene Symbol: MRPS36
  Gene Name: mitochondrial ribosomal protein S36
  ENST ID: ENST00000618428
  CDS Start-End: 434-550
gatgggcagcaagatggcgtctgctagtagggtcgttcaggtaaagcaatttgtcgcgtttccgcatcttgggcggtagggacggtgctgactatggcgacggcgtcggggagtaaaggcggtggcagaggcagagcggtgaccgcgcctctgcggagggccagtgacggcgcccgcgggtgtgtgtgaggatgggactttgagcctgttggaccgggcagtgaggtgggtccggcgccgagggttcgagccttgcggcaaccgtgcagcatcttggcaggtagtcaaaccacacactccattaataaggtttcctgacagaagagacaatcctaaacccaatgtatcagaagctttgagatcagcagggctaccatctcactcttctgtaatttcacaacattctaaaggaagtaaatcaccagatttgctgatgtatcagggtccaccggacactgcagaaataataaaaacattacctcagaaatacagaaggaaacttgtgtctcaagaagaaatggaatttatccaacgtggaggtcctgaataaccatggtggctgctgtttgtcatcagacaatagaattgtctttacaataaaggacttccaaaatgacagatgagaaactgtatattaaacacctttaataaatattatgaaaaaaatgaaatatagaaaatttagatggacacttgtatttcctaatttatgtatcttggtcagcttctccacaagcttacctaattgtttatatactttatacttattaaagtatacatttttaaatgttagcctattaatttactcttgattatcaaacattaccagtgttgaactattaaaagcacacaatgtgtagtaaactatcataggattcccataatttcactttactttctgtttaggcatggaaaaatttatcagtcagaattgctgttttagggacatgattttcctgaaattgggtgaggatcagtgaaataattactctattacttgttcttaattctctgttctctaatgttttttcattcacaagtttactggagtataactggcttagtaagtatatcctactctgaatgataaaaatatagtcaagctaaaataggtgactatactattaagatagagatcatacaaaagattccaaagaaagtcaaaaagtgtaaaatggaaaataagagatcaaaatgaat

SEQ ID NO: 154676 - DNA, 1652 bp, Homo sapiens
  Payload ID: 10405
  Gene Symbol: MRPS5
  Gene Name: mitochondrial ribosomal protein S5
  Uniprot ID: P82675
  ENST ID: ENST00000272418
  CDS Start-End: 210-1502
cgcccgcggggctgtccgcggtcgcgccgggctccgcctgcagtgtggcccgtccggacagtccctcaccccggcctgcgctgctgcgtggactcgggcctcaggaattccgctgcggcccaaggcttgccgtttgacgaggagcagtcgcggtaggcggtgggcaaggctgccctgggcggaggccgaggcgcggctcggactccagcatggcgaccgcggtgcgcgctgtgggctgcctccccgtgctgtgtagcgggacggcaggtcatttattggggaggcagtgttccctaaacaccttaccagcagcttccattttggcatggaagagtgttctcggcaatggccatttgtcatcactgggaaccagagacacccatccctacgccagcttgagccgtgcactgcagacacaatgctgtatttcttctcccagtcacctgatgagccagcagtatagaccatatagtttcttcactaaattgactgcagatgagctgtggaaaggcgctttagcagagactggtgctggagcaaaaaaaggaagaggcaaaagaactaaaaagaagaaaagaaaggatctgaacaggggtcagatcattggtgaagggcgttatggttttctatggcccggactgaatgtccctcttatgaaaaatggagcagtgcagaccattgcccaaagaagcaaggaagagcaggagaaggtggaggcagacatgatccagcagagagaagagtgggaccgaaagaagaagatgaaggttaaacgggagcgaggatggagtggaaactcatggggaggcatcagtcttggcccccctgaccctggtccctgtggagaaacatatgaggattttgataccaggatacttgaggtaagaaacgttttcactatgactgcgaaagagggaagaaagaaatcgatccgtgtcttggtggctgtggggaacggaaaaggagctgcaggtttttctattgggaaagctactgatcggatggatgctttcaggaaagcaaagaacagagcagttcaccatttgcattatatagaacgatatgaagaccatacaatattccatgatatttcattaagatttaaaaggacgcatatcaagatgaagaaacaacccaaaggttacggcctccgctgccacagggccatcatcaccatctgccggctcattggcatcaaagacatgtatgccaaggtctctgggtccattaatatgctcagcctcacccagggcctcttccgtgggctctccagacaggaaacccatcaacagctggctgataagaagggcctccatgttgtggaaatccgggaggaatgtggccctctgcccattgtggttgcgtccccccgggggcccttgaggaaggatccagagccagaagatgaggttccagacgtcaaactggactgggaagatgtgaagactgcacagggaatgaagcgctctgtgtggtctaatttgaagagagccgccacgtaacctctctggccttgtgcagccagttcctgtgctgccctgcacctaggagagactcagcccctcacagcttgggatgttaccttgccttttgtttgttttgagggaagtttaatctttaaactctttggaaataaataattatagctttca

SEQ ID NO: 154677 - DNA, 1359 bp, Homo sapiens
  Payload ID: 10405
  Gene Symbol: MRPS5
  Gene Name: mitochondrial ribosomal protein S5
  Uniprot ID: P82675
  ENST ID: ENST00000345084
  CDS Start-End: 9-764
actccagcatggcgaccgcggtgcgcgctgtgggctgcctccccgtgctgtgtagcgggacggcaggtcatttattggggaggcagtgttccctaaacaccttaccagcagcttccattttggcatggaagagtgttctcggcaatggccatttgtcatcactgggaaccagagacacccatccctacgccagcttgagccgtgcactgcagacacaatgctgtatttcttctcccagtcacctgatgagccagcagtatagaccatatagtttcttcactaaattgactgcagatgagctgtggaaaggcgctttagcagagactggtgctggagcaaaaaaaggaagaggcaaaagaactaaaaagaagaaaagaaaggatctgaacaggggtcagatcattggtgaagggcgttatggttttctatggcccggactgaatgtccctcttatgaaaaatggagcagtgcagaccattgcccaaagaagcaaggaagagcaggagaaggtggaggcagacatgatccagcagagagaagagtgggaccgaaagaagaagatgaaggttaaacgggagcgaggatggagtggaaactcatggggaggcatcagtcttggcccccctgaccctggtccctgtggagaaacatatgaggattttgataccaggatacttgaggtttttctattgggaaagctactgatcggatggatgctttcaggaaagcaaagaacagagcagttcaccatttgcattatatagaacgatatgaagaccatacaatattccatgatatttcattaagatttaaaaggacgcatatcaagatgaagaaacaacccaaaggttacggcctccgctgccacagggccatcatcaccatctgccggctcattggcatcaaagacatgtatgccaaggtctctgggtccattaatatgctcagcctcacccagggcctcttccgtgggctctccagacaggaaacccatcaacagctggctgataagaagggcctccatgttgtggaaatccgggaggaatgtggccctctgcccattgtggttgcgtccccccgggggcccttgaggaaggatccagagccagaagatgaggttccagacgtcaaactggactgggaagatgtgaagactgcacagggaatgaagcgctctgtgtggtctaatttgaagagagccgccacgtaacctctctggccttgtgcagccagttcctgtgctgccctgcacctaggagagactcagcccctcacagcttgggatgttaccttgccttttgtttgttttgagggaagtttaatctttaaactctttggaaataaataattatagctttc

SEQ ID NO: 154678 - DNA, 990 bp, Homo sapiens
  Payload ID: 10406
  Gene Symbol: MRPS6
  Gene Name: mitochondrial ribosomal protein S6
  Uniprot ID: P82932
  ENST ID: ENST00000399312
  CDS Start-End: 179-556
cggcgtctgcgcagctgccagcgcctttaagcccgggctcgcgctctcggaccgtgctttcgccgcctgggagccgtccggcgcagcagtttctaggtccccactgtccccgccgtcccgccccttcgcgtcccgggaaccggctggcttccgagccgcactcgccgatcctccaggcatgccccgctacgagctggctttaatcctgaaagccatgcagcggccagagactgctgctactttgaaacgtacgatagaggccctgatggacagaggagcaatagtgagggacttggaaaacctgggtgaacgagcgcttccttataggatctctgcccacagtcagcagcacaacagaggcgggtatttcttggtggatttttatgcacccaccgcagctgttgaaagcatggtggagcacttgtctcgagatatagatgtgattagagggaatattgtcaaacaccctctgacccaggaactaaaagaatgtgaagggattgtcccagtcccactcgcagaaaaattatattccacaaagaagaggaagaagtgagaagattcgccagattttagccttatatgtaattccttcacatttgggcagcatggacgagaaggaagaatttgcaagtttggcctttatataagcatgtgttgcaggtgctgtttgatttttctaaggtatttttagcccttgatcccctttgcttgcgagaggtggggaactgctcactgacagcttctctgtaacctgcagtaccagtggatcgttcttgattttgttttcattagtgtcatttctttgtcattgaggacttttccccttacaacagtaacaccattttttgaagagcaaaacttataatacctcctgggattgtgagctagtcattcagcctgtgtaaccatgtggaaataaaaattgacgaccaatgtattatatggacaacttttgctttgagtaataaacttgattgtaggaatgtg

SEQ ID NO: 154679 - DNA, 1406 bp, Homo sapiens
  Payload ID: 10407
  Gene Symbol: MRPS7
  Gene Name: mitochondrial ribosomal protein S7
  Uniprot ID: Q9Y2R9
  ENST ID: ENST00000245539
  CDS Start-End: 228-956
ggagtgagtgccgtcaccgagggccgcgccagactgcgacggatacagggagggcaagggtttccttttggcgctcccctttggaccccggagtgaaaaactctaacgtccagatcagtggagagaaacgcagatttaggaccctgaggagtctttttcacccgtttcccgtcactcgctcaggcgcgccgagggcagtccttgtggggtcctcgtggccagccaagatggctgcccccgcagtgaaggttgcccgaggatggtcgggcctggcgttgggcgtgcggcgggctgtcttgcagcttccagggctaactcaggtgagatggagccgctatagtcctgaattcaaggatcccttgattgacaaggaatattatcgcaagccagtggaggagctaactgaggaggagaaatatgttcgggagctcaagaagactcagctcatcaaagctgctccagcagggaaaacaagttctgtgtttgaagacccagtcatcagtaaattcaccaacatgatgatgataggaggaaacaaagtactggccagatccctcatgattcagactctggaagctgtgaaaaggaagcagtttgagaagtaccatgccgcttctgcagaggaacaggcaaccatcgaacgcaacccctacaccatcttccatcaagcactgaaaaactgtgagcctatgattgggctggtacccatcctcaagggaggccgtttctaccaggtccctgtacccctacccgaccggcgtcgccgcttcctagccatgaagtggatgatcactgagtgccgggataaaaagcaccagcggacactgatgccggagaagctgtcacacaagctgctggaggctttccataaccagggccccgtgatcaagaggaagcatgacttgcacaagatggcagaggccaaccgtgccctggcccactaccgctggtggtagagtctccaggaggagcccagggccctctgccgcaagaaacagtgtgagctactgccacgctgaaaactacctgtgggttaaggatgtagttcctttgtaagggtgggcaggcctcgtaagaaagatgtagcagcatattcactatccgttaatccttctttctttgaggctggaacttgctctctctgcccctatttccttgtaaagagggagcacattgacttgggaatttcctccaggaaactcagggctgttttctcttcccttaggttggggcggacctttggatatataaaggaagcagttttagtatcagaaaagatttattagaaaattctcacgctgaactggtgtagcatgtggtgcagcattcagtgaaactggctggaggaaataggcttgtttccagagttgtccttatacaaaatgtataaaaagcagtttctggtg

SEQ ID NO: 154680 - DNA, 692 bp, Homo sapiens
  Payload ID: 10407
  Gene Symbol: MRPS7
  Gene Name: mitochondrial ribosomal protein S7
  ENST ID: ENST00000584678
  CDS Start-End: 1-470
aagacccagtcatcagtaaattcaccaacatgatgatgataggaggaaacaaagtactggccagatccctcatgattcagactctggaagctgtgaaaaggaagcagtttgagaagtaccatgccgcttctgcagaggaacaggcaaccatcgaacgcaacccctacaccatcttccatcaagcactgaaaaactgtgagcctatgattgggctggtacccatcctcaagggaggccgtttctaccaggtccctgtacccctacccgaccggcgtcgccgcttcctagccatgaagtggatgatcactgagtgccgggataaaaagcaccagcggacactgatgccggagaagctgtcacacaagctgctggaggctttccataaccagggccccgtgatcaagaggaagcatgacttgcacaagatggcagaggccaaccgtgccctggcccactaccgctggtggtagagtctccaggaggagcccagggccctctgccgcaagaaacagttggggcggacctttggatatataaaggaagcagttttagtatcagaaaagatttattagaaaattctcacgctgaactggtgtagcatgtggtgcagcattcagtgaaactggctggaggaaataggcttgtttccagagttgtccttatacaaaatgtataaaaagcagtttctggtg

SEQ ID NO: 154681 - DNA, 864 bp, Homo sapiens
  Payload ID: 10407
  Gene Symbol: MRPS7
  Gene Name: mitochondrial ribosomal protein S7
  ENST ID: ENST00000583407
  CDS Start-End: 1-87
cgggctgtcttgcagcttccaggcttttgcctgcctcctcctttccccccctcccaggctaactcaggtgagatggagccgctatagtcctgaattcaaggatcccttgattgacaaggaatattatcgcaagccagtggaggagctaactgaggaggagaaatatgttcgggagctcaagaagactcagctcatcaaagctgctccagcagggaaaacaagttctgtgtttgaagacccagtcatcagtaaattcaccaacatgatgatgataggaggaaacaaagtactggccagatccctcatgattcagactctggaagctgtgaaaaggaagcagtttgagaagtaccatgccgcttctgcagaggaacaggcaaccatcgaacgcaacccctacaccatcttccatcaagcactgaaaaactgtgagcctatgattgggctggtacccatcctcaagggaggccgtttctaccaggtccctgtacccctacccgaccggcgtcgccgcttcctagccatgaagtggatgatcactgagtgccgggataaaaagcaccagcggacactgatgccggagaagctgtcacacaagctgctggaggctttccataaccagggccccgtgatcaagaggaagcatgacttgcacaagatggcagaggccaaccgtgccctggcccactaccgctggtggtagagtctccaggaggagcccagggccctctgccgcaagaaacagtgtgagctactgccacgctgaaaactacctgtgggttaaggatgtagttcctttgtaagggtgggcaggcctcgtaagaaagatgtagcagcatattcactatccgttaatccttcttt

SEQ ID NO: 154682 - DNA, 1717 bp, Homo sapiens
  Payload ID: 10407
  Gene Symbol: MRPS7
  Gene Name: mitochondrial ribosomal protein S7
  ENST ID: ENST00000579761
  CDS Start-End: 228-779
ggagtgagtgccgtcaccgagggccgcgccagactgcgacggatacagggagggcaagggtttccttttggcgctcccctttggaccccggagtgaaaaactctaacgtccagatcagtggagagaaacgcagatttaggaccctgaggagtctttttcacccgtttcccgtcactcgctcaggcgcgccgagggcagtccttgtggggtcctcgtggccagccaagatggctgcccccgcagtgaaggttgcccgaggatggtcgggcctggcgttgggcgtgcggcgggctgtcttgcagcttccagggctaactcaggtgagatggagccgctatagtcctgaattcaaggatcccttgattgacaaggaatattatcgcaagccagtggaggagctaactgaggaggagaaatatgttcgggagctcaagaagactcagctcatcaaagctgctccagcagggaaaacaagttctgtgtttgaagacccagtcatcagtaaattcaccaacatgatgatgataggaggaaacaaagtactggccagatccctcatgattcagactctggaagctgtgaaaaggaagcagtttgagaagtaccatgccgcttctgcagaggaacaggcaaccatcgaacgcaacccctacaccatcttccatcaagcactgaaaaactgtgagcctatgattgggctggtacccatcctcaagggaggccgtttctaccaggtgaatgaatggccagggcaagaaagcagggccctccacatgtgaaacaagataggtggtgcttgggagttgggtcaagattgatagctttctagctggtgcagtgggattgcacctgtaatctcagcactttgggagcctaatgcaggatagcttgagctcaggagttaagagacagcagggcaacatagggagatcccgtctctacaaaaaaaacaaaaaaattagccaggtgtggtggtgtgcatctgtgctcccaactactcaggaggctgaggtaggaggatcacttgagtccaggaggtcaaggctgcagtgagttatgattacgcccctgcattccagcctgggcaagagagagaaaccttgtctcagaaaaaaaaaaaaaaaaaacggctgggcacggtggctcacacctgtaatcccagcactttgggaggccgaggtggatggattacctgaggtggggagttcgagatcaacaaggagaaaccctgtttctactaacaatacaaaattagccaggtgtggtggcacataccagtagtcccagctacttgggaggctgaagcaggagaatcgcttgaacccaggatgcagaggttgcagtgagccgagagcacaccaccgcactccagcctggcaacagagcaagacgccatctcaaaaaaaaaaaaaaaaaaagaattgagactgttacggtccactcatctgagtcctgtagcgtaaaaattataggcagaaggtggaagagagtgaagaagtatctaagtgacatctgggagcccacctcccttcgccttcttctgtcaagcatcctgtgtgtcctaacctgtaaaattctcatggcgagggactattcatatcctgtctttgtatgccagtgtttggcatagtgcttgaccgataactgatgcttcatcagtgtttgctgaacagtactaggtatctctttcatagcatttaattatattttattgtcc

SEQ ID NO: 154683 - DNA, 1638 bp, Homo sapiens
  Payload ID: 10407
  Gene Symbol: MRPS7
  Gene Name: mitochondrial ribosomal protein S7
  ENST ID: ENST00000579002
  CDS Start-End: 416-1231
cgcagtgaaggttgcccgaggatggtcgggcctggcgttgggcgtgcggcgggctgtcttgcagcttccagggtgagagggtggcgagcagcggcgggggggcgctgcgaggaaggaagggggccacaggcaggccgcgtgggcccctagagagagcattgccctgggggccggagtatctggattcaagcttctaagttagctgcgtgaccctgcgccaatccgaaggtttagtgactacctctcgcctaaggagtctggctgatctagggttctaacgcggagctgaaagtgcggttcagctaaagagctcagatctgggatcgcctgtgaattgggatgggtgtgtaggcgccaagcccatccttaccgttagcacttgaccaggaggagactttacccgcctgcttggggaatgtcctcctacttgggacaagggcctgaattgttgtggctcaggtttagctcgcggtctccgcgccgctccccctcgtcggcgcgttggcagtcatgcctattgttaagtcaaacctactcgcttgtggagtcagcttttgcctgcctcctcctttccccccctcccaggctaactcaggtgagatggagccgctatagtcctgaattcaaggatcccttgattgacaaggaatattatcgcaagccagtggaggagctaactgaggaggagaaatatgttcgggagctcaagaagactcagctcatcaaagctgctccagcagggaaaacaagttctgtgtttgaagacccagtcatcagtaaattcaccaacatgatgatgataggaggaaacaaagtactggccagatccctcatgattcagactctggaagctgtgaaaaggaagcagtttgagaagtaccatgccgcttctgcagaggaacaggcaaccatcgaacgcaacccctacaccatcttccatcaagcactgaaaaactgtgagcctatgattgggctggtacccatcctcaagggaggccgtttctaccaggtccctgtacccctacccgaccggcgtcgccgcttcctagccatgaagtggatgatcactgagtgccgggataaaaagcaccagcggacactgatgccggagaagctgtcacacaagctgctggaggctttccataaccagggccccgtgatcaagaggaagcatgacttgcacaagatggcagaggccaaccgtgccctggcccactaccgctggtggtagagtctccaggaggagcccagggccctctgccgcaagaaacagtgtgagctactgccacgctgaaaactacctgtgggttaaggatgtagttcctttgtaagggtgggcaggcctcgtaagaaagatgtagcagcatattcactatccgttaatccttctttctttgaggctggaacttgctctctctgcccctatttccttgtaaagagggagcacattgacttgggaatttcctccaggaaactcagggctgttttctcttcccttaggttggggcggacctttggatatataaaggaagcagttttagtatcagaaaagatttattagaaaattctcacgctgaactggtgtagcatgtggtgcagcattcagtgaaactggctggaggaaataggcttgtttcc

SEQ ID NO: 154684 - DNA, 731 bp, Homo sapiens
  Payload ID: 10407
  Gene Symbol: MRPS7
  Gene Name: mitochondrial ribosomal protein S7
  ENST ID: ENST00000581993
  CDS Start-End: 1-517
tcagctcatcaaagctgctccagcagggaaaacaagttctgtgtttgaagacccagtcatcagtaaattcaccaacatgatgatgataggaggaaacaaagtactggccagatccctcatgattcagactctggaagctgtgaaaaggaagcagtttgagaagtaccatgccgcttctgcagaggaacaggcaaccatcgaacgcaacccctacaccatcttccatcaagcactgaaaaactgtgagcctatgattgggctggtacccatcctcaagggaggccgtttctaccaggtccctgtacccctacccgaccggcgtcgccgcttcctagccatgaagtggatgatcactgagtgccgggataaaaagcaccagcggacactgatgccggagaagctgtcacacaagctgctggaggctttccataaccagggccccgtgatcaagaggaagcatgacttgcacaagatggcagaggccaaccgtgccctggcccactaccgctggtggtagagtctccaggaggagcccagggccctctgccgcaagaaacagtgttggggcggacctttggatatataaaggaagcagttttagtatcagaaaagatttattagaaaattctcacgctgaactggtgtagcatgtggtgcagcattcagtgaaactggctggaggaaataggcttgtttccagagttgtccttatacaaaatgtataaaaagca

SEQ ID NO: 154685 - DNA, 1500 bp, Homo sapiens
  Payload ID: 10408
  Gene Symbol: MRPS9
  Gene Name: mitochondrial ribosomal protein S9
  Uniprot ID: P82933
  ENST ID: ENST00000258455
  CDS Start-End: 111-1301
ccgagaagctcttgcacaggacagcctctggaaccccgcgccattagcgcctgcgccgtctctaggccccgccccctcacccctccggtcctggagctcccacagctaacatggcggcgccctgtgtgtcctacggcggagcagtttcgtaccggcttcttctctggggtaggggtagcctcgcccggaagcaaggcctctggaaaaccgcggcccctgagttgcaaacaaatgtcagatcccagatattaaggctaagacatactgcatttgtaataccaaagaaaaacgttcctacctcaaaacgtgaaacttacacagaggattttattaaaaagcagattgaagagttcaacataggaaagagacatttagccaacatgatgggagaagatccagaaactttcactcaagaagatattgacagagctattgcttaccttttcccaagtggtttgtttgagaaacgagccaggccagtaatgaagcatcctgaacagatttttccaagacaaagagcaatccagtggggagaagatggccgtccatttcactatctcttctatactggcaaacagtcatactattcattaatgcatgatgtatatggaatgttactcaatttagaaaaacatcaaagtcacttgcaagccaaaagtctgctcccagaaaaaactgtaaccagagacgtgattggcagcagatggctgattaaggaggaactagaagaaatgttagtggaaaaactgtcagatctagattatatgcagttcattcggctgctagaaaagttattgacatcgcagtgtggtgctgctgaggaagaatttgtgcagaggtttcgaagaagtgtaactcttgaatcaaaaaaacagctgattgaacctgtacagtatgatgagcaaggaatggcctttagcaaaagtgaaggtaaaagaaagactgcaaaagcagaagcaattgtttataaacatggaagtggaagaataaaagtaaatggaattgattaccagctttacttcccgatcacacaggacagagaacagctgatgttccctttccactttgttgaccggctgggaaagcacgacgtgacctgcacagtctcagggggcgggaggtcagcgcaggctggagcaatacgactggcaatggcaaaagccttgtgcagctttgtcaccgaggacgaggtcgagtggatgagacaagctggactacttactactgatccacgtgtgagggaacggaagaagccaggccaagagggagcccgcagaaagtttacgtggaagaaacgctaagggtttgctcccaggaaaggagaggaagagctatatatatgtgccgacatgtggcagacacacagtaaataatggctgaccagcatgagggcagtactgtcagaaatttctttgagctgtgagatggatttatttttaaatgctactttgtaaaggtgacctttaaaaaataaaaggaaaataaagaatgttagtttca

SEQ ID NO: 154686 - DNA, 652 bp, Homo sapiens
  Payload ID: 10408
  Gene Symbol: MRPS9
  Gene Name: mitochondrial ribosomal protein S9
  ENST ID: ENST00000413583
  CDS Start-End: 1-173
atcaaagtcacttgcaagccaaaagtctgctcccagaaaaaactgtaaccagagacgtgattggcagcagatggctgattaaggaggaactagaagaaatgttagtggaaaaactgtcagatctagatgtgcagaagtcattgagagtctgtgagatgcaatcaagagagtagctgagcacagaacgcccaggccagtgactggagaggagcatggagctctgcccacccaatatcctagtatatgcagttcattcggctgctagaaaagttattgacatcgcagtgtggtgctgctgaggaagaatttgtgcagaggtttcgaagaagtgtaactcttgaatcaaaaaaacagctgattgaacctgtacagtatgatgagcaaggaatggcctttagcaaaagtgaaggtaaaagaaagactgcaaaagcagaagcaattgtttataaacatggaagtggaagaataaaagtaaatggaattgattaccagctttacttcccgatcacacaggacagagaacagctgatgttccctttccactttgttgaccggctgggaaagcacgacgtgacctgcacagtctcagggggcgggaggtcagcgcaggctggagcaatacgactggcaatggcaaaagccttgtgcagct

SEQ ID NO: 154687 - DNA, 1841 bp, Homo sapiens
  Payload ID: 10409
  Gene Symbol: MRRF
  Gene Name: mitochondrial ribosome recycling factor
  Uniprot ID: Q96E11
  ENST ID: ENST00000297908
  CDS Start-End: 365-997
acaggacaatccggggcggggcctgagatgcagtcctgcgagggcggcctcctgtaagacctcttagcgggcccatcgctgaggtgcagggacatgtcgcggccgaactcacctcgtggcctcggcgtggtgctctcagctcatgcccggaaaccaggtcccgacgccgcggtcagacggacctctagacgcgtccgcctcaatgccgccagctgccaggccgcccgtgacgcgttaagcctgcgccgcctcctggcttcgtgacgtcacgacgtccgcgcagctgcggtcgccgccgtcgcacgagtctttccttagtaacctgggcgatagctgtggatgtttccaaggattgtcttcagtcatggccttgggattaaagtgcttccgcatggtccaccctacctttcgcaattatcttgcagcctctatcagacccgtttcagaagttacactgaagacagtgcatgaaagacaacatggccataggcaatacatggcctattcagctgtaccagtccgccattttgctaccaagaaagccaaaggatcccttgacaagattgctgtggtaactgctgacgggaagcttgctttaaaccagattagccagatctccatgaagtcgccacagctgattttggtgaatatggccagcttcccagagtgtacagctgcagctatcaaggctataagagaaagtggaatgaatctgaacccagaagtggaagggacgctaattcgggtacccattccccaagtaaccagagagcacagagaaatgctggtgaaactggccaaacagaacaccaacaaggccaaagactctttacggaaggttcgcaccaactcaatgaacaagctgaagaaatccaaggatacagtctcagaggacaccattaggctaatagagaaacagatcagccaaatggccgatgacacagtggcagaactggacaggcatctggcagtgaagaccaaagaactccttggatgaaagtccactggggccagcaatactccagagcccagtttctgctggatcccatgggtggcacattgggacttctctccctcccccatctacacagaagactgtcaccatgctgacagaagcctgtccttgtaaggcccagccttccaggggaacactcagacatgttcattctcttcctgcttctgctctgggccggtgggtggctctcagaaaatacttgctgctggcaaaaggcctgtactcaggcatttgctttgacttgatgttgccaagggactgaggccattggcaggcttagtaccacctgctcctcatcttaggagtctccttttcaaataattaggctctgttcccattttaaaactctgatattggccttcacctgtgactggacactttactagaggcccattttcactaaacaataaaatctaaataaattggaaggaataacaaccacaaaggaaagaatagagttggtctggattgatgatcactgaggatctgtatgtgaggcacccataacagtagttttgcctgtgagtcgtcttcacacatgctgttttctctgcctggctctctcttcccctccttacctggccagtcctgtttatcatcaggccttgtcttggatatcacgtcctctgggaagtcttcttttcccctctaacctaggaccctcattaccggctctcatagcacagtctactgctttgtacgaattctaagtattcttgttgcacttaattagcctgtatatcctcagaactttgtgtaatgcctggagcatagtaggcagtcatatgttgtatcgtgaataaattgcacatagtagctacccagc

SEQ ID NO: 154688 - DNA, 9826 bp, Homo sapiens
  Payload ID: 10409
  Gene Symbol: MRRF
  Gene Name: mitochondrial ribosome recycling factor
  Uniprot ID: Q96E11
  ENST ID: ENST00000344641
  CDS Start-End: 312-1100
gtaagacctcttagcgggcccatcgctgaggtgcagggacatgtcgcggccgaactcacctcgtggcctcggcgtggtgctctcagctcatgcccggaaaccaggtcccgacgccgcggtcagacggacctctagacgcgtccgcctcaatgccgccagctgccaggccgcccgtgacgcgttaagcctgcgccgcctcctggcttcgtgacgtcacgacgtccgcgcagctgcggtcgccgccgtcgcacgagtctttccttagtaacctgggcgatagctgtggatgtttccaaggattgtcttcagtcatggccttgggattaaagtgcttccgcatggtccaccctacctttcgcaattatcttgcagcctctatcagacccgtttcagaagttacactgaagacagtgcatgaaagacaacatggccataggcaatacatggcctattcagctgtaccagtccgccattttgctaccaagaaagccaaagccaaagggaaaggacagtcccaaaccagagtgaatattaatgctgccttggttgaggatataatcaacttggaagaggtgaatgaagaaatgaagtctgtgatagaagctctcaaggataatttcaataagactctcaatataaggacctcaccaggatcccttgacaagattgctgtggtaactgctgacgggaagcttgctttaaaccagattagccagatctccatgaagtcgccacagctgattttggtgaatatggccagcttcccagagtgtacagctgcagctatcaaggctataagagaaagtggaatgaatctgaacccagaagtggaagggacgctaattcgggtacccattccccaagtaaccagagagcacagagaaatgctggtgaaactggccaaacagaacaccaacaaggccaaagactctttacggaaggttcgcaccaactcaatgaacaagctgaagaaatccaaggatacagtctcagaggacaccattaggctaatagagaaacagatcagccaaatggccgatgacacagtggcagaactggacaggcatctggcagtgaagaccaaagaactccttggatgaaagtccactggggccagcaatactccagagcccagtttctgctggatcccatgggtggcacattgggacttctctccctcccccatctacacagaagactgtcaccatgctgacagaagcctgtccttgtaaggcccagccttccaggggaacactcagacatgttcattctcttcctgcttctgctctgggccggtgggtggctctcagaaaatacttgctgctggcaaaaggcctgtactcaggcatttgctttgacttgatgttgccaagggactgaggccattggcaggcttagtaccacctgctcctcatcttaggagtctccttttcaaataattaggctctgttcccattttaaaactctgatattggccttcacctgtgactggacactttactagaggcccattttcactaaacaataaaatctaaataaattggaaggaataacaaccacaaaggaaagaatagagttggtctggattgatgatcactgaggatctgtatgtgaggcacccataacagtagttttgcctgtgagtcgtcttcacacatgctgttttctctgcctggctctctcttcccctccttacctggccagtcctgtttatcatcaggccttgtcttggatatcacgtcctctgggaagtcttcttttcccctctaacctaggaccctcattaccggctctcatagcacagtctactgctttgtacgaattctaagtattcttgttgcacttaattagcctgtatatcctcagaactttgtgtaatgcctggagcatagtaggcagtcatatgttgtatcgtgaataaattgcacatagtagctacccagcaaatgctgacttcttttctttctagtcttaacactccctttctatcattttccactcttgtacttgttctcaacatttacttggtagtgacatacctttcctgcagggcctgcccattgttgacagacaagtagtttattgtggcttatcttcggatactgggttattaggtttttttccctccaattattttttattcattcattcattcctaatatagccattatgagttaggtatagttctaggcattatttataatcttgacagtaaacttaagagatgtgtattatcttcatttacaaataggaaaactaagtcttgacagtattaggtaatttgcccaaagtaacaaagcaaagctgatcagtggtagaaggttttcatgattcattgtcagcgtcatttacatagaggtgaagtttcttgtgcagggttacacacctagcaagtagcagagctggcattcaaattgaggcctgatgtgctaatgtaaaaggaaaaaaacaaactttttttccttttgtactttcacactcaacatggaacacttctgtgacaaggtgtgtgagtttgtttcccccacacaccaagcaattctccagcagacaccaactgggtatcctataattcaattcatttctgacattacctggaaatagtgtcagatcccacaggttgagggctccatctcccaagactgccaacacttttgatgccagtcatgagtctgggccacccatactcctgactgaccaactacaaactagagtccttgatttcctttggttcagttaatttcctaggacagctcacacaactcagggaaacacgttcactggtttattataaaagatacagctgaacagcccaatgaaggaggtacacagggcaaggttgagggagagggagagggtgtggagcttccatgccttctctgggctcacactctctcagcacctcaccaatctggaaggaaccactgtgtcctgctgccttcattagcatttagtgagcaccaattgtttgtcaggtgctgaactatgtactggcaatacaaaaatgggaaagatatgacccctgttttgggggggtacatagtgcactgaactaaattgctgtctataataatctattgggtggaaaagtaggaagttcattccagttctgcaaggtgtctgctttcagaatggagcccactttggtggtggcaaggcctggctgagttctttcaaagcaacatccaacttctctttgctctttgacttcctccagattctctcctgtgctggaggtaataagggttgcacttccctctttacttacactggtgaaacatgcagtgaggattcaaggtcaaaattgggtcaaagttaaactaacacagtctcctgccccacttacctgtcctctaaccccatccaccagccctaagtggtcatcacatgatcagaagtcagctgggggaagagcagggatagatagagcaattaaggagcctcttttggggtaagccacatgacaggggctttgcaacagtctttcatgagtggccgaaatcccccactcactgcaaatgtgcttctcaaagatgcaggattttttaataaacagaggaaatgataaattatgttgtaattccactccaaaggcatttggttcttaacagccaaatcctctgtagtctttaaataaacaaaaacttatttggtgaacagacagggaggaaaatgaaagattttctgtacttgggttccacatgtcaacaatttctctcctgtgtgtatgttggccaaagctgtatcatgataaatgaataaaggaaaacctcgagcccagggcagtcagacagctcagcaaatggctttcagatgattactcaatttcagttgacatttatcaaagagtttctctgtgactctgtgtcagggctgtagtggtgacagggacaagaatgagactacctgtttggatgtgctgagaatgagtaatgctggagcaattcattctccatctcttctctcctacagcctctctcaaaaagaaacactgggtatggaaattctcacacttgccagaagaattaaccacctcttctattcagtttaatgactttcaaagtcctatgaaatattcaggccagagagaatttgagaatttttttcctgtctggtgtgtgtgtgtgtgtgtgtgtgtgtgtgtgtgtgtgtgtgtgtgtgtgtgtgttggaaattacaaaataagttggaatgcagaaagttaaaaaaaaaatctcaccaggccctactcctttaaaattaggtatatatctttccagacctcctttctctgtgcatatatgtgtgtgtgtgtgtgtgtgttcgtttcattttgttttgcctttgagacagtgtctcactctgtcgcccatcatgcagtggcacaatcatagctcactgcagccttgaactctttggctcatgcaattctcccacctcagcctcctgagtagctgggactgcagctatgcaccaccacacctggcttttttttttttgctttgtttcctaggctggtctcaaacacctggcctcaagcggtccttctgcctcagcctcccaaagcgctgggattacaagtgtgagccactctgcctggccatatataatttttttttttttttttttgcaatggagtcttgctctgtcgcccacgctggagtgcattggcgcaatctcggctcactgcaacctctgcctccctggttcaagcagttttccctgcttcagcctcctgagtagctgggattacaggcgcccgccaccacacccagctaattttttatttttttttagtagagatggggtttcaccatgttggccaggctggtcttgaactcctgactcaggtgatccacctgtctcagcctcccaaattgctgggattacaggcatgaaccactgcgcccggccatataattttttagaaggagagaggggaactattcatattctgatgtttgcttttttttcttaccctgtaacaatcatggtcatctgtccatgtgtgtacataatagatacaatttattatttcattgtgatacagtattccataatatgggtctaccataacttaattcactattagcccatgacactatttaaaaattatttcacatgcattggagaatgtttaaagatgatttttttttttaagaaaaaagaaaggcccctattctaagattatctgataaggtctgctctttctccttcaacctcaggctaacatttattgaatgcctacagtcggccaggttccatgctagaccctttacacgtgttcccacattgaaacttctgatgaatccttgttaatgtaggtgttatgattatctgtgtttttctgtgaaaaaaacaggttcagaaaggatatttaacttgcccaaggtcacacaggtagtaagtgctagaatgaaatttcaaacccacatctgaccttgaagtaggtccttaatcagtgtgctttggttcccaagtcttcgctgaacacttactcaaaagggacctcgcgctgttctggacctggacggtgatgtgagagaagcagaagtcttgctttcataaaacacatagcaagctgttcctaattaatgactgcaagtaaaatagcatagtacctggcacattgtaaacaccaaagaaatggtagctcttatggagacagtaaagattacatattaatcccccacctgtttggccaacttctctagaatatgtcagagagcaagcaaaatgttcaccaagcagtgaataatgataataataacaacaataacagtattgacagatcagtaactaatatttgcttggtgctttttagttttcaaactgcttctacattctttgttgcattgaaaccactcagtgaaactttgcggttagacaaagagtgatcataaaagcttgtatcctcaaaagccactttgaggctttcttttgccctaatagacggtcatttttcatgatgtgcatttgaaatgatatgttccctattttgggggtacaaattttgatatgtatgcaggaaatgtagcttatagagtatgttgtttaggttttccattattttttgaccctttgatgagtcttggactgaaagtggtgtgtttcagacccctgctattaacatttctgttccttcttgcattttctgctttatgaaaatggattctgctttgtgaaagtactgctgtgttgttttatacatagcgctccagacgcttacatcttctttatttcattcagtgctcttagtctgaattttatcttgttgtatatcaggattacagctcttgcttgctttttgtttacatttgctttccccatttcttgatttttaagctttcagaatcactattttaggtgtttctttttttttttggaattgggttttgttcgatgaaccattctgaaactccttttttcttatttttatttttaattgtaaaatatacataaaatttactctcttaaccatgttttttttttagacagggtcttgctctgtcactcaggctggatttcagtggcatgatctcagctcactgtagccttgacaacctgggctgaagcaatcctcccacctcagcctcctgagtagctgggattacagccacgtgcaccgccacacctggctaacttttaaaattatttgtagagacaaggtcttggctatgttgcccaggctgatctcaaactcctgagctcaggtgattctcctaccttggcctcccaaagtgctgggattacaggcttgagcttctgtgcccagccttaaccattttaagtgtacagttcagtagcatttagtacatttacattgttgtacaaccatcctccagaactctttaccatgcagaactgacgctctatacccattacacaaccccagttcccccttctcagcccccagcaaccaccatttatgaatttataaatttgattaggaacatcatgttaagtggaatcatacaggatttgtctttttgtgactagtttatttcactgaagcatgatgtccttaaagtatatccatattgtagcatgtatcagaatttcctttctaaggctgagtaatctgttgtatatatgaataagtatatataaagctccttttaacagacacttaaattcatttacatttatttataatagtgatatgtttagtagaacccatttactttttctttattttcagtattaacataagtgatttggtgttttagccctaagcagataaaggattagagattagaatgaggaagagggttgcttcacatagacgaagttcagtttttgtggaataaacaaataagtgattatctctgtctgcctctttgtctctctctctctctcttttttttttaataagagatgaggggtctccctatgttgcccaggctggacttgaactcctgggttcaagtgatcctggaactgcagatatgcacagctgtgcccgaagatccctttctcttacattcctttcttctggtctgtgtttcagtccatcctacgctgttaagttagaacaacctgaaacagcttttatcatgtcactcttctctcagaaaccttcattggttccctgttgcctgctgaattatgtaaactcttcaccctggcattcagtaacttctgcaatctgggcctgatgtattcctttaattgtgatgcatctcttacaactaccctgataccaccagtgcttaagcgaaacggaattattagcttttctgaaagctaataattttgtgctgctttctctcaccttcaagccttttcttaggctattttctttgcctagtgtatgctcccttaaaccacttccccaccagcaggcaaaacttacctagtcttataagcccttcttggtcccatgttcttccttacactaactcattcattcattatccatcccgatgcttctcctgattcattcattcattatccataccgatgcctctcctgatccctaaacctgcctatgcctattaagcgcttggatttgcctcaagcatctgacgttcagctacccacctgcgtttcctctctcaggaaaagcctcaccatccacccaggtgccaagccaggacactgggagccacttttgcctccctgtccctctcccctcatccaataagtcaccaagtcctgtcaattctcccttcaacagacctttcctttccttcctgggcacacccttgagtggtgctcaccagggaacagatgtggcaaatgttccaggctggcctcacccgggtctctagacacttggctcagaggcagaacatggctaaccctagataagccttgtgtgaattcctggcaagaaagtcccctgctgtcttagtctgtgcattctctgactagcacagtatgtggcgagagcaggtgttgaggaaatgtttgtctaattctaaggggcctgccaggccttgatacaaatggcgtcacatttacatgaataacccagagtttctctaattatcctcacctgcctgcccaggaccttcaacctcatctgctaagtcggcctcaggcgtttctagacatcttaagggaccgcatggcatccaaggccactggcatctactgtactcccctcccaccggcgcttccctttgctagcatctgcagccacaagtgacacttaagggagatttacctccactactgggagtgttagtgtctgtgacaaaagtgctggttgctgggctgagggggtctgagcatgctgggtggaagccctgaagaggaagggagaaggtctctgcccacatcccacatttgccgtgcatccctgagttccaaagcagcctcgctaggctctagagcccctaaatctccaaagacagcagctcctccgcgagctagctgcccctgaccgaggctcacagcttgcctaggggagggcagggcaaaagtccctgctattctcttcctttcctggctcaggccttgatccaaatagctcccttcttccaagacactactccccaggcctcctcttcctgataataatagtggctaacaagttttactagattttaggcaactcaaggagctagctgttattttgttcattctacaagtgaggaaggaagcacagacagtggttaagttacatgtccagagacacacagagggcctagtgcagtagctcatgcctggaatctcagcactttgggtggctgaggtgggcgagtcacttgaggtcaggagttcgggaccagcctggccaacgtggtgaaaccccatctctactaaaaataaaaaatttagccaggtgtggtggcgggcgcctgtaatcccagctacttcggaggctgaagcaggagaatcacttgaacccaggaggcagaggttgcagtgagccaagattgcaccactgcactgcagcatgggcaacagagcgagactctgtctccacacagaggaacacttggcatcagggagtctgttgtctgacccgcaactaggcagcctcatacattattttcactaagagaccagtggggctggaaagggacttgtgaggtgctaagtagccagtgagagcttctgggtcctgtcgcagttttgccctttcttccctcaaaaaaaggtctctccacttctctgtgggaaaggcttgggcaagttctctggtttccaatgaggccagagaacctgtgctgatccctaacatcttcacccatcgggggcaaaataagtaaaataaaagtaatgtagcaaatgtttttataaaagtgttaatttaaattaacggactattacctattcttagagctttctcttttgtttttggcattaaaatatcctttctattataaaatgataa

SEQ ID NO: 154689 - DNA, 1176 bp, Homo sapiens
  Payload ID: 10409
  Gene Symbol: MRRF
  Gene Name: mitochondrial ribosome recycling factor
  Uniprot ID: Q96E11
  ENST ID: ENST00000373723
  CDS Start-End: 73-678
ccgccgtcgcacgagtctttccttagtaacctgggcgatagctgtggatgtttccaaggattgtcttcagtcatggccttgggattaaagtgcttccgcatggtccaccctacctttcgcaattatcttgcagcctctatcagacccgtttcagaagttacactgaagacagtgcatgaaagacaacatggccataggcaatacatggcctattcagctgtaccagtccgccattttgctaccaagaaagccaaagccaaagggaaaggacagtcccaaaccagagtgaatattaatgctgccttggttgaggatataatcaacttggaagaggtgaatgaagaaatgaagtctgtgatagaagctctcaaggataatttcaataagactctcaatataaggacctcaccaggatcccttgacaagattgctgtggtaactgctgacgggaagcttgctttaaaccagattagccagatctccatgaagtcgccacagctgattttggtgaatatggccagcttcccagagtgtacagctgcagctatcaaggctataagagaaagtggaatgaatctgaacccagaagtggaagggacgctaattcgggtacccattccccaatcagccaaatggccgatgacacagtggcagaactggacaggcatctggcagtgaagaccaaagaactccttggatgaaagtccactggggccagcaatactccagagcccagtttctgctggatcccatgggtggcacattgggacttctctccctcccccatctacacagaagactgtcaccatgctgacagaagcctgtccttgtaaggcccagccttccaggggaacactcagacatgttcattctcttcctgcttctgctctgggccggtgggtggctctcagaaaatacttgctgctggcaaaaggcctgtactcaggcatttgctttgacttgatgttgccaagggactgaggccattggcaggcttagtaccacctgctcctcatcttaggagtctccttttcaaataattaggctctgttcccattttaaaactctgatattggccttcacctgtgactggacactttactagaggcccattttcactaaacaataaaatctaaataaattggaaggaataacaaccacaaaggaaagaataga

SEQ ID NO: 154690 - DNA, 870 bp, Homo sapiens
  Payload ID: 10409
  Gene Symbol: MRRF
  Gene Name: mitochondrial ribosome recycling factor
  Uniprot ID: Q96E11
  ENST ID: ENST00000373729
  CDS Start-End: 107-763
cacgagtctttccttagtaacctgggcgatagctgcctctatcagacccgtttcagaagttacactgaagacagtgcatgaaagacaacatggccataggcaatacatggcctattcagctgtaccagtccgccattttgctaccaagaaagccaaagccaaagggaaaggacagtcccaaaccagagtgaatattaatgctgccttggttgaggatataatcaacttggaagaggtgaatgaagaaatgaagtctgtgatagaagctctcaaggataatttcaataagactctcaatataaggacctcaccaggatcccttgacaagattgctgtggtaactgctgacgggaagcttgctttaaaccagattagccagatctccatgaagtcgccacagctgattttggtgaatatggccagcttcccagagtgtacagctgcagctatcaaggctataagagaaagtggaatgaatctgaacccagaagtggaagggacgctaattcgggtacccattccccaagtaaccagagagcacagagaaatgctggtgaaactggccaaacagaacaccaacaaggccaaagactctttacggaaggttcgcaccaactcaatgaacaagctgaagaaatccaaggatacagtctcagaggacaccattaggctaatagagaaacagatcagccaaatggccgatgacacagtggcagaactggacaggcatctggcagtgaagaccaaagaactccttggatgaaagtccactggggccagcaatactccagagcccagtttctgctggatcccatgggtggcacattgggacttctctccctcccccatctacacagaagactgtcacca

SEQ ID NO: 154691 - DNA, 1501 bp, Homo sapiens
  Payload ID: 10409
  Gene Symbol: MRRF
  Gene Name: mitochondrial ribosome recycling factor
  Uniprot ID: Q96E11
  ENST ID: ENST00000394315
  CDS Start-End: 29-634
tggatgtttccaaggattgtcttcagtcatggccttgggattaaagtgcttccgcatggtccaccctacctttcgcaattatcttgcagcctctatcagacccgtttcagaagttacactgaagacagtgcatgaaagacaacatggccataggcaatacatggcctattcagctgtaccagtccgccattttgctaccaagaaagccaaagccaaagggaaaggacagtcccaaaccagagtgaatattaatgctgccttggttgaggatataatcaacttggaagaggtgaatgaagaaatgaagtctgtgatagaagctctcaaggataatttcaataagactctcaatataaggacctcaccaggatcccttgacaagattgctgtggtaactgctgacgggaagcttgctttaaaccagattagccagatctccatgaagtcgccacagctgattttggtgaatatggccagcttcccagagtgtacagctgcagctatcaaggctataagagaaagtggaatgaatctgaacccagaagtggaagggacgctaattcgggtacccattccccaatcagccaaatggccgatgacacagtggcagaactggacaggcatctggcagtgaagaccaaagaactccttggatgaaagtccactggggccagcaatactccagagcccagtttctgctggatcccatgggtggcacattgggacttctctccctcccccatctacacagaagactgtcaccatgctgacagaagcctgtccttgtaaggcccagccttccaggggaacactcagacatgttcattctcttcctgcttctgctctgggccggtgggtggctctcagaaaatacttgctgctggcaaaaggcctgtactcaggcatttgctttgacttgatgttgccaagggactgaggccattggcaggcttagtaccacctgctcctcatcttaggagtctccttttcaaataattaggctctgttcccattttaaaactctgatattggccttcacctgtgactggacactttactagaggcccattttcactaaacaataaaatctaaataaattggaaggaataacaaccacaaaggaaagaatagagttggtctggattgatgatcactgaggatctgtatgtgaggcacccataacagtagttttgcctgtgagtcgtcttcacacatgctgttttctctgcctggctctctcttcccctccttacctggccagtcctgtttatcatcaggccttgtcttggatatcacgtcctctgggaagtcttcttttcccctctaacctaggaccctcattaccggctctcatagcacagtctactgctttgtacgaattctaagtattcttgttgcacttaattagcctgtatatcctcagaactttgtgtaatgcctggagcatagtaggcagtcatatgttgtatcgtgaataaattgcacatagtagctacccagc

SEQ ID NO: 154692 - DNA, 858 bp, Homo sapiens
  Payload ID: 10409
  Gene Symbol: MRRF
  Gene Name: mitochondrial ribosome recycling factor
  ENST ID: ENST00000441707
  CDS Start-End: 400-858
tgcggtcgccgccgtcgcacgagtctttccttagtaacctgggcgatagctgatgagacggaagtcctgagagtttgaccgatttaaggtcacgtgcctaggaagtgctggaaccaagactcggagttttctctaagtttagtgcctttattttgttttaaaccacactgttgcatttccccccattttggaaagctttatagttggaaagaatgaaaacctgatctgaccccttcattttatggttgaaacaaaatctacgtaggagaaatcacttggtacaagtcacaagtcagtggtagagctgccgcaaatgctttttgaatacgtgtgattatgaatctaaatggcagatggcagggagtgataagtggatgtttccaaggattgtcttcagtcatggccttgggattaaagtgcttccgcatggtccaccctacctttcgcaattatcttgcagcctctatcagacccgtttcagaagttacactgaagacagtgcatgaaagacaacatggccataggcaatacatggcctattcagctgtaccagtccgccattttgctaccaagaaagccaaagccaaagggaaaggacagtcccaaaccagagtgaatattaatgctgccttggttgaggatataatcaacttggaagaggtgaatgaagaaatgaagtctgtgatagaagctctcaaggataatttcaataagactctcaatataaggacctcaccaggatcccttgacaagattgctgtggtaactgctgacgggaagcttgctttaaaccagattagccagatctccatgaagtcgccacagctgattttggtgaatatggccagcttcccagag

SEQ ID NO: 154693 - DNA, 867 bp, Homo sapiens
  Payload ID: 10409
  Gene Symbol: MRRF
  Gene Name: mitochondrial ribosome recycling factor
  Uniprot ID: Q96E11
  ENST ID: ENST00000467864
  CDS Start-End: 85-615
caagctttgtacttagatcttttacttagatctgctttttgtcttattctttttagtggatgtttccaaggattgtcttcagtcatggccttgggattaaagtgcttccgcatggtccaccctacctttcgcaattatcttgcagcctctatcagacccgtttcagaagttacactgaagacagtgcatgaaagacaacatggccataggcaatacatggcctattcagctgtaccagtccgccattttgctaccaagaaagccaaagccaaagggaaaggacagtcccaaaccagagtgaatattaatgctgccttggttgaggatataatcaacttggaagaggtgaatgaagaaatgaagtctgtgatagaagctctcaaggataatttcaataagactctcaatataaggacctcaccaggatcccttgacaagattgctgtggtaactgctgacgggaagcttgctttaaaccagattagccagatctccatgaagtcgccacagctgattttggtgaatatggccagcttcccagaggaattggcctggattaggagtcttagagtacctggaatccggtcccatctctaccaccaactggctgtttgaccttgggcaagttgcttcactctctgggcctccatttcctcatctgctaatataagtgtacagctgcagctatcaaggctataagagaaagtggaatgaatctgaacccagaagtggaagggacgctaattcgggtacccattccccaagtaaccagagagcacagagaaatgctggtgaaactggccaaacagaacaccaacaaggccaaagactctttacggaaggttcgcaccaactcaatgaacaagc

SEQ ID NO: 154694 - DNA, 1186 bp, Homo sapiens
  Payload ID: 10409
  Gene Symbol: MRRF
  Gene Name: mitochondrial ribosome recycling factor
  Uniprot ID: Q96E11
  ENST ID: ENST00000470366
  CDS Start-End: 42-548
tgggcgatagctgtggatgtttccaaggattgtcttcagtcatggccttgggattaaagtgcttccgcatggtccaccctacctttcgcaattatcttgcagcctctatcagacccgtttcagaagttacactgaagacagtgcatgaaagacaacatggccataggcaatacatggcctattcagctgtaccagtccgccattttgctaccaagaaagccaaagccaaagggaaaggacagtcccaaaccagagtgaatattaatgctgccttggttgaggatataatcaacttggaagaggtgaatgaagaaatgaagtctgtgatagaagctctcaaggataatttcaataagactctcaatataaggacctcaccaggatcccttgacaagattgctgtggtaactgctgacgggaagcttgctttaaaccagattagccagatctccatgaagtcgccacagctgattttggtgaatatggccagcttcccagagactatgaagcaaataaaacaatactttaatgggccaaatgtggcctgagggccaccaatttgtgacctctgcattagtatttggagcagaccctccaggaagtccttttatactagactgaccattgcagaatattgcatggagcacagtgcttccaaaactggaaggaattggcctggattaggagtcttagagtacctggaatccggtcccatctctaccaccaactggctgtttgaccttgggcaagttgcttcactctctgggcctccatttcctcatctgctaatataagtgtacagctgcagctatcaaggctataagagaaagtggaatgaatctgaacccagaagtggaagggacgctaattcgggtacccattccccaagtaaccagagagcacagagaaatgctggtgaaactggccaaacagaacaccaacaaggccaaagactctttacggaaggttcgcaccaactcaatgaacaagctgaagaaatccaaggatacagtctcagaggacaccattaggctaatagagaaacagatcagccaaatggccgatgacacagtggcagaactggacaggcatctggcagtgaagaccaaagaactccttggatgaaagtccactggggccagcaatactccagagcccagtttctgctggatcccatgggtggcac

SEQ ID NO: 154695 - DNA, 1599 bp, Homo sapiens
  Payload ID: 10409
  Gene Symbol: MRRF
  Gene Name: mitochondrial ribosome recycling factor
  Uniprot ID: Q96E11
  ENST ID: ENST00000489572
  CDS Start-End: 45-551
gtcttattctttttagtggatgtttccaaggattgtcttcagtcatggccttgggattaaagtgcttccgcatggtccaccctacctttcgcaattatcttgcagcctctatcagacccgtttcagaagttacactgaagacagtgcatgaaagacaacatggccataggcaatacatggcctattcagctgtaccagtccgccattttgctaccaagaaagccaaagccaaagggaaaggacagtcccaaaccagagtgaatattaatgctgccttggttgaggatataatcaacttggaagaggtgaatgaagaaatgaagtctgtgatagaagctctcaaggataatttcaataagactctcaatataaggacctcaccaggatcccttgacaagattgctgtggtaactgctgacgggaagcttgctttaaaccagattagccagatctccatgaagtcgccacagctgattttggtgaatatggccagcttcccagagactatgaagcaaataaaacaatactttaatgggccaaatgtggcctgagggccaccaatttgtgacctctgcattagtatttggagcagaccctccaggaagtccttttatactagactgaccattgcagaatattgcatggagcacagtgcttccaaaactggaaggaattggcctggattaggagtcttagagtacctggaatccggtcccatctctaccaccaactggctgtttgaccttgggcaagttgcttcactctctgggcctccatttcctcatctgctaatataagtgtacagctgcagctatcaaggctataagagaaagtggaatgaatctgaacccagaagtggaagggacgctaattcgggtacccattccccaagtaaccagagagcacagagaaatgctggtgaaactggccaaacagaacaccaacaaggccaaagactctttacggaaggttcgcaccaactcaatgaacaagctgaagaaatccaaggatacagtctcagaggacaccattaggctaatagagaaacagatcagccaaatggccgatgacacagtggcagaactggacaggcatctggcagtgaagaccaaagaactccttggatgaaagtccactggggccagcaatactccagagcccagtttctgctggatcccatgggtggcacattgggacttctctccctcccccatctacacagaagactgtcaccatgctgacagaagcctgtccttgtaaggcccagccttccaggggaacactcagacatgttcattctcttcctgcttctgctctgggccggtgggtggctctcagaaaatacttgctgctggcaaaaggcctgtactcaggcatttgctttgacttgatgttgccaagggactgaggccattggcaggcttagtaccacctgctcctcatcttaggagtctccttttcaaataattaggctctgttcccattttaaaactctgatattggccttcacctgtgactggacactttactagaggcccattttcactaaacaataaaatctaaataaattggaaggaataacaaccacaaaggaaagaa

SEQ ID NO: 154696 - DNA, 1560 bp, Homo sapiens
  Payload ID: 10410
  Gene Symbol: MTG1
  Gene Name: mitochondrial ribosome-associated GTPase 1
  Uniprot ID: Q9BT17
  ENST ID: ENST00000317502
  CDS Start-End: 51-1055
gcggcgcagaggaggtcagctgcgggagcgtttccggggacggtgccgccatgagattgaccccgcgcgcgctgtgcagcgccgcccaggccgcctggcgggagaacttccccctgtgcggtcgcgacgtggcgcgctggttcccgggccacatggccaaggggctgaagaagatgcagagcagcctgaagctggtggactgtatcatcgaggtccacgatgcccggatcccactttcaggccgcaaccctctgtttcaggaaacccttgggcttaagcctcacttgctggtcctcaacaagatggacttggcggatcttacagagcagcagaaaattatgcaacacttagaaggagaaggcctaaaaaatgtcatttttaccaactgtgtaaaggatgaaaatgtcaagcagatcatcccgatggtcactgaactgattgggagaagccaccgctaccaccgaaaagagaacctggagtactgtatcatggtcattggggtccccaacgtgggcaagtcctccctcatcaactccctccggaggcagcacctcaggaaagggaaagccaccagggtgggtggcgagcctgggatcaccagagctgtgatgtccaaaattcaggtctctgagcggcccctgatgttcctgttggacactcctggcgtgctggctcctcggattgaaagtgtggagacaggcctgaagctggccctgtgtggaacggtgctggaccacctggtcggggaggagaccatggctgactacctgctgtacaccctcaacaaacaccagcgctttgggtacgtgcagcactacggcctgggcagtgcctgtgacaacgtagagcgcgtgctgaagagtgtggctgtgaagctggggaagacgcagaaggtgaaggtgctcacgggcacgggtaacgtgaacattattcagcctaactatcctgcggcagcccgtgacttcctgcagactttccgccgtgggctgctgggttccgtgatgctggacctcgacgtcctgcggggccaccccccggctgagactttgccctgaacttgtccgggtagggagggccggaggcatgtggcctcccagacctcctgacctgggtggttgaggctcaagacagctcacccggtccagaagctccatgctggtcactagggtgctgtgctctctggcgccccacagcctggccagctccagggaccccagttgcagggcccaagcaggtgggagtggacaccaggcttcccagtggacgtccctgagcagctccgcatgcttggttctcccggagcttcctgctcaggcctcttgagaaatggatgctgtctcagaaggagttaaagctataacctgtaacctttaaaatctccagttaaagggcctgtttcttactggcctgtgaggtgcaccgtagtgccttgggcctgtgtgttaaagctgctctcaccagtgaaacctaagaaatgagcaggttggcagctagggtttgtgttggaggctttcggtccagtgtcttgcagtcctacaacaagtgagaggcttgctgcca

SEQ ID NO: 154697 - DNA, 953 bp, Homo sapiens
  Payload ID: 10410
  Gene Symbol: MTG1
  Gene Name: mitochondrial ribosome-associated GTPase 1
  ENST ID: ENST00000432508
  CDS Start-End: 48-899
gcgcagaggaggtcagctgcgggagcgtttccggggacggtgccgccatgagattgaccccgcgcgcgctgtgcagcgccgcccaggccgcctggcgggagaacttccccctgtgcggtcgcgacgtggcgcgctggttcccgggccacatggccaaggggctgaagaagatgcagagcagcctgaagctggtggactgtatcatcgaggtccacgatgcccggatcccactttcaggccgcaaccctctgtttcaggaaacccttgggcttaagcctcacttgctggtcctcaacaagatggacttggcggatcttacagagcagcagaaaattatgcaacacttagaaggagaaggcctaaaaaatgtcatttttaccaactgtgtaaaggatgaaaatgtcaagcagatcatcccgatggtcactgaactgattgggagaagccaccgctaccaccgaaaagaggtctctgagcggcccctgatgttcctgttggacactcctggcgtgctggctcctcggattgaaagtgtggagacaggcctgaagctggccctgtgtggaacggtgctggaccacctggtcggggaggagaccatggctgactacctgctgtacaccctcaacaaacaccagcgctttgggtacgtgcagcactacggcctgggcagtgcctgtgacaacgtagagcgcgtgctgaagagtgtggctgtgaagctggggaagacgcagaaggtgaaggtgctcacgggcacgggtaacgtgaacattattcagcctaactatcctgcggcagcccgtgacttcctgcagactttccgccgtgggctgctgggttccgtgatgctggacctcgacgtcctgcggggccaccccccggctgagactttgccctgaacttgtccgggtagggagggccggaggcatgtggcctcccagacctcctgacct

SEQ ID NO: 154698 - DNA, 1283 bp, Homo sapiens
  Payload ID: 10410
  Gene Symbol: MTG1
  Gene Name: mitochondrial ribosome-associated GTPase 1
  ENST ID: ENST00000477902
  CDS Start-End: 103-984
gtggtgcggccccttggagcgccggaagcccgcagtgccggaggcccgcagcgccggaacctcagaggcgggtcgcagcggcgcagaggagggctgaagaagatgcagagcagcctgaagctggtggactgtatcatcgaggtccacgatgcccggatcccactttcaggccgcaaccctctgtttcaggaaacccttgggcttaagcctcacttgctggtcctcaacaagatggacttggcggatcttacagagcagcagaaaattatgcaacacttagaaggagaaggcctaaaaaatgtcatttttaccaactgtgtaaaggatgaaaatgtcaagcagatcatcccgatggtcactgaactgattgggagaagccaccgctaccaccgaaaagagaacctggagtactgtatcatggtcattggggtccccaacgtgggcaagtcctccctcatcaactccctccggaggcagcacctcaggaaagggaaagccaccagggtgggtggcgagcctgggatcaccagagctgtgatgtccaaaattcaggtctctgagcggcccctgatgttcctgttggacactcctggcgtgctggctcctcggattgaaagtgtggagacaggcctgaagctggccctgtgtggaacggtgctggaccacctggtcggggaggagaccatggctgactacctgctgtacaccctcaacaaacaccagcgctttgggtacgtgcagcactacggcctgggcagtgcctgtgacaacgtagagcgcgtgctgaagagtgtggctgtgaagctggggaagacgcagaaggtgaaggtgctcacgggcacgggtaacgtgaacattattcagcctaactatcctgcggcagcccgtgacttcctgcagactttccgccgtgggctgctgggttccgtgatgctggacctcgacgtcctgcggggccaccccccggctgagactttgccctgaacttgtccgggtagggagggccggaggcatgtggcctcccagacctcctgacctgggtggttgaggctcaagacagctcacccggtccagaagctccatgctggtcactagggtgctgtgctctctggcgccccacagcctggccagctccagggaccccagttgcagggcccaagcaggtgggagtggacaccaggcttcccagtggacgtccctgagcagctccgcatgcttggttctcccggagcttcctgctcaggcctcttgagaaatggatgctgtctcagaaggagttaaag

SEQ ID NO: 154699 - DNA, 2929 bp, Homo sapiens
  Payload ID: 10411
  Gene Symbol: MTG2
  Gene Name: mitochondrial ribosome-associated GTPase 2
  Uniprot ID: Q9H4K7
  ENST ID: ENST00000370823
  CDS Start-End: 19-1239
ctttcccgagccggggccatggcacctgcaaggtgtttctcagcaagattgaggaccgtgtttcagggcgtggggcattgggctttgtccacatgggctggcctgaagcccagccggctactgccacagcgggcttctcccaggctgctctcggtcggccgtgcggacctcgccaagcatcaggaactcccggggaagaagctgctctctgagaaaaagctgaaaaggtactttgtggactatcggagagtgcttgtctgtggaggaaacggaggcgctggggcaagctgcttccacagtgagccccgcaaggagtttggaggccctgatggaggggacggaggcaacggtggacacgtcattctgagagttgaccagcaagtcaagtccctgtcgtcggtcctgtcgcggtaccagggtttcagtggagaagatggagggagtaaaaactgcttcgggcgcagtggcgccgtcctctacatccgggtccccgtgggcacgctggtgaaggagggaggcagagttgtggccgacctgtcttgcgtgggagatgagtacattgccgcgctgggcggggcaggagggaaaggcaaccgcttcttcctggccaacaacaaccgtgcccctgtgacctgtacccctggacagccaggacagcagcgagttctccacctggagctcaagacggtggcccacgccggaatggtgggattccccaacgccgggaagtcctcactgctccgggccatttcaaacgccagacccgccgtggcttcctacccgttcaccaccctgaagccccacgtcgggatcgtccactacgaaggccacctacaaatagcagtggccgacatccccggcatcatacgaggcgcccaccagaacaggggtctggggtccgccttcctcaggcacatcgagcgctgccgctttctcttgttcgtggtggatctttctcagcctgagccgtggactcaagttgacgatttaaaatatgaactggagatgtatgaaaagggcctgtctgcgaggccccacgcaatcgtcgcaaacaagattgacctccctgaagcccaagccaatctgtcccagctccgggatcacttgggacaggaggtcatcgtgctgtcggcgttgaccggcgagaacctggagcagctgctgttgcacctgaaggtgctgtatgacgcctacgcggaggccgagctgggccagggccgccagccgctcaggtggtagccacgccagagcggggtcgcctctgggcctctgtctgagcaaacctgggtgtgaattcggtggttttgaatgcataaagtgccttgtggacacgggggagttgtggtgcttctgggtctctgggccccgcctgctggcctgagatgccctcatgttgggaagcattccgtgccccctaccccgcctgccctccgtatttcctgcacctgtcagcctgcaccgactgatgagccagttgctcatttgtgctgattaacacccctaataaggggttggggtgcccataacggggtggccctgccgctgactcaggtctccgccatgcacgcgtggactctcggatgagctcagcagaaccgcacagccagagccccaggtcagaagtgcagaccagggttctcagcacagtgcccgtcgtgcttccatggcttgctacggagagagacctctggatccacactggggctgcgtctggcccgttgtccagcagccctgcggtaccgcaagcccaggcaccagtgtctcggggggcctcactgctgcgcaaggggtggggccgaggatgcaagtccaggcagagcggcgcaggcagctgtgagcttttctccatcagccgtctgagaagagcagtgaggccagctgcttcctgtccttcagaacacttctctgtgctcagtgggagccaggaagcctcaggcttcacgactgaatgcacccaatatccgacctggctgcgtgtttctggctgggctgccgtgtgcacagcaagttaactagaggggctgtgggccatggaactgtcagcgttattctcagaaggcggccgtggcatgggcagggtatagtgaggagtggaaggagacgtgtgcctggtaatatggggcggaatttccactcagctccatttgctggggatttaaagagaacccttgtgctacgccaggcagttaccgagccgaagggagatgatgggccttcgcccctcagtgggatggcagctgagggggccctgcatttgaccgtcgagactgcagcagcgcctttcctgtctgtggtttaagtctttgcagtcaagtactgatgcatccaagccaggcccatgcctggtgtctccctgactgcagaggagccccagggcaaggacagctcagctgctggcagcctgcctggcccatagacatcccccaagtagtctcaggcctctgacatgtccctgaggggcccctaagaaagaaagtggaggggacactccagaggctgtcgtgggaggatcatgtgagcctgggaggtcaaggctgcagtgagccgtgattgcaccactgcactccagcctgagtgacagagcgagaccctgtctcaaaaaacaaacaaacaaacaaacaaaaacagaacattctgggcacggtggctcatgcctgtagtcccagcactttgggaggccgaggctggtggatcacaaggtcaggagattgagaccatcctggctaacacagtgaaaccccgtctctactaaaaatacaaaaaaattagccaggcgtggtggcggtcacctgtagtcccagctactcgggaggctgaagcaggagaatggcgtgaacctgggaggcggagcttgcagtgagccgagatcacaccactgcactccagcctgagcgacagagcaagactccatctcaaaaaaaaaaaaaaa

SEQ ID NO: 154700 - DNA, 727 bp, Homo sapiens
  Payload ID: 10411
  Gene Symbol: MTG2
  Gene Name: mitochondrial ribosome-associated GTPase 2
  ENST ID: ENST00000448254
  CDS Start-End: 29-727
cgagccgatatttttgacgtgaggggccatggcacctgcaaggtgtttctcagcaagattgaggaccgtgtttcagggcgtggggcattgggctttgtccacatgggctggcctgaagcccagccggctactgccacagcgggcttctcccaggctgctctcggtcggccgtgcggacctcgccaagcatcaggaactcccggggaagaagctgctctctgagaaaaagctgaaaaggtactttgtggactatcggagagtgcttgtctgtggaggaaacggaggcgctggggcaagctgcttccacagtgagccccgcaaggagtttggaggccctgatggaggggacggaggcaacggtggacacgtcattctgagagttgaccagcaagtcaagtccctgtcgtcggtcctgtcgcggtaccagggtttcagtggagaagatggagggagtaaaaactgcttcgggcgcagtggcgccgtcctctacatccgggtccccgtgggcacgctggtgaaggagggaggcagagttgtggccgacctgtcttgcgtgggagatgagtacattgccgcgctgggcggggcaggagggaaaggcaaccgcttcttcctggccaacaacaaccgtgcccctgtgacctgtacccctggacagccaggacagcagcgagttctccacctggagctcaagacggtggcccacgccggaatggtgggattcccc

SEQ ID NO: 154701 - DNA, 2814 bp, Homo sapiens
  Payload ID: 10411
  Gene Symbol: MTG2
  Gene Name: mitochondrial ribosome-associated GTPase 2
  ENST ID: ENST00000467101
  CDS Start-End: 20-439
gctttcccgagccggggccatggcacctgcaaggtgtttctcagcaagattgaggaccgtgtttcagggcgtggggcattgggctttgtccacatgggctggcctgaagcccagccggctactgccacagcgggcttctcccaggctgctctcggtcggccgtgcggacctcgccaagcatcaggaactcccggggaagaagctgctctctgagaaaaagctgaaaaggtactttgtggactatcggagagtgcttgtctgtggaggaaacggaggcgctggggcaagctgcttccacagtgagccccgcaaggagtttggaggccctgatggaggggacggaggcaacggtggacacgtcattctgagaggtccccgtgggcacgctggtgaaggagggaggcagagttgtggccgacctgtcttgcgtgggagatgagtacattgccgcgctgggcggggcaggagggaaaggcaaccgcttcttcctggccaacaacaaccgtgcccctgtgacctgtacccctggacagccaggacagcagcgagttctccacctggagctcaagacggtggcccacgccggaatggtgggattccccaacgccgggaagtcctcactgctccgggccatttcaaacgccagacccgccgtggcttcctacccgttcaccaccctgaagccccacgtcgggatcgtccactacgaaggccacctacaaatagcagtggccgacatccccggcatcatacgaggcgcccaccagaacaggggtctggggtccgccttcctcaggcacatcgagcgctgccgctttctcttgttcgtggtggatctttctcagcctgagccgtggactcaagttgacgatttaaaatatgaactggagatgtatgaaaagggcctgtctgcgaggccccacgcaatcgtcgcaaacaagattgacctccctgaagcccaagccaatctgtcccagctccgggatcacttgggacaggaggtcatcgtgctgtcggcgttgaccggcgagaacctggagcagctgctgttgcacctgaaggtgctgtatgacgcctacgcggaggccgagctgggccagggccgccagccgctcaggtggtagccacgccagagcggggtcgcctctgggcctctgtctgagcaaacctgggtgtgaattcggtggttttgaatgcataaagtgccttgtggacacgggggagttgtggtgcttctgggtctctgggccccgcctgctggcctgagatgccctcatgttgggaagcattccgtgccccctaccccgcctgccctccgtatttcctgcacctgtcagcctgcaccgactgatgagccagttgctcatttgtgctgattaacacccctaataaggggttggggtgcccataacggggtggccctgccgctgactcaggtctccgccatgcacgcgtggactctcggatgagctcagcagaaccgcacagccagagccccaggtcagaagtgcagaccagggttctcagcacagtgcccgtcgtgcttccatggcttgctacggagagagacctctggatccacactggggctgcgtctggcccgttgtccagcagccctgcggtaccgcaagcccaggcaccagtgtctcggggggcctcactgctgcgcaaggggtggggccgaggatgcaagtccaggcagagcggcgcaggcagctgtgagcttttctccatcagccgtctgagaagagcagtgaggccagctgcttcctgtccttcagaacacttctctgtgctcagtgggagccaggaagcctcaggcttcacgactgaatgcacccaatatccgacctggctgcgtgtttctggctgggctgccgtgtgcacagcaagttaactagaggggctgtgggccatggaactgtcagcgttattctcagaaggcggccgtggcatgggcagggtatagtgaggagtggaaggagacgtgtgcctggtaatatggggcggaatttccactcagctccatttgctggggatttaaagagaacccttgtgctacgccaggcagttaccgagccgaagggagatgatgggccttcgcccctcagtgggatggcagctgagggggccctgcatttgaccgtcgagactgcagcagcgcctttcctgtctgtggtttaagtctttgcagtcaagtactgatgcatccaagccaggcccatgcctggtgtctccctgactgcagaggagccccagggcaaggacagctcagctgctggcagcctgcctggcccatagacatcccccaagtagtctcaggcctctgacatgtccctgaggggcccctaagaaagaaagtggaggggacactccagaggctgtcgtgggaggatcatgtgagcctgggaggtcaaggctgcagtgagccgtgattgcaccactgcactccagcctgagtgacagagcgagaccctgtctcaaaaaacaaacaaacaaacaaacaaaaacagaacattctgggcacggtggctcatgcctgtagtcccagcactttgggaggccgaggctggtggatcacaaggtcaggagattgagaccatcctggctaacacagtgaaaccccgtctctactaaaaatacaaaaaaattagccaggcgtggtggcggtcacctgtagtcccagctactcgggaggctgaagcaggagaatggcgtgaacctgggaggcggagcttgcagtgagccgagatcacaccactgcactccagcctgagcgacagagcaagactccatctcaaaaaaaaaaaaaaa

SEQ ID NO: 154702 - DNA, 1857 bp, Homo sapiens
  Payload ID: 10412
  Gene Symbol: MRM1
  Gene Name: mitochondrial rRNA methyltransferase 1
  Uniprot ID: Q6IN84
  ENST ID: ENST00000611231
  CDS Start-End: 240-1301
ggcgggctcccgaacccggaagcgagggacccacgtgggagcctgggagcgggtggtcgtagctcggtagtccagttgtgggtaatcggggctgtttgttcctgtccgagagagctcggcggagacggctgtcgagtacccttcacctcggtgttgggagcctgggagcgaactgcggcgcgggttaccgctcccggggacgcagcaaggggcatcgagtccctggcgggagctgcgccatggcattgctctcgaccgtccggggcgcgacctggggtcgcctcgtcacccgtcatttctcccatgcagcgcggcatggggagcggcctggtggggaggagctaagccgcttgctgctggatgacctggtgccgacctctcggctggagcttctgtttggcatgaccccgtgtctcctggctctgcaggccgcccgccgctctgtggcccggctcctgctccaggcgggtaaagctgggctgcaggggaagcgggccgagctgctccggatggccgaggcgcgggacattccagttctgcggcccagacggcagaaactggacacaatgtgccgctaccaggtccaccagggtgtctgcatggaggtgagcccgctgcggccccggccttggagagaggccggggaggcgagcccaggcgacgacccccagcagttgtggctcgtcctcgatgggatccaggatccccggaattttggggctgtgctgcgttccgcacacttcctcggagtggataaggtcatcaccagccggagaaacagctgcccgctcactccagtagtcagcaagtccagcgcgggggctatggaggtgatggacgtgttctccactgatgacctcaccggatttttacagaccaaagcccagcagggctggctcgtggccggcacggtgggctgcccaagcacagaggatccccagtcctccgagatccccatcatgagttgcttggagttcctctgggaacggcctactctccttgtgctggggaatgagggctcaggtctatcccaggaggtgcaggcctcctgccagcttctcctcaccatcctgccccggcgccagctgcctcctggacttgagtccttgaacgtctctgtggctgcaggaattcttcttcactccatttgcagccagaggaagggtttccccacagagggggagagaaggcagcttctccaagacccccaagaaccctcagccaggtctgaagggctcagcatggctcagcacccagggctgtcttcaggcccagagaaagagaggcaaaatgagggctgacgtggactgtccacagtgttcatgtgctggagtcagggacggccgcacctgcctccgccggctccagtgtgcggggagcctctgcctgagtgtgcaccaggcccatgtttattgaccacagtctgagggggggggaaggggactgcggtggacaccagaggaagctgtttcctgttgtgatgttggacctgtagtaggacatggtgatttgttaatttccatgggaagccatgatggcctagcatggagggaatctgttcccaggccctgcctggaagttgagggaaagtttagacatctgcagagaggcaggcagcccagcccaggggacccgttcctcttgaaccagtcattgcctgtggcaaatgtgtgtatgagaatgtggggggtggagggcggggccctgatgtggagtagacagtgcgcacctcaggcccacacacggccccgccctggggccttgagcgcaggcctcatctttctgtgccgcgggactctgcacctacctcacagggttgttgtgaggctcaaataaaacatcactcagcacgtggga

SEQ ID NO: 154703 - DNA, 1857 bp, Homo sapiens
  Payload ID: 10412
  Gene Symbol: MRM1
  Gene Name: mitochondrial rRNA methyltransferase 1
  Uniprot ID: Q6IN84
  ENST ID: ENST00000614766
  CDS Start-End: 240-1301
ggcgggctcccgaacccggaagcgagggacccacgtgggagcctgggagcgggtggtcgtagctcggtagtccagttgtgggtaatcggggctgtttgttcctgtccgagagagctcggcggagacggctgtcgagtacccttcacctcggtgttgggagcctgggagcgaactgcggcgcgggttaccgctcccggggacgcagcaaggggcatcgagtccctggcgggagctgcgccatggcattgctctcgaccgtccggggcgcgacctggggtcgcctcgtcacccgtcatttctcccatgcagcgcggcatggggagcggcctggtggggaggagctaagccgcttgctgctggatgacctggtgccgacctctcggctggagcttctgtttggcatgaccccgtgtctcctggctctgcaggccgcccgccgctctgtggcccggctcctgctccaggcgggtaaagctgggctgcaggggaagcgggccgagctgctccggatggccgaggcgcgggacattccagttctgcggcccagacggcagaaactggacacaatgtgccgctaccaggtccaccagggtgtctgcatggaggtgagcccgctgcggccccggccttggagagaggccggggaggcgagcccaggcgacgacccccagcagttgtggctcgtcctcgatgggatccaggatccccggaattttggggctgtgctgcgttccgcacacttcctcggagtggataaggtcatcaccagccggagaaacagctgcccgctcactccagtagtcagcaagtccagcgcgggggctatggaggtgatggacgtgttctccactgatgacctcaccggatttttacagaccaaagcccagcagggctggctcgtggccggcacggtgggctgcccaagcacagaggatccccagtcctccgagatccccatcatgagttgcttggagttcctctgggaacggcctactctccttgtgctggggaatgagggctcaggtctatcccaggaggtgcaggcctcctgccagcttctcctcaccatcctgccccggcgccagctgcctcctggacttgagtccttgaacgtctctgtggctgcaggaattcttcttcactccatttgcagccagaggaagggtttccccacagagggggagagaaggcagcttctccaagacccccaagaaccctcagccaggtctgaagggctcagcatggctcagcacccagggctgtcttcaggcccagagaaagagaggcaaaatgagggctgacgtggactgtccacagtgttcatgtgctggagtcagggacggccgcacctgcctccgccggctccagtgtgcggggagcctctgcctgagtgtgcaccaggcccatgtttattgaccacagtctgggggggggggaaggggactgcggtggacaccagaggaagctgtttcctgttgtgatgttggacctgtagtaggacatggtgatttgttaatttccatgggaagccatgatggcctagcatggagggaatctgttcccaggccctgcctggaagttgagggaaagtttagacatctgcagagaggcaggcagcccagcccaggggacccgttcctcttgaaccagtcattgcctgtggcaaatgtgtgtatgagaatgtggggggtggagggcggggccctgatgtggagtagacagtgcgcacctcaggcccacacacggccccgccctggggccttgagcgcaggcctcatctttctgtgccgcgggactccgcacctacctcacagggttgttgtgaggctcaaataaaacatcactcagcacgtggga

SEQ ID NO: 154704 - DNA, 1284 bp, Homo sapiens
  Payload ID: 10412
  Gene Symbol: MRM1
  Gene Name: mitochondrial rRNA methyltransferase 1
  ENST ID: ENST00000612760
  CDS Start-End: 259-735
ttctgtttggcatgaccccgtgtctcctggctctgcaggccgcccgccgctctgtggcccggctcctgctccaggcgggtaaagctgggctgcaggggaagcgggccgagctgctccggatggccgaggcgcgggacattccagttctgcggcccagacggcagaaactggacacaatgtgccgctaccaggtccaccagggtgtctgcatggagctgcccgctcactccagtagtcagcaagtccagcgcgggggctatggaggtgatggacgtgttctccactgatgacctcaccggatttttacagaccaaagcccagcagggctggctcgtggccggcacggtgggctgcccaagcacagaggatccccagtcctccgagatccccatcatgagttgcttggagttcctctgggaacggcctactctccttgtgctggggaatgagggctcaggtctatcccaggaggtgcaggcctcctgccagcttctcctcaccatcctgccccggcgccagctgcctcctggacttgagtccttgaacgtctctgtggctgcaggaattcttcttcactccatttgcagccagaggaagggtttccccacagagggggagagaaggcagcttctccaagacccccaagaaccctcagccaggtctgaagggctcagcatggctcagcacccagggctgtcttcaggcccagagaaagagaggcaaaatgagggctgacgtggactgtccacagtgttcatgtgctggagtcagggacggccgcacctgcctccgccggctccagtgtgcggggagcctctgcctgagtgtgcaccaggcccatgtttattgaccacagtctgggggggggggaaggggactgcggtggacaccagaggaagctgtttcctgttgtgatgttggacctgtagtaggacatggtgatttgttaatttccatgggaagccatgatggcctagcatggagggaatctgttcccaggccctgcctggaagttgagggaaagtttagacatctgcagagaggcaggcagcccagcccaggggacccgttcctcttgaaccagtcattgcctgtggcaaatgtgtgtatgagaatgtggggggtggagggcggggccctgatgtggagtagacagtgcgcacctcaggcccacacacggccccgccctggggccttgagcgcaggcctcatctttctgtgccgcgggactccgcacctacctcacagggttgttgtgaggctcaaataaaacatcactcagca

SEQ ID NO: 154705 - DNA, 1284 bp, Homo sapiens
  Payload ID: 10412
  Gene Symbol: MRM1
  Gene Name: mitochondrial rRNA methyltransferase 1
  ENST ID: ENST00000631971
  CDS Start-End: 259-735
ttctgtttggcatgaccccgtgtctcctggctctgcaggccgcccgccgctctgtggcccggctcctgctccaggcgggtaaagctgggctgcaggggaagcgggccgagctgctccggatggccgaggcgcgggacattccagttctgcggcccagacggcagaaactggacacaatgtgccgctaccaggtccaccagggtgtctgcatggagctgcccgctcactccagtagtcagcaagtccagcgcgggggctatggaggtgatggacgtgttctccactgatgacctcaccggatttttacagaccaaagcccagcagggctggctcgtggccggcacggtgggctgcccaagcacagaggatccccagtcctccgagatccccatcatgagttgcttggagttcctctgggaacggcctactctccttgtgctggggaatgagggctcaggtctatcccaggaggtgcaggcctcctgccagcttctcctcaccatcctgccccggcgccagctgcctcctggacttgagtccttgaacgtctctgtggctgcaggaattcttcttcactccatttgcagccagaggaagggtttccccacagagggggagagaaggcagcttctccaagacccccaagaaccctcagccaggtctgaagggctcagcatggctcagcacccagggctgtcttcaggcccagagaaagagaggcaaaatgagggctgacgtggactgtccacagtgttcatgtgctggagtcagggacggccgcacctgcctccgccggctccagtgtgcggggagcctctgcctgagtgtgcaccaggcccatgtttattgaccacagtctgagggggggggaaggggactgcggtggacaccagaggaagctgtttcctgttgtgatgttggacctgtagtaggacatggtgatttgttaatttccatgggaagccatgatggcctagcatggagggaatctgttcccaggccctgcctggaagttgagggaaagtttagacatctgcagagaggcaggcagcccagcccaggggacccgttcctcttgaaccagtcattgcctgtggcaaatgtgtgtatgagaatgtggggggtggagggcggggccctgatgtggagtagacagtgcgcacctcaggcccacacacggccccgccctggggccttgagcgcaggcctcatctttctgtgccgcgggactctgcacctacctcacagggttgttgtgaggctcaaataaaacatcactcagca

SEQ ID NO: 154706 - DNA, 1353 bp, Homo sapiens
  Payload ID: 10413
  Gene Symbol: MECR
  Gene Name: mitochondrial trans-2-enoyl-CoA reductase
  Uniprot ID: Q9BV79
  ENST ID: ENST00000263702
  CDS Start-End: 27-1148
caggctctgtgttggttggagcgagcatgtgggtctgcagtaccctgtggcgggtgcgaacccccgcccggcagtggcgggggctgctcccagcttctggctgtcacggacctgccgcctcctcctactccgcatccgccgagcctgcccgggtccgggcgcttgtctatgggcaccacggggatccagccaaggtcgtcgaactcaagaacctggagctagctgctgtgagaggatcagatgtccgtgtgaagatgctggcggcccctatcaatccatctgacataaatatgatccaaggaaactacggattccttcctgaactgcctgctgttggagggaacgaaggtgttgcacaggtggtagcggtgggcagcaatgtgaccgggctgaagccaggagactgggtgattccagcaaatgctggtttaggaacctggcggaccgaggctgtgttcagcgaggaagcactgatccaagttccgagtgacatccctcttcagagcgctgccaccctgggtgtcaatccctgcacagcctacaggatgttgatggacttcgagcaactgcagccaggggattctgtcatccagaatgcatccaacagcggagtggggcaagcagtcatccagatcgccgcagccctgggcctaagaaccatcaatgtggtccgagacagacctgatatccagaagctgagtgacagactgaagagtctgggggctgagcatgtcatcacagaagaggagctaagaaggcccgaaatgaaaaacttctttaaggacatgccccagccacggcttgctctcaactgtgttggtgggaaaagctccacagagctgctgcggcagttagcgcgtggaggaaccatggtaacctatggggggatggccaagcagcccgtcgtagcctctgtgagcctgctcatttttaaggatctcaaacttcgaggcttttggttgtcccagtggaagaaggatcacagtccagaccagttcaaggagctgatcctcacactgtgcgatctcatccgccgaggccagctcacagcccctgcctgctcccaggtcccgctgcaggactaccagtctgccttggaagcctccatgaagcccttcatatcttcaaagcagattctcaccatgtgatcatcccaaaagagctggagtgacatgggaggggaggcggatctgaggggctgggtgcaggcccctcagttggggctcccaccttccccagactactgttctcctcactgcctcttcctattaggaggatggtgaagccagccacggttttccccagggccagccttaaggtatctaataaagtctgaactctcccttccaaaaa

SEQ ID NO: 154707 - DNA, 2416 bp, Homo sapiens
  Payload ID: 10413
  Gene Symbol: MECR
  Gene Name: mitochondrial trans-2-enoyl-CoA reductase
  Uniprot ID: Q9BV79
  ENST ID: ENST00000373791
  CDS Start-End: 374-1267
gtgttggttggagcgagcatgtgggtctgcagtaccctgtggcgggtgcgaacccccgcccggcagtggcgggggctgctcccagcttctggctgtcacggacctgccgcctcctcctactccgcatccgccgagcctgcccgggtccgggcgcttgtctatgggcaccacggggatccagccaaggtcgtcgaaaccgtaattcctgggcacacatggcagctcagaaatgttgcctgacctactttgaggagatgatttgagcgaaacacccattctagcctggatgacatgaacatctccgtttggctttgtgcttagactcaagaacctggagctagctgctgtgagaggatcagatgtccgtgtgaagatgctggcggcccctatcaatccatctgacataaatatgatccaaggaaactacggattccttcctgaactgcctgctgttggagggaacgaaggtgttgcacaggtggtagcggtgggcagcaatgtgaccgggctgaagccaggagactgggtgattccagcaaatgctggtttaggaacctggcggaccgaggctgtgttcagcgaggaagcactgatccaagttccgagtgacatccctcttcagagcgctgccaccctgggtgtcaatccctgcacagcctacaggatgttgatggacttcgagcaactgcagccaggggattctgtcatccagaatgcatccaacagcggagtggggcaagcagtcatccagatcgccgcagccctgggcctaagaaccatcaatgtggtccgagacagacctgatatccagaagctgagtgacagactgaagagtctgggggctgagcatgtcatcacagaagaggagctaagaaggcccgaaatgaaaaacttctttaaggacatgccccagccacggcttgctctcaactgtgttggtgggaaaagctccacagagctgctgcggcagttagcgcgtggaggaaccatggtaacctatggggggatggccaagcagcccgtcgtagcctctgtgagcctgctcatttttaaggatctcaaacttcgaggcttttggttgtcccagtggaagaaggatcacagtccagaccagttcaaggagctgatcctcacactgtgcgatctcatccgccgaggccagctcacagcccctgcctgctcccaggtcccgctgcaggactaccagtctgccttggaagcctccatgaagcccttcatatcttcaaagcagattctcaccatgtgatcatcccaaaagagctggagtgacatgggaggggaggcggatctgaggggctgggtgcaggcccctcagttggggctcccaccttccccagactactgttctcctcactgcctcttcctattaggaggatggtgaagccagccacggttttccccagggccagccttaaggtatctaataaagtctgaactctcccttccaaaaagtagaagtcatccctgtcgagaaggaccaacactgtgcactggtcagctcacagcaccaagaggcccccttcctgcttttctgtcatgtgttcccccagtaatcattttctgaccaccctgaaagcaaagcctgggtgggtactggcagtgcaaaggccagtaggccaccatccctggccccaagctgcacaagcccacagacgagggtcctgtagaacaaacgctttgatgtgcttctcaggtagcctgcggcccagtccagggcttggggaggatcagctgcatggaagagtgaatgccaggctgaggtcatcagggccctgaggaacttggacgtggggtcttcactctcatggaactgcccttctaactggagacatagacaatataccagtggttctcaaccagaggcaattttacccccaggagacatttgacaatgtctggggatatttctggctatcacagcttatgaaggaggttgctactggcatctagcaggcagagtgagtgctgctgttaaacccaccacaggacacagaacagtctactgcaacaaagaattacccaaggcctggcgcggtggctcacacctgtaatcccagcactttgggaagccaaggcaagcggatcacttgagcccaggagttcaaggtcaacctaggtaacgtggtgaaacaccatctctacaaaaaatacaaacattagccaggtatggtgctgtgcacctgtagtcccagctactcgggaggttgaggtgggaggatcacctgagcctgggaggtctagactgcagtgagccatgatcatgccactgcattccagcctaggcaacagagcaagaccctatatcaaaaaaaaaaaaaaaatctagccccaaatgttcaatgttcatgaggtcgttgataaaccgtgcattaaacaatctcacagtaattaccat

SEQ ID NO: 154708 - DNA, 915 bp, Homo sapiens
  Payload ID: 10413
  Gene Symbol: MECR
  Gene Name: mitochondrial trans-2-enoyl-CoA reductase
  ENST ID: ENST00000463412
  CDS Start-End: 1-639
gtgattccagcaaatgctggtttaggaacctggcggaccgaggctgtgttcagcgaggaagcactgatccaagttccgagtgacatccctcttcagagcgctgccaccctgggtgtcaatccctgcacagcctacaggatgttgatggacttcgagcaactgcagccaggggattctgtcatccagaatgcatccaacagcggagtggggcaagcagtcatccagatcgccgcagccctgggcctaagaaccatcaatgtggtccgagacagacctgatatccagaagctgagtgacagactgaagagtctgggggctgagcatgtcatcacagaagaggagctaagaaggcccgaaatgaaaaacttctttaaggacatgccccagccacggcttgctctcaactgtgttggtgggaaaagctccacagagctgctgcggcagttagcgcgtggaggaaccatggtaacctatggggggatggccaagcagcccgtcgtagcctctgtggtaagctgggtgcagagggaggcatgcctggagccgggccagacacctcagccaggccacatcccctggcacgacagctgtctaagcttaggcaatgccccgttcctggaggggagtctgtacccttaagcggtacctgaagttcttgccctcagagcccagcatgtccttcctgtgtctgcagagcctgctcatttttaaggatctcaaacttcgaggcttttggttgtcccagtggaagaaggatcacagtccagaccagttcaaggagctgatcctcacactgtgcgatctcatccgccgaggccagctcacagcccctgcctgctcccaggtcccgctgcaggactaccagtctgccttggaagcctccatgaagcccttcatatcttcaaagcagattct

SEQ ID NO: 154709 - DNA, 1997 bp, Homo sapiens
  Payload ID: 10414
  Gene Symbol: MTERF1
  Gene Name: mitochondrial transcription termination factor 1
  Uniprot ID: Q99551
  ENST ID: ENST00000351870
  CDS Start-End: 95-1294
ctagccgctccggaccccagaggcggaagtaaaagcgaactacagtggatgggtgcagttcaggagatagctgttctccagcctttctggagggatgcagagcctttccttaggacaaacaagcatttcaaaaggtttgaactacctaaccattatggcaccaggaaacctctggcatatgagaaataactttctctttggttcaagatgttggatgactcgattttcagcagaaaacatcttcaaatcagtttcatttaggctttttggtgtgaagtgtcataatacagacagtgagcctttgaaaaatgaggacctactgaaaaacttacttactatgggagtagatattgacatggcaaggaaacgacagcctggagtttttcataggatgattaccaatgagcaggacctgaagatgttccttctttccaaaggagctagcaaagaagtgatcgctagcatcatatcaagatatccacgagcaataacacgtactcccgagaatctttcaaaacggtgggatctgtggagaaagattgtgacatcagaccttgaaattgtaaatattttggaacgttctcctgaatccttttttcggtccaataacaacctaaacttagagaataatataaagttcctctactcagttggattgacccgtaaatgcctttgtcgattgttgaccaatgcccctcgtaccttctccaatagtcttgatctgaataaacagatggttgaatttttgcaggcagccggtttgtcattgggtcacaatgatcccgcagattttgtcagaaagataatttttaaaaacccttttatcttaattcagagcaccaagcgggtgaaagctaacattgaattcttacggtcaactttcaatttgaacagtgaggaactgctggttctgatatgtggtccaggagctgaaatcctagacctttccaatgactatgccagaagaagctacgcaaacatcaaagagaagctgttttctcttggatgtactgaagaagaggtacagaagtttgtcttaagctatccagatgtgatcttcttggcagagaaaaagtttaatgataaaatagactgcctcatggaagaaaacattagcatttcacaaataatcgaaaatcctcgggttctggattcaagcataagtactttaaaaagtcgaatcaaagaattggtaaatgctggctgtaacttgagtactttaaacatcactcttctatcttggagtaaaaaaagatatgaagctaaattgaaaaagttaagcagatttgcctaaggatgccaatgtttttaattctcaggaactgtgaatatgttatgccacattgcaaaagaattttgcagaagtgattaatttaaaatgttattaagggccttgagatggggagattatcctgaattactttggagggcctaatataattgtagggatctttaaaagttgaagagggaggcaaaagaggaggtcagagtgatcctgtataagaaagacaactacttttgaaggaagttaaaaggtggctttgaaggaggaagacaccttgagccaaggaatgaagggggcctgtaaaaaaagattgaaaaggcaaggaaacagattctccattagagtccccagaaaggaatgcagccttgctggcacctttttagcccagtgagatcaatgtcaaacttctgacccacagaaccataagatggtaaatttgtgttgttttaaaccactgagtcagtgataatttgctgaagaagcaaatagattaacatagcaactaagtagatgattagttgcattataggtgaagtcaaaaatacagtcctttagtaaagtctctatttcttccttttataagagtaattatatttaaaaaatctacctacccttctggaattgctaatgttagtgtttataaagtcttaaatgtgtgcataaaaaactaaatgtgaatataaaatctaaataaaggaatatgtttgcctaa

SEQ ID NO: 154710 - DNA, 1639 bp, Homo sapiens
  Payload ID: 10414
  Gene Symbol: MTERF1
  Gene Name: mitochondrial transcription termination factor 1
  ENST ID: ENST00000406735
  CDS Start-End: 228-1367
gtaaaagcgaactacagtggatgggtgcagttcaggagatagctgttctccagcctttctggagggatgcagagcctttccttaggacaaacaagaaagtactgatctgatttccagctgacgcattctgcccctttattccagtagaggtcagtcgagcatctggaagagaaaacaggctgttgaactatgcaagcatttcaaaaggtttgaactacctaaccattatggcaccaggaaacctctggcatatgagaaataactttctctttggttcaagatgttggatgactcgattttcagcagaaaacatcttcaaatcagtttcatttaggctttttggtgtgaagtgtcataatacagacagtgagcctttgaaaaatgaggacctactgaaaaacttacttactatgggagtagatattgacatggcaaggaaacgacagcctggagtttttcataggatgattaccaatgagcaggacctgaagatgttccttctttccaaaggagctagcaaagaagtgatcgctagcatcatatcaagatatccacgagcaataacacgtactcccgagaatctttcaaaacggtgggatctgtggagaaagattgtgacatcagaccttgaaattgtaaatattttggaacgttctcctgaatccttttttcggtccaataacaacctaaacttagagaataatataaagttcctctactcagttggattgacccgtaaatgcctttgtcgattgttgaccaatgcccctcgtaccttctccaatagtcttgatctgaataaacagatggttgaatttttgcaggcagccggtttgtcattgggtcacaatgatcccgcagattttgtcagaaagataatttttaaaaacccttttatcttaattcagagcaccaagcgggtgaaagctaacattgaattcttacggtcaactttcaatttgaacagtgaggaactgctggttctgatatgtggtccaggagctgaaatcctagacctttccaatgactatgccagaagaagctacgcaaacatcaaagagaagctgttttctcttggatgtactgaagaagaggtacagaagtttgtcttaagctatccagatgtgatcttcttggcagagaaaaagtttaatgataaaatagactgcctcatggaagaaaacattagcatttcacaaataatcgaaaatcctcgggttctggattcaagcataagtactttaaaaagtcgaatcaaagaattggtaaatgctggctgtaacttgagtactttaaacatcactcttctatcttggagtaaaaaaagatatgaagctaaattgaaaaagttaagcagatttgcctaaggatgccaatgtttttaattctcaggaactgtgaatatgttatgccacattgcaaaagaattttgcagaagtgattaatttaaaatgttattaagggccttgagatggggagattatcctgaattactttggagggcctaatataattgtagggatctttaaaagttgaagagggaggcaaaagaggaggtcagagtgatcctgtataagaaagacaactacttttgaaggaagttaaaaggtggctttgaaggaggaagacaccttgagcc

SEQ ID NO: 154711 - DNA, 554 bp, Homo sapiens
  Payload ID: 10414
  Gene Symbol: MTERF1
  Gene Name: mitochondrial transcription termination factor 1
  ENST ID: ENST00000442961
  CDS Start-End: 79-554
aaaagcgaactacagtggatgggtgcagttcagggtgagattgggaagagatagctgttctccagcctttctggagggatgcagagcctttccttaggacaaacaagcatttcaaaaggtttgaactacctaaccattatggcaccaggaaacctctggcatatgagaaataactttctctttggttcaagatgttggatgactcgattttcagcagaaaacatcttcaaatcagtttcatttaggctttttggtgtgaagtgtcataatacagacagtgagcctttgaaaaatgaggacctactgaaaaacttacttactatgggagtagatattgacatggcaaggaaacgacagcctggagtttttcataggatgattaccaatgagcaggacctgaagatgttccttctttccaaaggagctagcaaagaagtgatcgctagcatcatatcaagatatccacgagcaataacacgtactcccgagaatctttcaaaacggtgggatctgtggagaaagattgtgacatcagaccttgaaattgtaaatat

SEQ ID NO: 154712 - DNA, 720 bp, Homo sapiens
  Payload ID: 10414
  Gene Symbol: MTERF1
  Gene Name: mitochondrial transcription termination factor 1
  ENST ID: ENST00000425936
  CDS Start-End: 641-720
gttcagggtgagattgggaaggtggtgaggctgtgctttcctttctttttgttaagaagtgggtgtgggtgactgctgtacagtgcagccctttgcagatttgtctttggaggaggaagagggatggaaagagccttcggtgtggaattaccttggttttgagttaagaaagacccacctgggttcgaaccctaatgcttcagctagcgaaggcaggctagtatgggagctcggcgctgtttcagattttgtaattttaaggcttatgcctaccttttaaattgttgtggggagtaaagcgagacaatatatatgaagcacttagctttggtacaaaacgtattcgtgattccgctaccttttcccatcatatgtaggcatgtacttgccgttttcttttctgtatgtctgagaaatgttgtttgcaagaggtaatgcatctcacgagaacataatgcaacgagaacgttagctgggatcgatctcttattttgtattaggaaggcctgaaatattttgccttttttttgtgtgtgtgtgtcatttccagagatagctgttctccagcctttctggagggatgcagagcctttccttaggacaaacaagcatttcaaaaggtttgaactacctaaccattatggcaccaggaaacctctggcatatgagaaataactttctctttggttcaagatgttggatgactcgattttcagcaga

SEQ ID NO: 154713 - DNA, 581 bp, Homo sapiens
  Payload ID: 10414
  Gene Symbol: MTERF1
  Gene Name: mitochondrial transcription termination factor 1
  ENST ID: ENST00000456229
  CDS Start-End: 163-581
acagtggatgggtgcagttcaggagatagctgttctccagcctttctggagggatgcagagcctttccttaggacaaacaagaggtcagtcgagcatctggaagagaaaacaggctgttgaactatgcaagcatttcaaaaggtttgaactacctaaccattatggcaccaggaaacctctggcatatgagaaataactttctctttggttcaagatgttggatgactcgattttcagcagaaaacatcttcaaatcagtttcatttaggctttttggtgtgaagtgtcataatacagacagtgagcctttgaaaaatgaggacctactgaaaaacttacttactatgggagtagatattgacatggcaaggaaacgacagcctggagtttttcataggatgattaccaatgagcaggacctgaagatgttccttctttccaaaggagctagcaaagaagtgatcgctagcatcatatcaagatatccacgagcaataacacgtactcccgagaatctttcaaaacggtgggatctgtggagaaagattgtgacatcagaccttgaaattgtaaatatttt

SEQ ID NO: 154714 - DNA, 3882 bp, Homo sapiens
  Payload ID: 10414
  Gene Symbol: MTERF1
  Gene Name: mitochondrial transcription termination factor 1
  ENST ID: ENST00000419292
  CDS Start-End: 78-1217
agaggcggaagtaaaagcgaactacagtggatgggtgcagttcaggcatttcaaaaggtttgaactacctaaccattatggcaccaggaaacctctggcatatgagaaataactttctctttggttcaagatgttggatgactcgattttcagcagaaaacatcttcaaatcagtttcatttaggctttttggtgtgaagtgtcataatacagacagtgagcctttgaaaaatgaggacctactgaaaaacttacttactatgggagtagatattgacatggcaaggaaacgacagcctggagtttttcataggatgattaccaatgagcaggacctgaagatgttccttctttccaaaggagctagcaaagaagtgatcgctagcatcatatcaagatatccacgagcaataacacgtactcccgagaatctttcaaaacggtgggatctgtggagaaagattgtgacatcagaccttgaaattgtaaatattttggaacgttctcctgaatccttttttcggtccaataacaacctaaacttagagaataatataaagttcctctactcagttggattgacccgtaaatgcctttgtcgattgttgaccaatgcccctcgtaccttctccaatagtcttgatctgaataaacagatggttgaatttttgcaggcagccggtttgtcattgggtcacaatgatcccgcagattttgtcagaaagataatttttaaaaacccttttatcttaattcagagcaccaagcgggtgaaagctaacattgaattcttacggtcaactttcaatttgaacagtgaggaactgctggttctgatatgtggtccaggagctgaaatcctagacctttccaatgactatgccagaagaagctacgcaaacatcaaagagaagctgttttctcttggatgtactgaagaagaggtacagaagtttgtcttaagctatccagatgtgatcttcttggcagagaaaaagtttaatgataaaatagactgcctcatggaagaaaacattagcatttcacaaataatcgaaaatcctcgggttctggattcaagcataagtactttaaaaagtcgaatcaaagaattggtaaatgctggctgtaacttgagtactttaaacatcactcttctatcttggagtaaaaaaagatatgaagctaaattgaaaaagttaagcagatttgcctaaggatgccaatgtttttaattctcaggaactgtgaatatgttatgccacattgcaaaagaattttgcagaagtgattaatttaaaatgttattaagggccttgagatggggagattatcctgaattactttggagggcctaatataattgtagggatctttaaaagttgaagagggaggcaaaagaggaggtcagagtgatcctgtataagaaagacaactacttttgaaggaagttaaaaggtggctttgaaggaggaagacaccttgagccaaggaatgaagggggcctgtaaaaaaagattgaaaaggcaaggaaacagattctccattagagtccccagaaaggaatgcagccttgctggcacctttttagcccagtgagatcaatgtcaaacttctgacccacagaaccataagatggtaaatttgtgttgttttaaaccactgagtcagtgataatttgctgaagaagcaaatagattaacatagcaactaagtagatgattagttgcattataggtgaagtcaaaaatacagtcctttagtaaagtctctatttcttccttttataagagtaattatatttaaaaaatctacctacccttctggaattgctaatgttagtgtttataaagtcttaaatgtgtgcataaaaaactaaatgtgaatataaaatctaaataaaggaatatgtttgcctaatatagtttaaggaaatgataatcatttctgtgcattttgttggcatttcagctaatattaaagagtaattttcagaggcattgacttaaaaaatggcaaatcagataatgtcggtattttcaagatacaatctagctctgacataaactgaaagacgtgagacaaattatatgaccttaattttaattgttttccagaggcatttgttttctagatgtggtttttgaattaaataacataatggtgctcaaccttttaaacctcatttgctatcagtgatacttcaaaaaaccttattcctactattgataaaaacaatatgtctgcttttctaaggccatttatatattcaacgatactcctattataatttggttaactatttgatggcaagcatggcatagtttagaaagcaagagctttagagtgatgtatctgggcaccattcctgagtaacttgtgttaatgttttaaatttactaaacctgtttttctcatctgtaacaccagaaattgaccttccagagttggtaggaatcaaatgaaaaagcacctctaaggtttcttgcacatagtaatgatgcaatcagtgatagctataataaaaagatagtattttaaaaagcagctttatacataattcacatattcaatttacctatttaaagtctaacacagttcaatttatatatagagttgtgcaactttatcttccattgcttataatacatttataatttattggaaaatttataaggaaaatgaatttcttacagttatggaagctgagaaatcctaggttgaggggccacatctggtgagagccttcttgctggtggggactctgaagagtcctgaggcggcacagtgtatcacatggcgattgctaatgtacttaggtctcttttcctcttataaagccaccagtccactcccatgatagcctattaattcattaatccatgaatagattaatcaatttctgatgacatagcccttatgatccagtcacctcttaaaggccccacctctcaatactgccacattggggattaaatttcaacatgagttttggaggggatggatagtcaaaccatagcagcaaccatcaccacaatctagttttagaatatgtttgcagtcctaacagaaaccttgtacctgttagtgaatccccattatttccctccatttgttcccccaagcctaagcaaaaatgaatctgttttctgtgtctataaatttgtttattctgagcatttcatataaatggaatcatacagtatggtcttttgtgactggcttctttcacttagcatattttcaaggttcatccatgtagcacatattagtatttcattttttttggcaagtaatattccattgtatgggtacagtagtattgggaatacattttactgttatggcttaaagtattgatttcttaagtcttctgaattgtacgcgagtgttttctgaggtattgttttggaatctaacaagctcataagggacttgaaggaggtgggtagaagagataatagtttattgacatcagcagatcataggattgtagctgggctgatgagaaatggtatagcaacgatagttgcaagtggccagagagaatgtgggttgcactgaagtacagtacagcacttgatcattgggcagtaggggatgggggaaggaaaactttggagaaacaaacagataatgcctgtcaggcaaaattaacatgtcatactttaaggtttgagtctgatcaagggagagtcaattctttttttttaaagatagaattatagaaatattggccagccatgtaatcccagctcacgcctgtaatcccagcaatttgggaggccgaggtgggaggattgcttgagcccaggagttcaagaccagcctgggtaatactagcaagatatcattgctagtagggaaaaaaaaaaaaaaaaa

SEQ ID NO: 154715 - DNA, 1790 bp, Homo sapiens
  Payload ID: 10415
  Gene Symbol: MTERF2
  Gene Name: mitochondrial transcription termination factor 2
  Uniprot ID: Q49AM1
  ENST ID: ENST00000240050
  CDS Start-End: 367-1524
gattggccatgggcgaagggactgatggcctggttggcgctgctgagaactgtcgggagcttcttgagaccgaggaccgaaatcccggctccaggcctcggggactgcggactgtggggaggctggccggagagagagggaaggacggggcctggcccccgggactccctgtgccttgcttggagctgacgccgacggtttattgcagggaactgacaagatcacattttgagaagaagttggaaagaatcccaagtggatgaactgaatatctggatgaggacaagatctgtggggagagactgtaagatagaatgagtccatttaagtcccaggacggtggaaactagctagtagattgcagccatgttgtggaagctgctgctgagatcccagtcctgcaggctgtgttctttcagaaagatgcgatcacctccaaaatacagacctttcttagcatgcttcacctatacaactgataaacagtcgagcaaagaaaatacaagaacagtggaaaagctctataaatgttcagttgacattaggaaaattcgtagattaaaaggatgggtacttttagaggatgaaacctatgttgaagaaattgcgaatattttacaagaactaggtgccgatgagactgctgtagccagtattttggaacgctgcccggaagcaattgtctgtagtccaaccgctgttaacacccagagaaaactctggcagttggtctgcaaaaatgaggaagagttaatcaagttaatagagcagtttccagaatctttctttactattaaagaccaagagaaccagaagctgaatgttcagttctttcaagagttgggactaaaaaatgtggtcattagcagacttttgacagctgcacctaatgtttttcataatcctgttgagaagaataagcaaatggtaagaattctccaagagagttatctagatgtaggtggctctgaggccaacatgaaagtttggctactaaaattgttaagccaaaacccatttattttgttaaattctcccacagctataaaggaaacactagaatttctccaggagcaaggtttcaccagctttgaaattctccagcttctatccaaactcaaaggatttctttttcaactttgcccaagaagtatacagaatagtatttccttctctaaaaatgcttttaaatgcacagatcatgacctgaagcaattagttttgaaatgtcctgcccttttatattattctgttccagttttagaagagagaatgcaaggattattgagagaaggaatttccatagctcagataagagagacgccaatggttcttgaattaacaccacagatagtacagtacaggataaggaaactgaattcctcaggctacagaataaaggatggacatctagcaaatctaaatggatcaaaaaaagagtttgaagctaattttggcaaaattcaggccaaaaaagtaaggccattatttaaccctgtggcaccattaaatgttgaagaatgacatactgactgttgttgcttctttctagcagtgcagggtgaaactaactagcaaagacaaaaattcaggcagtttgtagacaccagtaattttaagaacctgcttagcttctgtgttgtatttaagttatctctaaatagataaattctgactcatgtgccatattataaaatataaatcatatttattttaataaggttggtaacttttaccttgaaccattatttcaaaaactcatatactattaaatggcatatcagtgtgat

SEQ ID NO: 154716 - DNA, 1763 bp, Homo sapiens
  Payload ID: 10415
  Gene Symbol: MTERF2
  Gene Name: mitochondrial transcription termination factor 2
  Uniprot ID: Q49AM1
  ENST ID: ENST00000392830
  CDS Start-End: 340-1497
gggactgatggcctggttggcgctgctgagaactgtcgggagcttcttgagaccgaggaccgaaatcccggctccaggcctcggggactgcggactgtggggaggctggccggagagagagggaaggacggggcctggcccccgggactccctgtgccttgcttggagctgacgccgacggggaactgacaagatcacattttgagaagaagttggaaagaatcccaagtggatgaactgaatatctggatgaggacaagatctgtggggagagactgtaagatagaatgagtccatttaagtcccaggacggtggaaactagctagtagattgcagccatgttgtggaagctgctgctgagatcccagtcctgcaggctgtgttctttcagaaagatgcgatcacctccaaaatacagacctttcttagcatgcttcacctatacaactgataaacagtcgagcaaagaaaatacaagaacagtggaaaagctctataaatgttcagttgacattaggaaaattcgtagattaaaaggatgggtacttttagaggatgaaacctatgttgaagaaattgcgaatattttacaagaactaggtgccgatgagactgctgtagccagtattttggaacgctgcccggaagcaattgtctgtagtccaaccgctgttaacacccagagaaaactctggcagttggtctgcaaaaatgaggaagagttaatcaagttaatagagcagtttccagaatctttctttactattaaagaccaagagaaccagaagctgaatgttcagttctttcaagagttgggactaaaaaatgtggtcattagcagacttttgacagctgcacctaatgtttttcataatcctgttgagaagaataagcaaatggtaagaattctccaagagagttatctagatgtaggtggctctgaggccaacatgaaagtttggctactaaaattgttaagccaaaacccatttattttgttaaattctcccacagctataaaggaaacactagaatttctccaggagcaaggtttcaccagctttgaaattctccagcttctatccaaactcaaaggatttctttttcaactttgcccaagaagtatacagaatagtatttccttctctaaaaatgcttttaaatgcacagatcatgacctgaagcaattagttttgaaatgtcctgcccttttatattattctgttccagttttagaagagagaatgcaaggattattgagagaaggaatttccatagctcagataagagagacgccaatggttcttgaattaacaccacagatagtacagtacaggataaggaaactgaattcctcaggctacagaataaaggatggacatctagcaaatctaaatggatcaaaaaaagagtttgaagctaattttggcaaaattcaggccaaaaaagtaaggccattatttaaccctgtggcaccattaaatgttgaagaatgacatactgactgttgttgcttctttctagcagtgcagggtgaaactaactagcaaagacaaaaattcaggcagtttgtagacaccagtaattttaagaacctgcttagcttctgtgttgtatttaagttatctctaaatagataaattctgactcatgtgccatattataaaatataaatcatatttattttaataaggttggtaacttttaccttgaaccattatttcaaaaactcatatactattaaatggcatatcagtgtgat

SEQ ID NO: 154717 - DNA, 3235 bp, Homo sapiens
  Payload ID: 10415
  Gene Symbol: MTERF2
  Gene Name: mitochondrial transcription termination factor 2
  Uniprot ID: Q49AM1
  ENST ID: ENST00000552029
  CDS Start-End: 2070-3227
tgctgagaactgtcgggagcttcttgagaccgaggaccgaaatcccggctccaggcctcggggactgcggactgtggggaggctggccggagagagagggaaggacggggcctggcccccgggactccctgtgccttgcttggagctgacgccgacgggtgagtcgcccccttcctctgctcctgggcgtgttcctcaccagcggcgccgcagcggtcagggcccgcaaaaccccacgcctcgccagacgctcagctcagcctgccgggtttctctggaaaagcggaggccccacagtgaatgtgcggccttttgatcggtcctggagatcttccgtggaccctcgtttttccttgcttataaacgttggtcaatttgaaactggcagcagggcatatgtgttacgaaagaagaactttattgaaaccagtggtggtgtagagaagaccatactaaccataactgtgtattacagaagtgaatttcactccccaaaaatgcttaagaaacaagcatcctagaacagcccacattgtgatttaacaaacatttaccaaaagcattgctatatgtgggggcacagggctaagagcaggcaggactctggagccaacctgtggggtttgagtccaaattctgccggttttttgttttttgtttttttttttagctgagtaaccttgggcaagttcctttacctgcgtctgtttcctcattttaaaatgagttgttgtgatgatttaatgatttagtatatgtgaagagttttctgcatattctaagtgatttatggtattaactcgtttgatctttgcagtcacccaggagatagtatcaccattttcctgatgccaaactgaggctcagagaggtgaagtaacttcttcaagtcacaacacaactgttgtccaggaatcaggcagtctggctctgctaacccagttttacccactgcattaatgtaccgcatccacttgttcactcagtttcacctgacaaatactaattttgtctctctgtggaacaagttctttgctgggtgcagggaataaagcagaacaccgttcagttcctgccttcccaacgcttgtaaatctagtgcaggtcattcatggccgggctgcagggtgtccatgaatcctgctaaaatcatttgcgaaatgttgtgagcgtgggtcttttcttctggaaagagagtctgtgactctcaggttctgagttgatctgtgatccaaacagaggtgtgaagaagtgttgttttagcagatctgtgcctagtatgcctgatacacagcttgaacttcaaacaaacagcaacaaaattcctactggttggaagaatgaagaacttgtaagagcataataagtgctgcagtagcgtccggagcagggtgctgtggaagagcacacagaaggccacctgcccaggaatgcctcctagaggcagtgaaggcagctgggtgaaggatagggaagcagttcattggaacactgtggtgaccagtctgtccatgtagtgttgagacagaaacaacacgtgaacagctgcagctgttgtaccacttgtgcgcaagtgtaaaagtccatggtgccatgaaatcatgtaatggggacaggaggcttcatgtattcgtgaaggttagaaaagtttccttgagaaagtgacacttaggcctaaaagttggagcattttgggcatggaatctggcccacagtcttcaaagaccacatggtagaaaccagtagagcaccagggactgacaggaagcaaatgcagctggtgcaggagagggaaatgggaattagggtggtggcagagcccaaagaggccttgtaggccatggtaaggcatttctatgttttattttactttgtctttatcctaaaatgccattggcaagtttattgcagggaactgacaagatcacattttgagaagaagttggaaagaatcccaagtggatgaactgaatatctggatgaggacaagatctgtggggagagactgtaagatagaatgagtccatttaagtcccaggacggtggaaactagctagtagattgcagccatgttgtggaagctgctgctgagatcccagtcctgcaggctgtgttctttcagaaagatgcgatcacctccaaaatacagacctttcttagcatgcttcacctatacaactgataaacagtcgagcaaagaaaatacaagaacagtggaaaagctctataaatgttcagttgacattaggaaaattcgtagattaaaaggatgggtacttttagaggatgaaacctatgttgaagaaattgcgaatattttacaagaactaggtgccgatgagactgctgtagccagtattttggaacgctgcccggaagcaattgtctgtagtccaaccgctgttaacacccagagaaaactctggcagttggtctgcaaaaatgaggaagagttaatcaagttaatagagcagtttccagaatctttctttactattaaagaccaagagaaccagaagctgaatgttcagttctttcaagagttgggactaaaaaatgtggtcattagcagacttttgacagctgcacctaatgtttttcataatcctgttgagaagaataagcaaatggtaagaattctccaagagagttatctagatgtaggtggctctgaggccaacatgaaagtttggctactaaaattgttaagccaaaacccatttattttgttaaattctcccacagctataaaggaaacactagaatttctccaggagcaaggtttcaccagctttgaaattctccagcttctatccaaactcaaaggatttctttttcaactttgcccaagaagtatacagaatagtatttccttctctaaaaatgcttttaaatgcacagatcatgacctgaagcaattagttttgaaatgtcctgcccttttatattattctgttccagttttagaagagagaatgcaaggattattgagagaaggaatttccatagctcagataagagagacgccaatggttcttgaattaacaccacagatagtacagtacaggataaggaaactgaattcctcaggctacagaataaaggatggacatctagcaaatctaaatggatcaaaaaaagagtttgaagctaattttggcaaaattcaggccaaaaaagtaaggccattatttaaccctgtggcaccattaaatgttgaagaatgacatactga

SEQ ID NO: 154718 - DNA, 418 bp, Homo sapiens
  Payload ID: 10415
  Gene Symbol: MTERF2
  Gene Name: mitochondrial transcription termination factor 2
  ENST ID: ENST00000550496
  CDS Start-End: 319-418
gagaactgtcgggagcttcttgagaccgaggaccgaaatcccggctccaggcctcggggactgcggactgtggggaggctggccggagagagagggaaggacggggcctggcccccgggactccctgtgccttgcttggagctgacgccgacggtttattgcagggaactgacaagatcacattttgagaagaagttggaaagaatcccaagtggatgaactgaatatctggatgaggacaagatctgtggggagagactgtaagaatgagtccatttaagtcccaggacggtggaaactagctagtagattgcagccatgttgtggaagctgctgctgagatcccagtcctgcaggctgtgttctttcagaaagatgcgatcacctccaaaatacagacctttcttagcatgcttca

SEQ ID NO: 154719 - DNA, 715 bp, Homo sapiens
  Payload ID: 10415
  Gene Symbol: MTERF2
  Gene Name: mitochondrial transcription termination factor 2
  ENST ID: ENST00000548101
  CDS Start-End: 180-715
ccgaaatcccggctccaggcctcggggactgcggactgtggggaggctggccggagagagagggaaggacggggcctggcccccgggactccctgtgccttgcttggagctgacgccgacggatagaatgagtccatttaagtcccaggacggtggaaactagctagtagattgcagccatgttgtggaagctgctgctgagatcccagtcctgcaggctgtgttctttcagaaagatgcgatcacctccaaaatacagacctttcttagcatgcttcacctatacaactgataaacagtcgagcaaagaaaatacaagaacagtggaaaagctctataaatgttcagttgacattaggaaaattcgtagattaaaaggatgggtacttttagaggatgaaacctatgttgaagaaattgcgaatattttacaagaactaggtgccgatgagactgctgtagccagtattttggaacgctgcccggaagcaattgtctgtagtccaaccgctgttaacacccagagaaaactctggcagttggtctgcaaaaatgaggaagagttaatcaagttaatagagcagtttccagaatctttctttactattaaagaccaagagaaccagaagctgaatgttcagttctttcaagagttgggactaaaaaatgtggtcattagcagacttttgacagctgcacctaatgtttttcataa

SEQ ID NO: 154720 - DNA, 581 bp, Homo sapiens
  Payload ID: 10415
  Gene Symbol: MTERF2
  Gene Name: mitochondrial transcription termination factor 2
  ENST ID: ENST00000550736
  CDS Start-End: 323-581
atggtaaggcatttctatgttttattttactttgtctttatcctaaaatgccattggcaagtttattgcagggaactgacaagatcacattttgagaagaagttggaaagaatcccaagtggatgaactgaatatctggatgaggacaagatctgtggggagagactgtaagacctgtaaagagtgagggaaggctgccaacaggctaaattgagccgtactacacacttttgtggcaaggctgagacacttacaacactcttagatagaatgagtccatttaagtcccaggacggtggaaactagctagtagattgcagccatgttgtggaagctgctgctgagatcccagtcctgcaggctgtgttctttcagaaagatgcgatcacctccaaaatacagacctttcttagcatgcttcacctatacaactgataaacagtcgagcaaagaaaatacaagaacagtggaaaagctctataaatgttcagttgacattaggaaaattcgtagattaaaaggatgggtacttttagaggatgaaacctatgttgaagaaattgcgaatattttacaagaac

SEQ ID NO: 154721 - DNA, 1409 bp, Homo sapiens
  Payload ID: 10416
  Gene Symbol: MTERF3
  Gene Name: mitochondrial transcription termination factor 3
  Uniprot ID: Q96E29
  ENST ID: ENST00000287025
  CDS Start-End: 100-1353
cggcgtgcggcgcggcgggacgggacgtgcggcccagcgagttggtcggtcccggggtcacccgctacgggaagcaggcctcgccacagactaagaaaaatggctttgtcagcccaacagatacccagatggtttaactcagttaagttgaggagcctcattaatgctgcacaactcacaaaacgttttactagaccagcaagaacactgttacatggcttttctgctcagcctcagatatcctctgacaattgctttctccagtggggatttaagacttacaggacttcctccttatggaatagttcccagtctactagctcaagtagtcaggagaataattctgcccaaagcagtctgcttccttccatgaatgaacagtcacagaagacacaaaatatatccagctttgattctgagctgtttctagaagaactggatgaattgcctccattgtctccaatgcagccaatttcagaggaagaggctattcagattattgcagaccctccattgccaccagcttcattcacacttcgagactatgtggatcattctgagactctgcagaagttggttcttctaggcgtggatttgtccaagatagaaaaacatccagaagcagcaaacctccttctgagactggattttgaaaaagacattaagcaaatgcttctgtttcttaaagatgtgggtatagaggataaccaactgggagcattcctgacaaaaaatcatgcaattttctctgaagaccttgaaaatctgaagaccagggtggcttatctgcattcaaaaaatttcagtaaagcagatgttgcacagatggtcagaaaagcaccatttttgctgaacttttcagtggaaagactggataacagattgggattttttcagaaagaacttgaacttagtgtgaagaagactagagatctggtagttcgtctcccaaggctgctaactggaagtctggaacccgtgaaagaaaatatgaaggtttatcgtcttgaacttggttttaaacataacgaaattcaacatatgatcaccagaatcccaaagatgttaactgcaaataaaatgaaacttaccgagacgtttgattttgtgcacaatgtgatgagcattccccaccacatcattgtcaagttcccacaggtatttaatacaaggctgtttaaggtcaaagaaagacacttgtttcttacctatttaggaagagcacagtatgatccagcaaaacctaactacatctctttggacaaactagtatctattcctgatgaaatattttgtgaagagattgccaaagcatcagtacaggactttgaaaaattcttaaaaacgctttagatttttatgtatgttaaaatgcagtattgtaaagtgaatatatatatgaataaatg

SEQ ID NO: 154722 - DNA, 776 bp, Homo sapiens
  Payload ID: 10416
  Gene Symbol: MTERF3
  Gene Name: mitochondrial transcription termination factor 3
  ENST ID: ENST00000524341
  CDS Start-End: 193-714
gaggaagaggctattcagattattgcagaccctccattgccaccagcttcattcacacttcgagactatgtggatcattctgagactctgcagaagttggttcttctaggcgtggatttgtccaagatagaaaaacatccagaagcagcaaacctccttctgagactggattttgaaaaagacattaagcaaatgcttctgtttcttaaagatgtgggtatagaggataaccaactgggagcattcctgacaaaaaatcatgcaattttctctgaagaccttgaaaatctgaagaccagggtggcttatctgcattcaaaaaatttcagtaaagcagatgttgcacagatggtcagaaaagcaccatttttgctgaacttttcagtggaaagactggataacagattgggattttttcagaaagaacttgaacttagtgtgaagaagactagagatctggtagttcgtctcccaaggctgctaactggaagtctggaacccgtgaaagaaaatatgaaggtatttaatacaaggctgtttaaggtcaaagaaagacacttgtttcttacctatttaggaagagcacagtatgatccagcaaaacctaactacatctctttggacaaactagtatctattcctgatgaaatattttgtgaagagattgccaaagcatcagtacaggactttgaaaaattcttaaaaacgctttagatttttatgtatgttaaaatgcagtattgtaaagtgaatatatatatgaataaatgaatata

SEQ ID NO: 154723 - DNA, 1529 bp, Homo sapiens
  Payload ID: 10416
  Gene Symbol: MTERF3
  Gene Name: mitochondrial transcription termination factor 3
  ENST ID: ENST00000523821
  CDS Start-End: 121-1206
gtgtagggcgggctgaggagccggcgtgcggcgcggcgggacgggacgtgcggcccagcgagttggtcggtcccggggtcacccgctacgggaagcaggcctcgccacagactaagaaaaatggctttgtcagcccaacagatacccagatggtttaactcagttaagttgaggagcctcattaatgctgcacaactcacaaaacgttttactagaccagcaagaacactgttacatggcttttctgctcagcctcagatatcctctgacaattgctttctccagtggggatttaagacttacaggacttcctccttatggaatagttcccagtctactagctcaagtagtcaggagaataattctgcccaaagcagtctgcttccttccatgaatgaacagtcacagaagacacaaaatatatccagctttgattctgagctgtttctagaagaactggatgaattgcctccattgtctccaatgcagccaatttcagaggaagaggctattcagattattgcagaccctccattgccaccagcttcattcacacttcgagactatgtggatcattctgagactctgcagaagttggttcttctaggcgtggatttgtccaagatagaaaaacatccagaagcagcaaacctccttctgagactggattttgaaaaagacattaagcaaatgcttctgtttcttaaagatgtgggtatagaggataaccaactgggagcattcctgacaaaaaatcatgcaattttctctgaagaccttgaaaatctgaagaccagggtggcttatctgcattcaaaaaatttcagtaaagcagatgttgcacagatggtcagaaaagcaccatttttgctgaacttttcagtggaaagactggataacagattgggattttttcagaaagaacttgaacttagtgtgaagaagactagagatctggtagttcgtctcccaaggctgctaactggaagtctggaacccgtgaaagaaaatatgaaggtttatcgtcttgaacttggttttaaacataacgaaattcaacatatgatcaccagaatcccaaagatgttaactgcaaataaaatgaaacttaccgagacgtttgattttgtgcacaatgtgatgagcattccccaccacatcattgtcaagttcccacagtttcttcacagaaaatataggatttaaatcctctggcatttatcctacttactgaacacatggtatttaatacaaggctgtttaaggtcaaagaaagacacttgtttcttacctatttaggaagagcacagtatgatccagcaaaacctaactacatctctttggacaaactagtatctattcctgatgaaatattttgtgaagagattgccaaagcatcagtacaggactttgaaaaattcttaaaaacgctttagatttttatgtatgttaaaatgcagtattgtaaagtgaatatatatatgaataaatgaatatatttttaaatgcctcgggtctcaactgatatt

SEQ ID NO: 154724 - DNA, 412 bp, Homo sapiens
  Payload ID: 10416
  Gene Symbol: MTERF3
  Gene Name: mitochondrial transcription termination factor 3
  ENST ID: ENST00000517720
  CDS Start-End: 210-412
ggcgtgcggcgcggcgggacgggacgtgcggcccagcgagttggtcggtcccggggtcacccgctacgggaagcaggcctcgccacagcagggtattgtgaatacttacttcttttctaaaatcatcgcagaatgggccgagcgcagtggctcacgcctgtaatcccagcactttgggaagctgggtggatcacctgagactaagaaaaatggctttgtcagcccaacagatacccagatggtttaactcagttaagttgaggagcctcattaatgctgcacaactcacaaaacgttttactagaccagcaagaacactgttacatggcttttctgctcagcctcagatatcctctgacaattgctttctccagtggggatttaagacttacaggacttcctccttatggaa

SEQ ID NO: 154725 - DNA, 1148 bp, Homo sapiens
  Payload ID: 10416
  Gene Symbol: MTERF3
  Gene Name: mitochondrial transcription termination factor 3
  Uniprot ID: Q96E29
  ENST ID: ENST00000522822
  CDS Start-End: 191-1081
cttacctcttaaaaggtgaaaaattagggacttggatgtttaattctaaaatgatcccaagatttaaccactgaaagaagcaaacaagggaagagctggtctttgcagaaatagttttaagtgtgcatattagagcactaatttgtttctctctttcaaagaactggatgaattgcctccattgtctccaatgcagccaatttcagaggaagaggctattcagattattgcagaccctccattgccaccagcttcattcacacttcgagactatgtggatcattctgagactctgcagaagttggttcttctaggcgtggatttgtccaagatagaaaaacatccagaagcagcaaacctccttctgagactggattttgaaaaagacattaagcaaatgcttctgtttcttaaagatgtgggtatagaggataaccaactgggagcattcctgacaaaaaatcatgcaattttctctgaagaccttgaaaatctgaagaccagggtggcttatctgcattcaaaaaatttcagtaaagcagatgttgcacagatggtcagaaaagcaccatttttgctgaacttttcagtggaaagactggataacagattgggattttttcagaaagaacttgaacttagtgtgaagaagactagagatctggtagttcgtctcccaaggctgctaactggaagtctggaacccgtgaaagaaaatatgaaggtttatcgtcttgaacttggttttaaacataacgaaattcaacatatgatcaccagaatcccaaagatgttaactgcaaataaaatgaaacttaccgagacgtttgattttgtgcacaatgtgatgagcattccccaccacatcattgtcaagttcccacaggtatttaatacaaggctgtttaaggtcaaagaaagacacttgtttcttacctatttaggaagagcacagtatgatccagcaaaacctaactacatctctttggacaaactagtatctattcctgatgaaatattttgtgaagagattgccaaagcatcagtacaggactttgaaaaattcttaaaaacgctttagatttttatgtatgttaaaatgcagtattgtaaagtgaatatatatatgaataaatgaatatattttt

SEQ ID NO: 154726 - DNA, 4529 bp, Homo sapiens
  Payload ID: 10417
  Gene Symbol: MTERF4
  Gene Name: mitochondrial transcription termination factor 4
  Uniprot ID: Q7Z6M4
  ENST ID: ENST00000241527
  CDS Start-End: 23-1168
ctgctgccatcttctccgcgctatggctgcgttcggccgtcaggtccttgattggcaccgcctgatccccctcacctgggcctgtatggctaggcagactcctcatcttggagaacagagaaggacgacagcttctttgttgcgcaaactgactacagcctccaatggaggggtcattgaggagttatcttgtgttagatccaataactatgtgcaggaaccagagtgcaggaggaatcttgttcagtgcctccttgagaagcaggggactcctgtggtacaagggtccttggagctagagagggtcatgagttccctcctggacatgggtttcagcaatgcccatattaatgaattgctcagtgtacggcgaggtgccagtcttcaacagttgctggacatcatttcagaatttattctcttgggtctgaatccagagcctgtgtgtgtggtcttgaagaaaagtccccagttattgaaactgcctattatgcaaatgaggaagcgctccagttacctgcaaaagcttgggcttggagaagggaaattaaagagggtgctttactgttgccctgaaattttcaccatgcgccagcaggacattaacgacactgtcaggcttctcaaggagaagtgccttttcacggtacagcaagtcaccaagattttgcacagttgcccctctgttcttcgagaggacctgggtcaactggaatacaagtttcagtatgcatacttcaggatgggaattaagcatccagacattgtaaagagtgagtacttgcagtattcactaaccaagattaagcagagacacatttacctggagcgcctgggacggtaccaaacccctgataagaaggggcagacacagatccctaacccattgctcaaggacattctcagagtttcagaagctgagtttttggccaggacagcctgtacttctgttgaggagtttcaagtttttaagaagctcctggctcgggaggaggaggagtctgagagcagcacatctgatgacaaaagggcaagtctggatgaggatgaggatgacgatgatgaggaggacaatgatgaggatgacaatgatgaggatgacgatgatgaggacgacgacgaggcggaggacaatgatgaggatgaggacgacgacgaggaggaatagctgtgatggaaggactagagcgaaagggcccagagatatcaaggaagcttttcattctcttaaagcttttgggtcctttacttgaatcttctcaagttattttttattctaaaactggtctcttgatgaaaaaaattataagtcacctgagaggcagacagatcaaaccaaacaggaaacaggaaatgcatgtttgatctgttgtcacgtgtctgtggggagggccctgtcccatcctgaataagatacttatgttgagctattcacatcaaggggactcaatatatcaacaattggttttatttttttctcttttgaatatgttggtgataattccgtgacagttggaagatggggttcattcttccggttcaggaatcactatgtatttccttcttgtgataaaaataaaattacgagaaggcaatgtgaggttttagtacatcatagcactttattttatgaaaacatgtagcagattttccacaaaaatgcttatttttaatccaaaagtatattgcttcataatggtattcagtgcacagcagagtaaaagaagttaattcatgatgtactggttaattttgcatggcttcttaaggccagcaaaatgctggcagttttctttatctttgtgaagaacaggcccttcctgtttggggaagttggcttttatgtcagctcttggccagtggtcacttccaagcctggtgtctccggccctgtagtctgtagtgccagactgtgctggcctggagagtgctggggcaggtggaggccagggaatggtcccatacagttatctcccctgccctggttacagacagcttcgagaaccagaggagaagagcatagggtcatggagcagcagcctcgtcttacagcgtgactgcaaagaaaaagacttttgttttgcaaaagaaaagcagctcggtgactccgtccacatcgccacagttgagtcagatggcagtggcagtcctttgccagtggaaggagttcctgctaaggggaggtgcaggaggactaatttattattgtgcaactgccagtcctgcgcattccagctacgctaagcgccctgcccaggcacgtaacaaaacatagacctgttttgaagtggcttgttacccaagggtgcctcactcatctgcgccaccaggaagatgaactgtgagggctcctataaggggcaggaagagcaaagctgtcctaggccaaccagagattcatctttcatgcagtgacatgttgataaaaaatgatggtcagtatgaaactggtaacaggttgtagatggctttctatggtatatcccagtctcttgcaaacgattgtgaagaatgccagtgttgtttaagattcggcagtttgtgtggggaggtgggggcaggatggggtttggttgccaaaagagtttgggaaatgctggcttaaacaaaggcgagaggaagttcctttcacgtcaggatttatgaatgcctatgagcccagtgtcagtgacgactttctagcggcggtcttcaacactttctaaatattaagcgatcaaggcccctgccccacttttagttccaacagaatgccgttcacaagatctgggaggcactctctcagccctctcctggagcccccggaatttctcagcagcccaggccctcccgctgcccgtggcccctcctcccaggtgccaggtggtcttccagcctctccaagggcccacccccctgcctcttcctcccactgcagctgatctaggggtttcttggccacatttcccttgagagagagtgggatttgccctatccacagagagcctcatttccacctgaaggtgtatttgtcagtggctagaccaggttcatgtctgtttccccttggggacttctgaaccttcctgcccgggagtctgtaacacagcagcacaggaccgcgcttcctttagcagtgctgagtaagcaggcagcggcactctgagatcccggggctgggcagtcgccccccacttcccagcagctctgtggtagtggggcgggagcagcagggacgtaccttaagatttctccagtgtctgactcttactttgtttcctgaaataattagagaaaagtcgtttaatgaaaaagagactgtgtaccttgaattctacagctacctcagtccaggctgcctgctgagatcctgtctttagctcacatacattccacggtgggggacaccattagtccagacaccgctgtggagattagcattttagtttgtgtgcgcccgcctggcttgaggcagtagtttaggaatgacaaggctagaaacctggctggctgtgagtcagagagagagaggatggacgtgggagaaagcaagcaaaagctaccctagggaagagccggtgacgtgcacaggccgagcagcacggctggtgagctgcaggctgcggccttgcccggacacttggtaatgccaaacaagtacgtgtggctactcattggtctatgaggacgatgacaggcttcgactctgtggtttctaaagcatataatattctcacgtacttctttcagcaaacgccaaacagtagtaattcttgtaactaccttgaaccctttgtggaaagaacctgggtgtgagtgaataaaaagtaaagagcgacgcgctatatcggccattaaatactcggggctgtccgtaacaccctgtgcttcccaattgtagcaccatgttctgtgtgaatatgcataaccagagtgaccccccccagcacccagcatgcccggctgtgcccctctgggtatgctcacatgcacatatatggacatacagtttcgtagcagaacgtggctgcccaggggctgcctatctgggcgagtagaccgcctggctcagcccacaggcctgcagcatcccatagcaccccgcccttgccccatcaccctgtgggctacatgcaggacacggcatgggcctgctccccagaggcacctgtttggggtcttcttgaggcttgtgctttcacagctctctttgaagcagatgtcttggtgaactcggtagactcttttatacctgttgtcacaagaaagctttgtaaaaccagacagtgaagcaaaatgttgccaactgcttaacctaggctatgtgaacccacagtaaacctgaaggtgtttgagggaaaaactgctattttctgaatgaaacgtgacctcctattgatgtattaaaatgtctaacataaaggtcatgtgatttgtaataaatttattgtggtacagtaatatgcataaaataaacccattttaatgtgcattctgatgagcactgacaaaggatatggtactaaaaataaaatgtgaaatgtcaaaga

SEQ ID NO: 154727 - DNA, 1637 bp, Homo sapiens
  Payload ID: 10417
  Gene Symbol: MTERF4
  Gene Name: mitochondrial transcription termination factor 4
  Uniprot ID: Q7Z6M4
  ENST ID: ENST00000391980
  CDS Start-End: 60-1205
gaaggacgggggaggaccgctgcttccggcgccgtaactgctgccatcttctccgcgctatggctgcgttcggccgtcaggtccttgattggcaccgcctgatccccctcacctgggcctgtatggctaggcagactcctcatcttggagaacagagaaggacgacagcttctttgttgcgcaaactgactacagcctccaatggaggggtcattgaggagttatcttgtgttagatccaataactatgtgcaggaaccagagtgcaggaggaatcttgttcagtgcctccttgagaagcaggggactcctgtggtacaagggtccttggagctagagagggtcatgagttccctcctggacatgggtttcagcaatgcccatattaatgaattgctcagtgtacggcgaggtgccagtcttcaacagttgctggacatcatttcagaatttattctcttgggtctgaatccagagcctgtgtgtgtggtcttgaagaaaagtccccagttattgaaactgcctattatgcaaatgaggaagcgctccagttacctgcaaaagcttgggcttggagaagggaaattaaagagggtgctttactgttgccctgaaattttcaccatgcgccagcaggacattaacgacactgtcaggcttctcaaggagaagtgccttttcacggtacagcaagtcaccaagattttgcacagttgcccctctgttcttcgagaggacctgggtcaactggaatacaagtttcagtatgcatacttcaggatgggaattaagcatccagacattgtaaagagtgagtacttgcagtattcactaaccaagattaagcagagacacatttacctggagcgcctgggacggtaccaaacccctgataagaaggggcagacacagatccctaacccattgctcaaggacattctcagagtttcagaagctgagtttttggccaggacagcctgtacttctgttgaggagtttcaagtttttaagaagctcctggctcgggaggaggaggagtctgagagcagcacatctgatgacaaaagggcaagtctggatgaggatgaggatgacgatgatgaggaggacaatgatgaggatgacaatgatgaggatgacgatgatgaggacgacgacgaggcggaggacaatgatgaggatgaggacgacgacgaggaggaatagctgtgatggaaggactagagcgaaagggcccagagatatcaaggaagcttttcattctcttaaagcttttgggtcctttacttgaatcttctcaagttattttttattctaaaactggtctcttgatgaaaaaaattataagtcacctgagaggcagacagatcaaaccaaacaggaaacaggaaatgcatgtttgatctgttgtcacgtgtctgtggggagggccctgtcccatcctgaataagatacttatgttgagctattcacatcaaggggactcaatatatcaacaattggttttatttttttctcttttgaatatgttggtgataattccgtgacagttggaagatggggttcattcttccggttcaggaatcactatgtatttccttcttgtgataaaaataaaattacgagaaggcaatgtga

SEQ ID NO: 154728 - DNA, 802 bp, Homo sapiens
  Payload ID: 10417
  Gene Symbol: MTERF4
  Gene Name: mitochondrial transcription termination factor 4
  ENST ID: ENST00000406593
  CDS Start-End: 92-673
gtaactgctgccatcttctccgcgctatggctgcgttcggccgtcagggaaattaaagagggtgctttactgttgccctgaaattttcaccatgcgccagcaggacattaacgacactgtcaggcttctcaaggagaagtgccttttcacggtacagcaagtcaccaagattttgcacagttgcccctctgttcttcgagaggacctgggtcaactggaatacaagtttcagtatgcatacttcaggatgggaattaagcatccagacattgtaaagagtgagtacttgcagtattcactaaccaagattaagcagagacacatttacctggagcgcctgggacggtaccaaacccctgataagaaggggcagacacagatccctaacccattgctcaaggacattctcagagtttcagaagctgagtttttggccaggacagcctgtacttctgttgaggagtttcaagtttttaagaagctcctggctcgggaggaggaggagtctgagagcagcacatctgatgacaaaagggcaagtctggatgaggatgaggatgacgatgatgaggaggacaatgatgaggatgacaatgatgaggatgacgatgatgaggacgacgacgaggcggaggacaatgatgaggatgaggacgacgacgaggaggaatagctgtgatggaaggactagagcgaaagggcccagagatatcaaggaagcttttcattctcttaaagcttttgggtcctttacttgaatcttctcaagttattttttattctaaaactggtctcttgatga

SEQ ID NO: 154729 - DNA, 561 bp, Homo sapiens
  Payload ID: 10417
  Gene Symbol: MTERF4
  Gene Name: mitochondrial transcription termination factor 4
  ENST ID: ENST00000401626
  CDS Start-End: 15-561
atcttctccgcgctatggctgcgttcggccgtcaggtccttgattggcaccgcctgatccccctcacctgggcctgtatggctaggcagactcctcatcttggagaacagagaaggacgacagcttctttgttgcgcaaactgactacagcctccaatggaggggtcattgaggagttatcttgtgttagatccaataactatgtgcaggaaccagagtgcaggaggaatcttgttcagtgcctccttgagaagcaggggactcctgtggtacaagggtccttggagctagagagggtcatgagttccctcctggacatgggtttcagcaatgcccatattaatgaattgctcagtgtacggcgaggtgccagtcttcaacagttgctggacatcatttcagaatttattctcttgggtctgaatccagagcctgtgtgtgtggtcttgaagaaaagtccccagttattgaaactgcctattatgcaaatgaggaagcgctccagttacctgcaaaagcttgggcttggagaagcagcctcgtcttacagcgtgactgcaa

SEQ ID NO: 154730 - DNA, 799 bp, Homo sapiens
  Payload ID: 10417
  Gene Symbol: MTERF4
  Gene Name: mitochondrial transcription termination factor 4
  ENST ID: ENST00000407095
  CDS Start-End: 39-797
gcttccggcgccgtaactgctgccatcttctccgcgctatggctgcgttcggccgtcaggtccttgattggcaccgcctgatccccctcacctgggcctgtatggctaggcagactcctcatcttggagaacagagaaggacgacagcttctttgttgcgcaaactgactacagcctccaatggaggggtcattgaggagttatcttgtgttagatccaataactatgtgcaggaaccagagtgcaggaggaatcttgttcagtgcctccttgagaagcaggggactcctgtggtacaagggtccttggagctagagagggtcatgagttccctcctggacatgggtttcagcaatgcccatattaatgaattgctcagtgtacggcgaggtgccagtcttcaacagttgctggacatcatttcagaatttattctcttgggtctgaatccagagcctgtgtgtgtggtcttgaagaaaagtccccagttattgaaactgcctattatgcaaatgaggaagcgctccagttacctgcaaaagcttgggcttggagaagggaaattaaagagggtgctttactgttgccctgaaattttcaccatgcgccagcaggacattaacgacactgtcaggcttctcaaggagaagtgccttttcacggtacagcaagtcaccaagattttgcacagttgcccctctgttcttcgagaggacctgggtcaactggaatacaagtttcaggtgagaatgactgatagcgtgattagcgtagtttcaggtgagaatgactggtaatg

SEQ ID NO: 154731 - DNA, 549 bp, Homo sapiens
  Payload ID: 10417
  Gene Symbol: MTERF4
  Gene Name: mitochondrial transcription termination factor 4
  ENST ID: ENST00000434791
  CDS Start-End: 96-549
aggaaccgcggccgccgagtgtttcacggccaggtcgtggagccctcccggaggtccttgattggcaccgcctgatccccctcacctgggcctgtatggctaggcagactcctcatcttggagaacagagaaggacgacagcttctttgttgcgcaaactgactacagcctccaatggaggggtcattgaggagttatcttgtgttagatccaataactatgtgcaggaaccagagtgcaggaggaatcttgttcagtgcctccttgagaagcaggggactcctgtggtacaagggtccttggagctagagagggtcatgagttccctcctggacatgggtttcagcaatgcccatattaatgaattgctcagtgtacggcgaggtgccagtcttcaacagttgctggacatcatttcagaatttattctcttgggtctgaatccagagcctgtgtgtgtggtcttgaagaaaagtccccagttattgaaactgcctattatgcaaatgaggaagcgctccagttacctgcaaaagcttgggcttggag

SEQ ID NO: 154732 - DNA, 457 bp, Homo sapiens
  Payload ID: 10417
  Gene Symbol: MTERF4
  Gene Name: mitochondrial transcription termination factor 4
  ENST ID: ENST00000414146
  CDS Start-End: 1-457
agttacctgcaaaagcttgggcttggagaagggaaattaaagagggtgctttactgttgccctgaaattttcaccatgcgccagcaggacattaacgacactgtcaggcttctcaaggagaagtgccttttcacggtacagcaagtcaccaagattttgcacagttgcccctctgttcttcgagaggacctgggtcaactggaatacaagtttcagtatgcatacttcaggatgggaattaagcatccagacattgtaaagacagcctcgtcttacagcgtgactgcaaagaaaaagacttttgttttgcaaaagaaaagcagctcggtgactccgtccacatcgccacagttgagtcagatggcagtggcagtcctttgccagtggaaggagttcctgctaaggggaggtgcaggaggactaatttattattgtgcaactgccagtcctgcgcatt

SEQ ID NO: 154733 - DNA, 797 bp, Homo sapiens
  Payload ID: 10417
  Gene Symbol: MTERF4
  Gene Name: mitochondrial transcription termination factor 4
  ENST ID: ENST00000424798
  CDS Start-End: 1-774
gtccttgattggcaccgcctgatccccctcacctgggcctgtatggctaggcagactcctcatcttggagaacagagaaggacgacagcttctttgttgcgcaaactgactacagcctccaatggaggggtcattgaggagttatcttgtgttagatccaataactatgtgcaggaaccagagtgcaggaggaatcttgttcagtgcctccttgagaagcaggggactcctgtggtacaagggtccttggagctagagagggtcatgagttccctcctggacatgggtttcagcaatgcccatattaatgaattgctcagtgtacggcgaggtgccagtcttcaacagttgctggacatcatttcagaatttattctcttgggtctgaatccagagcctgtgtgtgtggtcttgaagaaaagtccccagttattgaaactgcctattatgcaaatgaggaagcgctccagttacctgcaaaagcttgggcttggagaagggaaattaaagagggtgctttactgttgccctgaaattttcaccatgcgccagcaggacattaacgacactgtcaggcttctcaaggagaagtgccttttcacggtacagcaagtcaccaagattttgcacagttgcccctctgttcttcgagaggacctgggtcaactggaatacaagtttcagaaaaataccacctcttccttctgccccttctccctcctgccccttttccctcccacccctttatttcctgctccatgtttctcaggatgaatttgaaagtgttttgaaactgc

SEQ ID NO: 154734 - DNA, 534 bp, Homo sapiens
  Payload ID: 10417
  Gene Symbol: MTERF4
  Gene Name: mitochondrial transcription termination factor 4
  ENST ID: ENST00000449133
  CDS Start-End: 1-324
agcagctcggtgactccgtccacatcgccacagttgagtcagatggcagtggcagtcctttgccagtggaaggagttcctgctaaggggaggtgcaggagagtgtactccttctacttatgaaaaaaagttaactataaaatggcctcaggcaggtccttcaggaggtttccagaagaaggcatcattgtcacaggaggtggcagctccatgtgtgttactgggacacgatgtggaagtggaagaaggtgacatggatgatcctgcccctgtgactaatttattattgtgcaactgccagtcctgcgcattccagctacgctaagcgccctgcccaggcacgtaacaaaacatagacctgttttgaagtggcttgttacccaagggtgcctcactcatctgcgccaccaggaagatgaactgtgagggctcctataaggggcaggaagagcaaagctgtcctaggccaaccagagattcatctttcatgcagtgacatgttgataaaaaatgatggtcagtatgaaactggtaa

SEQ ID NO: 154735 - DNA, 583 bp, Homo sapiens
  Payload ID: 10417
  Gene Symbol: MTERF4
  Gene Name: mitochondrial transcription termination factor 4
  ENST ID: ENST00000439144
  CDS Start-End: 21-583
gctgccatcttctccgcgctatggctgcgttcggccgtcagatggcacctcctggttgtaggaaaacaagctcagggctcccagtgattctacattatgggaaattaaagagggtgctttactgttgccctgaaattttcaccatgcgccagcaggacattaacgacactgtcaggcttctcaaggagaagtgccttttcacggtacagcaagtcaccaagattttgcacagttgcccctctgttcttcgagaggacctgggtcaactggaatacaagtttcagtatgcatacttcaggatgggaattaagcatccagacattgtaaagagtgagtacttgcagtattcactaaccaagattaagcagagacacatttacctggagcgcctgggacggtaccaaacccctgataagaaggggcagacacagatccctaacccattgctcaaggacattctcagagtttcagaagctgagtttttggccaggacagcctgtacttctgttgaggagtttcaagtttttaagaagctcctggctcgggaggaggaggagtctgagagcagcacatctgatgacaa

SEQ ID NO: 154736 - DNA, 909 bp, Homo sapiens
  Payload ID: 10417
  Gene Symbol: MTERF4
  Gene Name: mitochondrial transcription termination factor 4
  ENST ID: ENST00000495694
  CDS Start-End: 37-786
ttccggcgccgtaactgctgccatcttctccgcgctatggctgcgttcggccgtcaggtccttgattggcaccgcctgatccccctcacctgggcctgtatggctaggcagactcctcatcttggagaacagagaaggacgacagcttctttgttgcgcaaactgactacagcctccaatggaggggtcattgaggagttatcttgtgttagatccaataactatgtgcaggaaccagagtgcaggaggaatcttgttcagtgcctccttgagaagcaggggactcctgtggtacaagggtccttggagctagagagggtcatgagttccctcctggacatgggtttcagcaatgcccatattaatgaattgctcagtgtacggcgaggtgccagtcttcaacagttgctggacatcatttcagaatttattctcttgggtctgaatccagagcctgtgtgtgtggtcttgaagaaaagtccccagttattgaaactgcctattatgcaaatgaggaagcgctccagttacctgcaaaagcttgggcttggagaagagtgtactccttctacttatgaaaaaaagttaactataaaatggcctcaggcaggtccttcaggaggtttccagaagaaggcatcattgtcacaggaggtggcagctccatgtgtgttactgggacacgatgtggaagtggaagaaggactaatttattattgtgcaactgccagtcctgcgcattccagctacgctaagcgccctgcccaggcacgtaacaaaacatagacctgttttgaagtggcttgttacccaagggtgcctcactcatctgcgccaccaggaagatgaactgtgagggctcctataaggggcaggaagagcaaagctgtcctaggccaaccagagatt

SEQ ID NO: 154737 - DNA, 4524 bp, Homo sapiens
  Payload ID: 10417
  Gene Symbol: MTERF4
  Gene Name: mitochondrial transcription termination factor 4
  Uniprot ID: Q7Z6M4
  ENST ID: ENST00000614476
  CDS Start-End: 23-1168
ctgctgccatcttctccgcgctatggctgcgttcggccgtcaggtccttgattggcaccgcctgatccccctcacctgggcctgtatggctaggcagactcctcatcttggagaacagagaaggacgacagcttctttgttgcgcaaactgactacagcctccaatggaggggtcattgaggagttatcttgtgttagatccaataactatgtgcaggaaccagagtgcaggaggaatcttgttcagtgcctccttgagaagcaggggactcctgtggtacaagggtccttggagctagagagggtcatgagttccctcctggacatgggtttcagcaatgcccatattaatgaattgctcagtgtacggcgaggtgccagtcttcaacagttgctggacatcatttcagaatttattctcttgggtctgaatccagagcctgtgtgtgtggtcttgaagaaaagtccccagttattgaaactgcctattatgcaaatgaggaagcgctccagttacctgcaaaagcttgggcttggagaagggaaattaaagagggtgctttactgttgccctgaaattttcaccatgcgccagcaggacattaacgacactgtcaggcttctcaaggagaagtgccttttcacggtacagcaagtcaccaagattttgcacagttgcccctctgttcttcgagaggacctgggtcaactggaatacaagtttcagtatgcatacttcaggatgggaattaagcatccagacattgtaaagagtgagtacttgcagtattcactaaccaagattaagcagagacacatttacctggagcgcctgggacggtaccaaacccctgataagaaggggcagacacagatccctaacccattgctcaaggacattctcagagtttcagaagctgagtttttggccaggacagcctgtacttctgttgaggagtttcaagtttttaagaagctcctggctcgggaggaggaggagtctgagagcagcacatctgatgacaaaagggcaagtctggatgaggatgaggatgacgatgatgaggaggacaatgatgaggatgacaatgatgaggatgacgatgatgaggacgacgacgaggcggaggacaatgatgaggatgaggacgacgacgaggaggaatagctgtgatggaaggactagagcgaaagggcccagagatatcaaggaagcttttcattctcttaaagcttttgggtcctttacttgaatcttctcaagttattttttattctaaaactggtctcttgatgaaaaaaattataagtcacctgagaggcagacagatcaaaccaaacaggaaacaggaaatgcatgtttgatctgttgtcacgtgtctgtggggagggccctgtcccatcctgaataagatacttatgttgagctattcacatcaaggggactcaatatatcaacaattggttttatttttttctcttttgaatatgttggtgataattccgtgacagttggaagatggggttcattcttccggttcaggaatcactatgtatttccttcttgtgataaaaataaaattacgagaaggcaatgtgaggttttagtacatcatagcactttattttatgaaaacatgtagcagattttccacaaaaatgcttatttttaatccaaaagtatattgcttcataatggtattcagtgcacagcagagtaaaagaagttaattcatgatgtactggttaattttgcatggcttcttaaggccagcaaaatgctggcagttttctttatctttgtgaagaacaggcccttcctgtttggggaagttggcttttatgtcagctcttggccagtggtcacttccaagcctggtgtctccggccctgtagtctgtagtgccagactgtgctggcctggagagtgctggggcaggtggaggccagggaatggtcccatacagttatctcccctgccctggttacagacagcttcgagaaccagaggagaagagcatagggtcatggagcagcagcctcgtcttacagcgtgactgcaaagaaaaagacttttgttttgcaaaagaaaagcagctcggtgactccgtccacatcgccacagttgagtcagatggcagtggcagtcctttgccagtggaaggagttcctgctaaggggaggtgcaggaggactaatttattattgtgcaactgccagtcctgcgcattccagctacgctaagcgccctgcccaggcacgtaacaaaacatagacctgttttgaagtggcttgttacccaagggtgcctcactcatctgcgccaccaggaagatgaactgtgagggctcctataaggggcaggaagagcaaagctgtcctaggccaaccagagattcatctttcatgcagtgacatgttgataaaaaatgatggtcagtatgaaactggtaacaggttgtagatggctttctatggtatatcccagtctcttgcaaacgattgtgaagaatgccagtgttgtttaagattcggcagtttgtgtggggaggtgggggcaggatggggtttggttgccaaaagagtttgggaaatgctggcttaaacaaaggcgagaggaagttcctttcacgtcaggatttatgaatgcctatgagcccagtgtcagtgacgactttctagcggcggtcttcaacactttctaaatattaagcgatcaaggcccctgccccacttttagttccaacagaatgccgttcacaagatctgggaggcactctctcagccctctcctggagcccccggaatttctcagcagcccaggccctcccgctgcccgtggcccctcctcccaggtgccaggtggtcttccagcctctccaagggcccacccccctgcctcttcctcccactgcagctgatctaggggtttcttggccacatttcccttgagagagagtgggatttgccctatccacagagagcctcatttccacctgaaggtgtatttgtcagtggctagaccaggttcatgtctgtttccccttggggacttctgaaccttcctgcccgggagtctgtaacacagcagcacaggaccgcgcttcctttagcagtgctgagtaagcaggcagcggcactctgagatcccggggctgggcagtcgccccccacttcccagcagctctgtggtagtggggcgggagcagcagggacgtaccttaagatttctccagtgtctgactcttactttgtttcctgaaataattagagaaaagtcgtttaatgaaaaagagactgtgtaccttgaattctacagctacctcagtccaggctgcctgctgagatcctgtctttagctcacatacattccacggtgggggacaccattagtccagacaccgctgtggagattagcattttagtttgtgtgcgcccgcctggcttgaggcagtagtttaggaatgacaaggctagaaacctggctggctgtgagtcagagagagagaggatggacgtgggagaaagcaagcaaaagctaccctagggaagagccggtgacgtgcacaggccgagcagcacggctggtgagctgcaggctgcggccttgcccggacacttggtaatgccaaacaagtacgtgtggctactcattggtctatgaggacgatgacaggcttcgactctgtggtttctaaagcatataatattctcacgtacttctttcagcaaacgccaaacagtagtaattcttgtaactaccttgaaccctttgtggaaagaacctgggtgtgagtgaataaaaagtaaagagcgacgcgctatatcggccattaaatactcggggctgtccgtaacaccctgtgcttcccaattgtagcaccatgttctgtgtgaatatgcataaccagagtgaccccccccagcacccagcatgcccggctgtgcccctctgggtatgctcacatgcacatatatggacatacagtttcgtagcagaacgtggctgcccaggggctgcctatctgggcgagtagaccgcctggctcagcccacaggcctgcagcatcccatagcaccccgcccttgccccatcaccctgtgggctacatgcaggacacggcatgggcctgctccccagaggcacctgtttggggtcttcttgaggcttgtgctttcacagctctctttgaagcagatgtcttggtgaactcggtagactcttttatacctgttgtcacaagaaagctttgtaaaaccagacagtgaagcaaaatgttgccaactgcttaacctaggctatgtgaacccacagtaaacctgaaggtgtttgagggaaaaactgctattttctgaatgaaacgtgacctcctattgatgtattaaaatgtctaacataaaggtcatgtgatttgtaataaatttattgtggtacagtaatatgcataaaataaacccattttaatgtgcattctgatgagcactgacaaaggatatggtactaaaaataaaatgtgaaatgtc

SEQ ID NO: 154738 - DNA, 2528 bp, Homo sapiens
  Payload ID: 10418
  Gene Symbol: MTIF2
  Gene Name: mitochondrial translational initiation factor 2
  Uniprot ID: P46199
  ENST ID: ENST00000263629
  CDS Start-End: 317-2500
ggactgacctaccgaccattcttccgggtccagaaggtgatctccgcccgtgctcagaatccaggggcccggggctgtagattccttgacaaggatatcctagcggcgaaacaacaccgtactgggagtcagaacgtctgggttctagtcttgactgccattaactagcggtatgacattggagaagcttttttgacccttctggatttccgtttccttttctgtaaaatgaggagcttggaagatccggaaaatgaggcccataggaaacaagtgacttgctgagtccagataacactgactgtcagagagaaacatgaaccagaagctactgaagttggagaacttgctacgatttcacactatttataggcaactgcacagtctgtgtcaaagaagagcattaagacagtggaggcatgggttttcatctgcttaccctgtgtggacagctcaactgtgtgcctggccctggccaacagatgtgctcactggggctgctttatctcagtataggcttctagtaacaaaaaaggaagaaggaccatggaaatctcagttatcttcaacaaaatctaaaaaggtggtagaagtatggattggaatgactattgaggaactggccagggcaatggaaaaaaacacagattatgtatatgaagctttattgaacactgatattgacatagattcactggaagcagactcacatttagatgaagtctggatcaaagaagtgataacgaaggcagggatgaagttaaagtggagtaaattaaaacaggacaaagtcagaaaaaataaagatgctgtaagaaggccccaggcagatccagctttattaaccccaaggtccccagttgttactataatgggccatgttgatcacgggaaaacgacattacttgacaaatttcgaaaaactcaagtggcagcagtggaaactggaggcatcactcagcacattggtgcctttcttgtctctctgccttctggggaaaagataacttttcttgatactccaggacatgctgctttctcagcaatgagagccagaggtgctcaggtcactgacattgtcgtattggttgtagctgcagatgatggagtgatgaaacaaactgtagaatctattcagcatgccaaagatgcacaggttcctattatccttgccgtaaataaatgtgacaaagctgaggctgatcctgagaaagtgaaaaaagagctgctggcttacgatgtggtatgtgaagattatggaggtgatgttcaagcagtgcctgtctccgcacttacgggcgataatctgatggctttggcagaagcaacagttgctcttgcagaaatgttagaattgaaagcagatcccaatggtccagtggaaggaacagtaatagagtctttcacagacaaaggaagaggtcttgttactacagctataattcaaagaggaactttaagaaaaggctctgttctggttgctggaaaatgttgggcaaaagtacgcttaatgtttgatgaaaatggaaaaacaattgatgaggcctatcccagcatgccagtgggaattacaggctggagagaccttccttctgcaggagaagaaattcttgaagtagaatctgagccaagggcacgtgaagttgttgactggaggaaatatgaacaagaacaggagaaaggtcaggaggatctgaaaataatagaagaaaagcgaaaggaacacaaagaagcacatcagaaagcccgtgagaagtatggccatctactgtggaagaagagatcaattctacggtttttagaaagaaaagaacaaatacccttaaagccaaaagagaaaagggaaagagattcaaatgtactttctgtgattattaaaggtgatgttgatggttctgttgaggccattttgaacattatagatacctatgatgcttcacacgagtgtgaactagaattagtacattttggagtgggtgatgtaagtgcaaatgatgttaaccttgctgaaacatttgatggtgttatatatggctttaatgtgaatgcaggcaatgttatccaacagtcagctgcaaaaaaaggagtaaaaattaaacttcacaaaataatttaccgtcttgttgaagatttgcaagaggaactgagcagcagattaccctgtgctgtggaagagcacccagtaggtgaggcatctatactagctaccttctctgtaacagaagggaagaaaaaagttcctgtggctggctgcagagtccaaaagggacagttagaaaaacaaaaaaaatttaaactaacccgtaatggacatgtaatttggaagggctcattaacctcattgaaacaccataaagatgacatttcaattgtcaaaacgggaatggattgtggtctcagtttagatgaagacaatatggaatttcaagtgggagacagaattgtttgttatgaagaaaagcaaattcaagccaagacttcttgggatccaggattttaaaattacattaaaaatgtaaataactcaa

SEQ ID NO: 154739 - DNA, 2221 bp, Homo sapiens
  Payload ID: 10418
  Gene Symbol: MTIF2
  Gene Name: mitochondrial translational initiation factor 2
  Uniprot ID: P46199
  ENST ID: ENST00000394600
  CDS Start-End: 11-2194
caggagaaacatgaaccagaagctactgaagttggagaacttgctacgatttcacactatttataggcaactgcacagtctgtgtcaaagaagagcattaagacagtggaggcatgggttttcatctgcttaccctgtgtggacagctcaactgtgtgcctggccctggccaacagatgtgctcactggggctgctttatctcagtataggcttctagtaacaaaaaaggaagaaggaccatggaaatctcagttatcttcaacaaaatctaaaaaggtggtagaagtatggattggaatgactattgaggaactggccagggcaatggaaaaaaacacagattatgtatatgaagctttattgaacactgatattgacatagattcactggaagcagactcacatttagatgaagtctggatcaaagaagtgataacgaaggcagggatgaagttaaagtggagtaaattaaaacaggacaaagtcagaaaaaataaagatgctgtaagaaggccccaggcagatccagctttattaaccccaaggtccccagttgttactataatgggccatgttgatcacgggaaaacgacattacttgacaaatttcgaaaaactcaagtggcagcagtggaaactggaggcatcactcagcacattggtgcctttcttgtctctctgccttctggggaaaagataacttttcttgatactccaggacatgctgctttctcagcaatgagagccagaggtgctcaggtcactgacattgtcgtattggttgtagctgcagatgatggagtgatgaaacaaactgtagaatctattcagcatgccaaagatgcacaggttcctattatccttgccgtaaataaatgtgacaaagctgaggctgatcctgagaaagtgaaaaaagagctgctggcttacgatgtggtatgtgaagattatggaggtgatgttcaagcagtgcctgtctccgcacttacgggcgataatctgatggctttggcagaagcaacagttgctcttgcagaaatgttagaattgaaagcagatcccaatggtccagtggaaggaacagtaatagagtctttcacagacaaaggaagaggtcttgttactacagctataattcaaagaggaactttaagaaaaggctctgttctggttgctggaaaatgttgggcaaaagtacgcttaatgtttgatgaaaatggaaaaacaattgatgaggcctatcccagcatgccagtgggaattacaggctggagagaccttccttctgcaggagaagaaattcttgaagtagaatctgagccaagggcacgtgaagttgttgactggaggaaatatgaacaagaacaggagaaaggtcaggaggatctgaaaataatagaagaaaagcgaaaggaacacaaagaagcacatcagaaagcccgtgagaagtatggccatctactgtggaagaagagatcaattctacggtttttagaaagaaaagaacaaatacccttaaagccaaaagagaaaagggaaagagattcaaatgtactttctgtgattattaaaggtgatgttgatggttctgttgaggccattttgaacattatagatacctatgatgcttcacacgagtgtgaactagaattagtacattttggagtgggtgatgtaagtgcaaatgatgttaaccttgctgaaacatttgatggtgttatatatggctttaatgtgaatgcaggcaatgttatccaacagtcagctgcaaaaaaaggagtaaaaattaaacttcacaaaataatttaccgtcttgttgaagatttgcaagaggaactgagcagcagattaccctgtgctgtggaagagcacccagtaggtgaggcatctatactagctaccttctctgtaacagaagggaagaaaaaagttcctgtggctggctgcagagtccaaaagggacagttagaaaaacaaaaaaaatttaaactaacccgtaatggacatgtaatttggaagggctcattaacctcattgaaacaccataaagatgacatttcaattgtcaaaacgggaatggattgtggtctcagtttagatgaagacaatatggaatttcaagtgggagacagaattgtttgttatgaagaaaagcaaattcaagccaagacttcttgggatccaggattttaaaattacattaaaaatgtaaataactca

SEQ ID NO: 154740 - DNA, 437 bp, Homo sapiens
  Payload ID: 10418
  Gene Symbol: MTIF2
  Gene Name: mitochondrial translational initiation factor 2
  ENST ID: ENST00000404297
  CDS Start-End: 227-437
atcctcaaagcttataagcgagtatcaagacatgtgatatggttttaaaatagctgatgataaagtatatacatcatctcattttctcctcttagtcttgtaataggaaggacagatattcaaacacttatttatttatttatttttaacagagatccggaaaatgaggcccataggaaacaagtgacttgctgagtccagataacactgactgtcagagagaaacatgaaccagaagctactgaagttggagaacttgctacgatttcacactatttataggcaactgcacagtctgtgtcaaagaagagcattaagacagtggaggcatgggttttcatctgcttaccctgtgtggacagctcaactgtgtgcctggccctggccaacagatgtgctcactggggctgctttatctcagtataggcttctagtaa

SEQ ID NO: 154741 - DNA, 2386 bp, Homo sapiens
  Payload ID: 10418
  Gene Symbol: MTIF2
  Gene Name: mitochondrial translational initiation factor 2
  Uniprot ID: P46199
  ENST ID: ENST00000403721
  CDS Start-End: 150-2333
gacctaccgaccattcttccgggtccagaaggtgatctccgcccgtgctcagaatccaggggcccggggctgtagagatccggaaaatgaggcccataggaaacaagtgacttgctgagtccagataacactgactgtcagagagaaacatgaaccagaagctactgaagttggagaacttgctacgatttcacactatttataggcaactgcacagtctgtgtcaaagaagagcattaagacagtggaggcatgggttttcatctgcttaccctgtgtggacagctcaactgtgtgcctggccctggccaacagatgtgctcactggggctgctttatctcagtataggcttctagtaacaaaaaaggaagaaggaccatggaaatctcagttatcttcaacaaaatctaaaaaggtggtagaagtatggattggaatgactattgaggaactggccagggcaatggaaaaaaacacagattatgtatatgaagctttattgaacactgatattgacatagattcactggaagcagactcacatttagatgaagtctggatcaaagaagtgataacgaaggcagggatgaagttaaagtggagtaaattaaaacaggacaaagtcagaaaaaataaagatgctgtaagaaggccccaggcagatccagctttattaaccccaaggtccccagttgttactataatgggccatgttgatcacgggaaaacgacattacttgacaaatttcgaaaaactcaagtggcagcagtggaaactggaggcatcactcagcacattggtgcctttcttgtctctctgccttctggggaaaagataacttttcttgatactccaggacatgctgctttctcagcaatgagagccagaggtgctcaggtcactgacattgtcgtattggttgtagctgcagatgatggagtgatgaaacaaactgtagaatctattcagcatgccaaagatgcacaggttcctattatccttgccgtaaataaatgtgacaaagctgaggctgatcctgagaaagtgaaaaaagagctgctggcttacgatgtggtatgtgaagattatggaggtgatgttcaagcagtgcctgtctccgcacttacgggcgataatctgatggctttggcagaagcaacagttgctcttgcagaaatgttagaattgaaagcagatcccaatggtccagtggaaggaacagtaatagagtctttcacagacaaaggaagaggtcttgttactacagctataattcaaagaggaactttaagaaaaggctctgttctggttgctggaaaatgttgggcaaaagtacgcttaatgtttgatgaaaatggaaaaacaattgatgaggcctatcccagcatgccagtgggaattacaggctggagagaccttccttctgcaggagaagaaattcttgaagtagaatctgagccaagggcacgtgaagttgttgactggaggaaatatgaacaagaacaggagaaaggtcaggaggatctgaaaataatagaagaaaagcgaaaggaacacaaagaagcacatcagaaagcccgtgagaagtatggccatctactgtggaagaagagatcaattctacggtttttagaaagaaaagaacaaatacccttaaagccaaaagagaaaagggaaagagattcaaatgtactttctgtgattattaaaggtgatgttgatggttctgttgaggccattttgaacattatagatacctatgatgcttcacacgagtgtgaactagaattagtacattttggagtgggtgatgtaagtgcaaatgatgttaaccttgctgaaacatttgatggtgttatatatggctttaatgtgaatgcaggcaatgttatccaacagtcagctgcaaaaaaaggagtaaaaattaaacttcacaaaataatttaccgtcttgttgaagatttgcaagaggaactgagcagcagattaccctgtgctgtggaagagcacccagtaggtgaggcatctatactagctaccttctctgtaacagaagggaagaaaaaagttcctgtggctggctgcagagtccaaaagggacagttagaaaaacaaaaaaaatttaaactaacccgtaatggacatgtaatttggaagggctcattaacctcattgaaacaccataaagatgacatttcaattgtcaaaacgggaatggattgtggtctcagtttagatgaagacaatatggaatttcaagtgggagacagaattgtttgttatgaagaaaagcaaattcaagccaagacttcttgggatccaggattttaaaattacattaaaaatgtaaataactcaacgtgttgtttgtttgaaggtagaaa

SEQ ID NO: 154742 - DNA, 583 bp, Homo sapiens
  Payload ID: 10418
  Gene Symbol: MTIF2
  Gene Name: mitochondrial translational initiation factor 2
  ENST ID: ENST00000441307
  CDS Start-End: 372-583
gcagacagtcccacccccagcggcgacagcaactctctgaattccggaaagaaccttttccagcgggaccggaagcccggcggggaccgtagcggggacggactgacctaccgaccattcttccgggtccagaagattccttgacaaggatatcctagcggcgaaacaacaccgtactgggagtcagaacgtctgggttctagtcttgactgccattaactagcggtatgacattggagaagcttttttgacccttctggatttccgtttccttttctgtaaaatgaggagcttggaagatccggaaaatgaggcccataggaaacaagtgacttgctgagtccagataacactgactgtcagagagaaacatgaaccagaagctactgaagttggagaacttgctacgatttcacactatttataggcaactgcacagtctgtgtcaaagaagagcattaagacagtggaggcatgggttttcatctgcttaccctgtgtggacagctcaactgtgtgcctggccctggccaacagatgtgctcactggggctgctttatctcagtataggcttctagtaac

SEQ ID NO: 154743 - DNA, 580 bp, Homo sapiens
  Payload ID: 10418
  Gene Symbol: MTIF2
  Gene Name: mitochondrial translational initiation factor 2
  ENST ID: ENST00000412530
  CDS Start-End: 559-580
cagggttgtccggtgcaggtggtgtgtgttgtttcgcctaacgtgtcagtggcacaaatcacgcgaacttcataaacattgtgcgttcggaagcctttccaagatgcatttaatccctgcgtgagcccacgttaggcattcacgaaggcatgtgcactgttctctcggaagcggctggccggcttcccctcctcgcgcgcggctgtgggtgcaggtcctcacttcccagcctcccatgggcccaaggccttctgggctccaatttgaggcgagccaccccagatccgtaatttttctgcagtgatttatttttacctttctgattccttgacaaggatatcctagcggcgaaacaacaccgtactgggagtcagaacgtctgggttctagtcttgactgccattaactagcggtatgacattggagaagcttttttgacccttctggatttccgtttccttttctgtaaaatgaggagcttggaagatccggaaaatgaggcccataggaaacaagtgacttgctgagtccagataacactgactgtcagagagaaacatgaaccagaagctactgaagt

SEQ ID NO: 154744 - DNA, 955 bp, Homo sapiens
  Payload ID: 10418
  Gene Symbol: MTIF2
  Gene Name: mitochondrial translational initiation factor 2
  ENST ID: ENST00000366137
  CDS Start-End: 738-955
cggggctgtaggtaggagttaagtgggtaggatcccttaaccagggttgtccggtgcaggtggtgtgtgttgtttcgcctaacgtgtcagtggcacaaatcacgcgaacttcataaacattgtgcgttcggaagcctttccaagatgcatttaatccctgcgtgagcccacgttaggcattcacgaaggcatgtgcactgttctctcggaagcggctggccggcttcccctcctcgcgcgcggctgtgggtgcaggtcctcacttcccagcctcccatgggcccaaggccttctgggctccaatttgaggcgagccaccccagatccgtaatttttctgcagtgatttatttttacctttctgattccttgacaaggatatcctagcggcgaaacaacaccgtactgggagtcagaacgtctgggttctagtcttgactgccattaactagcggtatgacattggagaagcttttttgacccttctggatttccgtttccttttctgtaaaatgaggagcttggaagatccggaaaatgaggcccataggaaacaagtgacttgctgagtccagataacactgactgtcagaagtctcgctctgtctccccggctggagtgcagtggcgtgatcttggctcactgcaacctctgtctcccgggttcaagaaattctcctgcctcagcctcccaagtagctgggactacaggcatgtgccaccacgcccaggagaaacatgaaccagaagctactgaagttggagaacttgctacgatttcacactatttataggcaactgcacagtctgtgtcaaagaagagcattaagacagtggaggcatgggttttcatctgcttaccctgtgtggacagctcaactgtgtgcctggccctggccaacagatgtgctcactggggctgctttatctcagtataggcttctagtaacaaaaaa

SEQ ID NO: 154745 - DNA, 566 bp, Homo sapiens
  Payload ID: 10418
  Gene Symbol: MTIF2
  Gene Name: mitochondrial translational initiation factor 2
  ENST ID: ENST00000417363
  CDS Start-End: 536-566
aagatgcatttaatccctgcgtgagcccacgttaggcattcacgaaggcatgtgcactgttctctcggaagcggctggccggcttcccctcctcgcgcgcggctgtgggtgcaggtcctcacttcccagcctcccatgggcccaaggccttctgggctccaatttgaggcgagccaccccagatccgtaatttttctgcagtgatttatttttacctttctggtaagttccaaagcttccagctcacattcagacgttttccctaacgcaactacgtatttgcaacatacttttttcagattccttgacaaggatatcctagcggcgaaacaacaccgtactgggagtcagaacgtctgggttctagtcttgactgccattaactagcggtatgacattggagaagcttttttgacccttctggatttccgtttccttttctgtaaaatgaggagcttggaagatccggaaaatgaggcccataggaaacaagtgacttgctgagtccagataacactgactgtcagagagaaacatgaaccagaagctactgaagttggagaact

SEQ ID NO: 154746 - DNA, 903 bp, Homo sapiens
  Payload ID: 10418
  Gene Symbol: MTIF2
  Gene Name: mitochondrial translational initiation factor 2
  ENST ID: ENST00000418823
  CDS Start-End: 1-903
ttcctattatccttgccgtaaataaatgtgacaaagctgaggctgatcctgagaaagtgaaaaaagagctgctggcttacgatgtggtatgtgaagattatggaggtgatgttcaagcagtgcctgtctccgcacttacgggcgataatctgatggctttggcagaagcaacagttgctcttgcagaaatgttagaattgaaagcagatcccaatggtccagtggaaggaacagtaatagagtctttcacagacaaaggaagaggtcttgttactacagctataattcaaagaggaactttaagaaaaggctctgttctggttgctggaaaatgttgggcaaaaccaagggcacgtgaagttgttgactggaggaaatatgaacaagaacaggagaaaggtcaggaggatctgaaaataatagaagaaaagcgaaaggaacacaaagaagcacatcagaaagcccgtgagaagtatggccatctactgtggaagaagagatcaattctacggtttttagaaagaaaagaacaaatacccttaaagccaaaagagaaaagggaaagagattcaaatgtactttctgtgattattaaaggtgatgttgatggttctgttgaggccattttgaacattatagatacctatgatgcttcacacgagtgtgaactagaattagtacattttggagtgggtgatgtaagtgcaaatgatgttaaccttgctgaaacatttgatggtgttatatatggctttaatgtgaatgcaggcaatgttatccaacagtcagctgcaaaaaaaggagtaaaaattaaacttcacaaaataatttaccgtcttgttgaagatttgcaagaggaactgagcagcagattaccctgtgctgtggaagagcacccagtag

SEQ ID NO: 154747 - DNA, 517 bp, Homo sapiens
  Payload ID: 10418
  Gene Symbol: MTIF2
  Gene Name: mitochondrial translational initiation factor 2
  ENST ID: ENST00000420637
  CDS Start-End: 439-517
agaatccaggggcccggggctgtaggtaggagttaagtgggtaggatcccttaaccagggttgtccggtgcaggtggtgtgtgttgtttcgcctaacgtgtcagtggcacaaatcacgcgaacttcataaacattgtgcgttcggaagcctttccaagatgcatttaatccctgcgtgagcccacgttaggcattcacgaagattccttgacaaggatatcctagcggcgaaacaacaccgtactgggagtcagaacgtctgggttctagtcttgactgccattaactagcggtatgacattggagaagcttttttgacccttctggatttccgtttccttttctgtaaaatgaggagcttggaagatccggaaaatgaggcccataggaaacaagtgacttgctgagtccagataacactgactgtcagagagaaacatgaaccagaagctactgaagttggagaacttgctacgatttcacactatttataggcaactgcacagtctgtgtcaaa

SEQ ID NO: 154748 - DNA, 1104 bp, Homo sapiens
  Payload ID: 10419
  Gene Symbol: MTIF3
  Gene Name: mitochondrial translational initiation factor 3
  Uniprot ID: Q9H2K0
  ENST ID: ENST00000381116
  CDS Start-End: 236-1072
gcagatccgctgtacttgcgtccgctacagtatgtcaatcgcttgccccagcacagtgggctccgtggcttaagacttgaaccaagtaaacgaagttctcttactgagaagtctcagtttcaaaagagcttctcctcatcaactggggatgattacagttcttcctaaaaaagcctacttgatgtgaagacaatgaggatgaagacctttatggtgatccacttccacttaatagatggctgctctttttctaaagaggttaacactacaaactgtaaagtctgaaaatagttgcattagatgttttggtaaacacatcctgcaaaagacagcaccagcacagttgtcccctattgcttctgccccaagactctccttcctaattcatgcaaaagcctttagtaccgctgaagacacccagaatgaaggaaaaaagacaaaaaagaataaaacagcttttagtaacgttggaagaaaaattagtcagcgagttattcacttatttgatgagaagggcaatgatttgggaaacatgcaccgagcaaatgtgattagacttatggatgagcgagacctgcgactggttcaaaggaacaccagcacagaacctgcagagtatcagctcatgacaggattgcagatcctccaggagcggcagaggctgagggagatggagaaggcgaaccccaaaactggaccaaccctgagaaaggaactgattttgtcttcaaatattggacaacatgatttggacacaaagactaaacagattcagcagtggattaagaaaaaacacctagtccagattaccataaagaaaggaaaaaatgtagacgtgtcagaaaatgaaatggaggagatatttcatcaaatactccagactatgcctggaatagctacattctcatctaggccacaagctgttcaaggaggaaaagctttaatgtgtgttcttcgtgctttcagcaaaaatgaggagaaggcatataaagaaactcaagagacccaggaaagagacactttgaacaaagaccatggaaatgataaggaatcaaatgttctgcatcagtaattttaataaagaaaagcatgctctgagagaaa

SEQ ID NO: 154749 - DNA, 1005 bp, Homo sapiens
  Payload ID: 10419
  Gene Symbol: MTIF3
  Gene Name: mitochondrial translational initiation factor 3
  Uniprot ID: Q9H2K0
  ENST ID: ENST00000381120
  CDS Start-End: 137-973
gggactcgccgcagatccgctgtacttgcgtccgctacagtatgtcaatcgcttgccccagcacagctgtcattcttctctacagaagagcttctcctcatcaactggggatgattacagttcttcctaaaaaaggatggctgctctttttctaaagaggttaacactacaaactgtaaagtctgaaaatagttgcattagatgttttggtaaacacatcctgcaaaagacagcaccagcacagttgtcccctattgcttctgccccaagactctccttcctaattcatgcaaaagcctttagtaccgctgaagacacccagaatgaaggaaaaaagacaaaaaagaataaaacagcttttagtaacgttggaagaaaaattagtcagcgagttattcacttatttgatgagaagggcaatgatttgggaaacatgcaccgagcaaatgtgattagacttatggatgagcgagacctgcgactggttcaaaggaacaccagcacagaacctgcagagtatcagctcatgacaggattgcagatcctccaggagcggcagaggctgagggagatggagaaggcgaaccccaaaactggaccaaccctgagaaaggaactgattttgtcttcaaatattggacaacatgatttggacacaaagactaaacagattcagcagtggattaagaaaaaacacctagtccagattaccataaagaaaggaaaaaatgtagacgtgtcagaaaatgaaatggaggagatatttcatcaaatactccagactatgcctggaatagctacattctcatctaggccacaagctgttcaaggaggaaaagctttaatgtgtgttcttcgtgctttcagcaaaaatgaggagaaggcatataaagaaactcaagagacccaggaaagagacactttgaacaaagaccatggaaatgataaggaatcaaatgttctgcatcagtaattttaataaagaaaagcatgctctgagagaaa

SEQ ID NO: 154750 - DNA, 889 bp, Homo sapiens
  Payload ID: 10419
  Gene Symbol: MTIF3
  Gene Name: mitochondrial translational initiation factor 3
  Uniprot ID: Q9H2K0
  ENST ID: ENST00000405591
  CDS Start-End: 28-864
atgaactcttcttactactttcttaggatggctgctctttttctaaagaggttaacactacaaactgtaaagtctgaaaatagttgcattagatgttttggtaaacacatcctgcaaaagacagcaccagcacagttgtcccctattgcttctgccccaagactctccttcctaattcatgcaaaagcctttagtaccgctgaagacacccagaatgaaggaaaaaagacaaaaaagaataaaacagcttttagtaacgttggaagaaaaattagtcagcgagttattcacttatttgatgagaagggcaatgatttgggaaacatgcaccgagcaaatgtgattagacttatggatgagcgagacctgcgactggttcaaaggaacaccagcacagaacctgcagagtatcagctcatgacaggattgcagatcctccaggagcggcagaggctgagggagatggagaaggcgaaccccaaaactggaccaaccctgagaaaggaactgattttgtcttcaaatattggacaacatgatttggacacaaagactaaacagattcagcagtggattaagaaaaaacacctagtccagattaccataaagaaaggaaaaaatgtagacgtgtcagaaaatgaaatggaggagatatttcatcaaatactccagactatgcctggaatagctacattctcatctaggccacaagctgttcaaggaggaaaagctttaatgtgtgttcttcgtgctttcagcaaaaatgaggagaaggcatataaagaaactcaagagacccaggaaagagacactttgaacaaagaccatggaaatgataaggaatcaaatgttctgcatcagtaattttaataaagaaaagcatgctctg

SEQ ID NO: 154751 - DNA, 1948 bp, Homo sapiens
  Payload ID: 10420
  Gene Symbol: MTRF1
  Gene Name: mitochondrial translational release factor 1
  Uniprot ID: O75570
  ENST ID: ENST00000379477
  CDS Start-End: 471-1808
gtactcacagttctttcctgatcttccccgccgcctcctgtattgcctctttatggaatcactccatatactgagttacacagcatggtttgcccgtgctgctgccccgcgggctgtcgcttctgacctgcctacactcagaactttccccaaagcatcagagtaatactgttactgtgatgggtaatggagaagtcgtgctgttctcagcgtgttgctttgtcgcccacgctggttgcagtggtgcgatctcagttcactgcaaccttcgcctcccaggttcaagcgattatcctgcctcagcttcccgagcagctaggactacaggatctcagctaaacgggaagcatttttgaaaagtgattgcacaattgagagtgaaaattactgagtcctgaacaggcaacttacattctaataccagctctgtctccatccagccgactgaatagtcgtgattaaatgctgagatgaatcgtcacctgtgtgtttggctttttagacatccatctcttaatggttacctccagtgtcacatccagctccattctcatcaatttagacagatacatcttgatacaaggctgcaagtttttagacaaaacaggaattgcattcttcatctgttaagtaagaattggtccaggagatattgccatcaagacaccaagatgctctggaagcataaagcactacagaaatatatggagaacctgagtaaggagtaccaaacacttgagcaatgtctgcagcatatccctgtgaatgaggaaaaccgaaggtccttgaacagaaggcatgctgagttggcacctcttgcagccatttaccaagaaattcaggagactgaacaagcaattgaagaattagaatcaatgtgtaaaagcctaaataaacaagatgaaaagcagttacaagaacttgcactggaagaaaggcaaaccattgatcaaaaaatcaacatgttgtacaatgagcttttccagagccttgtgccaaaggagaaatatgacaaaaatgatgttattttagaggtgacagctggaaggactactggaggtgacatctgccaacaatttacccgagaaatatttgacatgtaccagaattattcgtgctataaacactggcaatttgaacttctgaattatacaccagcagattatggtggactacatcatgcagccgcccgaatttccggtgacggtgtctataagcatttgaagtatgagggtgggattcaccgagttcagcgcatccccgaggtgggcctgtcctcaaggatgcagcgcattcacacaggaacgatgtcggttattgtccttcctcagccagatgaggtggatgtgaaattggaccccaaggatttgcgaatagatacatttcgagccaaaggagcaggagggcagcatgttaataaaactgatagtgccgtcagacttgtccacatccccacagggctagtagtagaatgccaacaagaaagatcacagataaaaaataaagaaatagcctttcgtgtgttgagagctagactctaccagcagattattgagaaagacaagcgtcagcaacaaagtgctagaaaactgcaggtgggaacaagagcccagtcagagcgaattcggacatataatttcacccaggatagagtcagtgaccacaggatagcatatgaagttcgtgatattaaggaatttttatgtggtgggaagggcctggatcagctaattcagagactgcttcaatcagcagatgaagaagccattgctgaacttttggatgaacaccttaaatcagcaaaataaatactaacttattattatttatgattatataaatgaaatggacctatatcaagaggcagactgaagcttggaaatcattatgaatatttgtaaattacagctttaagaacacattacacataaatatatgttttgtaatt

SEQ ID NO: 154752 - DNA, 2185 bp, Homo sapiens
  Payload ID: 10420
  Gene Symbol: MTRF1
  Gene Name: mitochondrial translational release factor 1
  Uniprot ID: O75570
  ENST ID: ENST00000379480
  CDS Start-End: 102-1439
cgtgatctcgggtttgtcgggctgaaatgtggcgggtctcggaaggttccgacctcagtaaagagagctaacgtgtattcttctttttcttagatgctgagatgaatcgtcacctgtgtgtttggctttttagacatccatctcttaatggttacctccagtgtcacatccagctccattctcatcaatttagacagatacatcttgatacaaggctgcaagtttttagacaaaacaggaattgcattcttcatctgttaagtaagaattggtccaggagatattgccatcaagacaccaagatgctctggaagcataaagcactacagaaatatatggagaacctgagtaaggagtaccaaacacttgagcaatgtctgcagcatatccctgtgaatgaggaaaaccgaaggtccttgaacagaaggcatgctgagttggcacctcttgcagccatttaccaagaaattcaggagactgaacaagcaattgaagaattagaatcaatgtgtaaaagcctaaataaacaagatgaaaagcagttacaagaacttgcactggaagaaaggcaaaccattgatcaaaaaatcaacatgttgtacaatgagcttttccagagccttgtgccaaaggagaaatatgacaaaaatgatgttattttagaggtgacagctggaaggactactggaggtgacatctgccaacaatttacccgagaaatatttgacatgtaccagaattattcgtgctataaacactggcaatttgaacttctgaattatacaccagcagattatggtggactacatcatgcagccgcccgaatttccggtgacggtgtctataagcatttgaagtatgagggtgggattcaccgagttcagcgcatccccgaggtgggcctgtcctcaaggatgcagcgcattcacacaggaacgatgtcggttattgtccttcctcagccagatgaggtggatgtgaaattggaccccaaggatttgcgaatagatacatttcgagccaaaggagcaggagggcagcatgttaataaaactgatagtgccgtcagacttgtccacatccccacagggctagtagtagaatgccaacaagaaagatcacagataaaaaataaagaaatagcctttcgtgtgttgagagctagactctaccagcagattattgagaaagacaagcgtcagcaacaaagtgctagaaaactgcaggtgggaacaagagcccagtcagagcgaattcggacatataatttcacccaggatagagtcagtgaccacaggatagcatatgaagttcgtgatattaaggaatttttatgtggtgggaagggcctggatcagctaattcagagactgcttcaatcagcagatgaagaagccattgctgaacttttggatgaacaccttaaatcagcaaaataaatactaacttattattatttatgattatataaatgaaatggacctatatcaagaggcagactgaagcttggaaatcattatgaatatttgtaaattacagctttaagaacacattacacataaatatatgttttgtaattaatcgaagtcacatttcctgacctaagaatttattttaggtttcctgtaaagtacaatccaactcatcaagtagaaaataagcatgcatcattgaaaagagaaagtattgagaattgattgtgtcatttaggacaagtcacttgttctctttatatgccttttttccccagccatctatgaattaatttaaatatatttttaatctactacttcaggaaaatatggtaaaatttagtaaaatatgaattttagacttccttataaaccttttatttaaatacaaagtaccttggcctatagtggatgcttatgcctgtaatcccagtgctttgaagggccaaagggggaagatctcttgaggtaagaatttgagaccagcctgggcaaaatagaccccatgtctacaaaaaaactcaaaacataaagaaaaaccataatactgttaatcatgttaaagttaagacttagactgcaacttttaaataaaaattatgaagaatatgagtcattcaataacaatgagcatctgggtacagacagtaaagccctttgattgctgtatgaattccacactatataaacaataagctgatattttaaataga

SEQ ID NO: 154753 - DNA, 820 bp, Homo sapiens
  Payload ID: 10420
  Gene Symbol: MTRF1
  Gene Name: mitochondrial translational release factor 1
  ENST ID: ENST00000452359
  CDS Start-End: 143-820
ggcgggtctcggaaggttccgacctcagtaaagagagctaacgtgtattcttctttttcttaggaaagtattccatgctacatgtgcaagaaacttggaaaacactgaaaagtagaaaaaatagcaagcaaaagatgctgagatgaatcgtcacctgtgtgtttggctttttagacatccatctcttaatggttacctccagtgtcacatccagctccattctcatcaatttagacagatacatcttgatacaaggctgcaagtttttagacaaaacaggaattgcattcttcatctgttaagtaagaattggtccaggagatattgccatcaagacaccaagatgctctggaagcataaagcactacagaaatatatggagaacctgagtaaggagtaccaaacacttgagcaatgtctgcagcatatccctgtgaatgaggaaaaccgaaggtccttgaacagaaggcatgctgagttggcacctcttgcagccatttaccaagaaattcaggagactgaacaagcaattgaagaattagaatcaatgtgtaaaagcctaaataaacaagatgaaaagcagttacaagaacttgcactggaagaaaggcaaaccattgatcaaaaaatcaacatgttgtacaatgagcttttccagagccttgtgccaaaggagaaatatgacaaaaatgatgttattttagaggtgacagctggaaggactactggaggtgacatctgccaacaatttacccgagaaatatttgacatgtaccagaattattcgtgctataaacactggcaatttgaacttctgaat

SEQ ID NO: 154754 - DNA, 557 bp, Homo sapiens
  Payload ID: 10420
  Gene Symbol: MTRF1
  Gene Name: mitochondrial translational release factor 1
  ENST ID: ENST00000430347
  CDS Start-End: 102-557
cgtgatctcgggtttgtcgggctgaaatgtggcgggtctcggaaggttccgacctcagtaaagagagctaacgtgtattcttctttttcttagatgctgagatgaatcgtcacctgtgtgtttggctttttagacatccatctcttaatggttacctccagtgtcacatccagctccattctcatcaatttagacagatacatcttgatacaaggctgcaagtttttagacaaaacaggaattgcattcttcatctgttaagtaagaattggtccaggagatattgccatcaagacaccaagatgctctggaagcataaagcactacagaaatatatggagaacctgagtaaggagtaccaaacacttgagcaatgtctgcagcatatccctgtgaatgaggaaaaccgaaggtccttgaacagaaggcatgctgagttggcacctcttgcagccatttaccaagaaattcaggagactgaacaagcaattgaagaattagaatcaatgtgtaaaaagacagagtcttgctctgtggcccaggctggaatgcagtag

SEQ ID NO: 154755 - DNA, 1561 bp, Homo sapiens
  Payload ID: 10420
  Gene Symbol: MTRF1
  Gene Name: mitochondrial translational release factor 1
  ENST ID: ENST00000239852
  CDS Start-End: 378-833
cgggtttgtcgggctgaaatgtggcgggtctcggaaggttccgacctcagtaaagagagctaacgtgtattcttctttttcttagcgtgttgctttgtcgcccacgctggttgcagtggtgcgatctcagttcactgcaaccttcgcctcccaggttcaagcgattatcctgcctcagcttcccgagcagctaggactacaggtgtgtgccatcacgctcagctaatttttttggtatttttagtagagatggggttttcccatgttggccaggctggtctcgaactcctgacctcagatgatctgcccgcctcggcctcccaaagtggtaggattacaggcgtgagccactgtgctcggcacattttgatgctgagatgaatcgtcacctgtgtgtttggctttttagacatccatctcttaatggttacctccagtgtcacatccagctccattctcatcaatttagacagatacatcttgatacaaggctgcaagtttttagacaaaacaggaattgcattcttcatctgttaagtaagaattggtccaggagatattgccatcaagacaccaagatgctctggaagcataaagcactacagaaatatatggagaacctgagtaaggagtaccaaacacttgagcaatgtctgcagcatatccctgtgaatgaggaaaaccgaaggtccttgaacagaaggcatgctgagttggcacctcttgcagccatttaccaagaaattcaggagactgaacaagcaattgaagaattagaatcaatgtgtaaaaagacagagtcttgctctgtggcccaggctggaatgcagtagtgtaatcatagctcactttaaccttgaactcctggactcaagcaatcctccaacctcagcctcccaagtagctgggactacaggcctaaataaacaagatgaaaagcagttacaagaacttgcactggaagaaaggcaaaccattgatcaaaaaatcaacatgttgtacaatgagcttttccagagccttgtgccaaaggagaaatatgacaaaaatgatgttattttagaggtgacagctggaaggactactggaggtgacatctgccaacaatttacccgagaaatatttgacatgtaccagaattattcgtgctataaacactggcaatttgaacttctgaattatacaccagcagattatggtaggcatattgaggaatttgcctgtaggagatactgaaaattattttacctctgatcttgattagaaccatattgtcccatttttttttgaaacttttggtgtatatctactaaacactgtggcataggctcatcaatcacagtggcttactattatagcagagttgttagctaggagaagacagtagaaaggagggaagcatttgcttagggagaaatatgtgaattagagaaaattcccctgaggaacttagatacgtatcttgcctcaaaatcatttttctctattattgaaagcaaaggtatattaaggtttttactttaaataactttataaaataatataagtattactaattaga

SEQ ID NO: 154756 - DNA, 737 bp, Homo sapiens
  Payload ID: 10420
  Gene Symbol: MTRF1
  Gene Name: mitochondrial translational release factor 1
  ENST ID: ENST00000480434
  CDS Start-End: 1-414
agaaggcatgctgagttggcacctcttgcagccatttaccaagaaattcaggagactgaacaagcaattgaagaattagaatcaatgtgtaaaagcctaaataaacaagatgaaaagcagttacaagaacttgcactggaagaaaggcaaaccattgatcaaaaaatcaacatgttgtacaatgagcttttccagagccttgtgccaaaggagaaatatgacaaaaatgatgttattttagaggtgacagctggaaggactactggaggtgacatctgccaacaatttacccgagaaatatttgacatgtaccagaattattcgtgctataaacactggcaatttgaacttctgaattatacaccagcagattatggtaggcatattgaggaatttgcctgtaggagatactgaaaattattttacctctgatcttgattagaaccatattgtcccatttttttttgaaacttttggtgtatatctactaaacactgtggcataggctcatcaatcacagtggcttactattatagcagagttgttagctaggagaagacagtagaaaggagggaagcatttgcttagggagaaatatgtgaattagagaaaattcccctgaggaacttagatacgtatcttgcctcaaaatcatttttctctattattgaaagcaaaggtatattaaggtttttactttaaataactttataaaataatataagtattactaatta

SEQ ID NO: 154757 - DNA, 863 bp, Homo sapiens
  Payload ID: 10420
  Gene Symbol: MTRF1
  Gene Name: mitochondrial translational release factor 1
  ENST ID: ENST00000497679
  CDS Start-End: 102-563
cgtgatctcgggtttgtcgggctgaaatgtggcgggtctcggaaggttccgacctcagtaaagagagctaacgtgtattcttctttttcttagatgctgagatgaatcgtcacctgtgtgtttggctttttagacatccatctcttaatggttacctccagtgtcacatccagctccattctcatcaatttagacagatacatcttgatacaaggctgcaagtttttagacaaaacaggaattgcattcttcatctgttaagtaagaattggtccaggagatattgccatcaagacaccaagatgctctggaagcataaagcactacagaaatatatggagaacctgagtaaggagtaccaaacacttgagcaatgtctgcagcatatccctgtgaatgaggaaaaccgaaggtccttgaacagaaggcatgctgagttggcacctcttgcagccatttaccaagaaattcaggagactgaacaagcaattgaagaattagaatcaatgtgtaaaagagacagagtcttgctctgtggcccaggctggaatgcagtagtgtaatcatagctcactttaaccttgaactcctggactcaagcaatcctccaacctcagcctcccaagtagctgggactacaggcctaaataaacaagatgaaaagcagttacaagaacttgcactggaagaaaggcaaaccattgatcaaaaaatcaacatgttgtacaatgagcttttccagagccttgtgccaaaggagaaatatgacaaaaatgatgttattttagaggtgacagctggaaggactactggaggtgacatctgccaacaatttacccgagaaatatttgacatgtaccaga

SEQ ID NO: 154758 - DNA, 3431 bp, Homo sapiens
  Payload ID: 10421
  Gene Symbol: MTRF1L
  Gene Name: mitochondrial translational release factor 1-like
  Uniprot ID: Q9UGC7
  ENST ID: ENST00000367230
  CDS Start-End: 1-708
atgcggtcccgggttctgtggggcgctgcccggtggctctggccccgccgggccgttggcccagcccgccggcccctgagctccggtagcccgccgctggaggagctgttcacccggggcgggcccttgcggaccttcctcgagcgccaggcggggtctgaagcccatttgaaggtcaggaggcccgagttgctggcggtgatcaaactgctgaacgagaaggagcgggagctgcgggagactgagcacttgctgcacgatgagaatgaagatttaaggaaacttgcagagaatgaaatcactttgtgtcaaaaagaaataactcagctgaagcatcagattatcttacttttggttccctcagaagaaacagatgaaaatgatttgatcctggaagtaactgcaggagttggaggtggccttagacatgcatctgccagcattgggggttcagaagcctataggcacatgaaatttgaaggaggtgttcacagagtacaaagagtgccaaagacagaaaagcaaggccgcgtccatactagcaccatgactgtagcaatattaccccagcctactgagattaatctggtgattaatccgaaagatttgagaattgacactaagcgagccagtggagctggggggcagcatgtaaataccacggacagtgctgtccggatagttcatcttccaacagattggaagtaaaggaagatcagagaaaataagaacatataattttccacagaaccgggtcacagatcacagaataaacaagacgctgcatgatcttgaaacttttatgcaaggagattatctactggatgaacttgtacagtcattgaaggaatacgccgattatgaatctttagtagaaattatttcccaaaaagtttaagttgatttgttatttatagactttcgtagcttagaaaaattctacagtacatccacatagggtgaaagtacccttactctcttgaaaaacgttgagttaacacagttggaggtaatatgcatattctgaagtcatagataatttacacagatctctctcaatgcattagcaaaaatcatacaatatacagatggtcctcgatttacattgtggttaattcccaataaacccatcataagttaaaaatgcatataacgttagcaacacagcagtctcctaattaatgacagcttgacttaacaattttccaactttaccatggtgtgaaagaggtatgattcctaagccctaaggagctcctcagcttgaaatggggctgcatccctataaacccatcataaagtcaaaaaatcctaaaacataagttggtgaccatctgtaatcatgatgtggtggtaaatcttggacgctaccttacaataactagacaaaggaaaatcatcctttgtcctgttctgtgtaaatatttaatgaatgatcaaaacttcagtttaaatattatgaaaaactttaaacataaagtagtagaaataagacagtaaatactgtatcctaatatccagtcaggatacagaaaccataccattaacttgaacagggataattttaatataaaaactgttaactgataatggtattaacttttaagagggatgaaagagagctatgatgtcctaggactgagagtaccccaggaaagaatacccttgaaagggtctccccttccccatggtgaagtcaggcctaatggagagagtggctacagcctactcagtgattgggaaattccctgtcttgccctgggccagagctggtgtaccgctggtggatcaggtcttacaagcaaagaacctcacactcccaactggtaagccagaagcctcttgctagggtgtgagcaaaacttggacaggaactctcagtagatgtttgtgtttgtcaagattctccagacaaacttccttaaaaggattggcttgtgttgttattattaagtctaacaagtccaaaagctggagtgtgaggcaggaggctggaaacccaggaaagctgatggtgcaaggtccagtccaaaggtatctgttggaggattctcttgttctgggaagaggacggtctttttttctcttcagaccttcacctgactggatcaagcccactaacatcgaggaggacagtctgcattactcagagttcactgattgatttaaatgtcaatctcatataaaacaccctcacagaaacacctagaataatgtttgaccttataattggaaaatcagagcaaaagttaaatctcaaaaaaaaaaaaaaaaaaagtatgacccagtagctaggcacctgtggccccgccaagttgacacataaaattaactgtcacagtatcatcttagaagtgaaagaagcccctttatcctgcagtgcccctctaccaccacctactgacaaagaacatggtgctatctggcatgggagaaatgttcagtttgctatggcttgtatgtgtcccctcaaattcaagtgttgccaatgtgacagcatcaagaggtggggtctttaagagatcactaggccatgagggattctcttaggactgggatgaaggcccataataaaagaggtttcggggagcatcctgctagcttgccttctgtatgtgagaacacagcaagaaagccctagtcaacaagtgccagctccttgatcttagacttcccatcctccagaactgtgagaaatacatttctgttccttacaaattacccagtctcctgtattctgttatagcagcacaaaatgaagataccatacctgaacacctgaacattcttcacaaggtagtaaatgcactgctttattctggtctcagtattgtgtgcttaataaggaaatgagaaagggtggatcagggcataggatgaacaagttactgctagacctctcacaatgccactaatggataagattgtattttcatcattcttgtctcttcggaagctaacaccatgctataataggcactaaatagatgtctaaaaacaccttaagtatttgtctagaaatctggtgcattgttcagaaagaaccaaaattcaaaataatttcaaagggcctaaagcactagttaatcaaaattcattagtttttaatggtactaccactctcaaatttaaaatgtcatcttacgttcctcttcctcgcattggatttattgctaaaacctggtaaacacttttaatccttttcaattccattaccactgctcttgtccagaattacttcgcagactaatagtcacctgacttctcccctgcatccgatttgctgtctaattctggttacaaataagtaactgccaaactaatctttctaaaaagcaagactgatctcgtcactcctttgctcaacaatgtaaaagctcccattgtctcccaaataaaaccagctttccactgtgtatacaatacatcca

SEQ ID NO: 154759 - DNA, 3539 bp, Homo sapiens
  Payload ID: 10421
  Gene Symbol: MTRF1L
  Gene Name: mitochondrial translational release factor 1-like
  Uniprot ID: Q9UGC7
  ENST ID: ENST00000367231
  CDS Start-End: 1-816
atgcggtcccgggttctgtggggcgctgcccggtggctctggccccgccgggccgttggcccagcccgccggcccctgagctccggtagcccgccgctggaggagctgttcacccggggcgggcccttgcggaccttcctcgagcgccaggcggggtctgaagcccatttgaaggtcaggaggcccgagttgctggcggtgatcaaactgctgaacgagaaggagcgggagctgcgggagactgagcacttgctgcacgatgagaatgaagatttaaggaaacttgcagagaatgaaatcactttgtgtcaaaaagaaataactcagctgaagcatcagattatcttacttttggttccctcagaagaaacagatgaaaatgatttgatcctggaagtaactgcaggagttggaggtcaggaggcaatgttgtttacatcagagatatttgatatgtatcagcaatatgctgcatttaaaagatggcattttgaaaccctggaatattttccaagtgaactaggtggccttagacatgcatctgccagcattgggggttcagaagcctataggcacatgaaatttgaaggaggtgttcacagagtacaaagagtgccaaagacagaaaagcaaggccgcgtccatactagcaccatgactgtagcaatattaccccagcctactgagattaatctggtgattaatccgaaagatttgagaattgacactaagcgagccagtggagctggggggcagcatgtaaataccacggacagtgctgtccggatagttcatcttccaacagattggaagtaaaggaagatcagagaaaataagaacatataattttccacagaaccgggtcacagatcacagaataaacaagacgctgcatgatcttgaaacttttatgcaaggagattatctactggatgaacttgtacagtcattgaaggaatacgccgattatgaatctttagtagaaattatttcccaaaaagtttaagttgatttgttatttatagactttcgtagcttagaaaaattctacagtacatccacatagggtgaaagtacccttactctcttgaaaaacgttgagttaacacagttggaggtaatatgcatattctgaagtcatagataatttacacagatctctctcaatgcattagcaaaaatcatacaatatacagatggtcctcgatttacattgtggttaattcccaataaacccatcataagttaaaaatgcatataacgttagcaacacagcagtctcctaattaatgacagcttgacttaacaattttccaactttaccatggtgtgaaagaggtatgattcctaagccctaaggagctcctcagcttgaaatggggctgcatccctataaacccatcataaagtcaaaaaatcctaaaacataagttggtgaccatctgtaatcatgatgtggtggtaaatcttggacgctaccttacaataactagacaaaggaaaatcatcctttgtcctgttctgtgtaaatatttaatgaatgatcaaaacttcagtttaaatattatgaaaaactttaaacataaagtagtagaaataagacagtaaatactgtatcctaatatccagtcaggatacagaaaccataccattaacttgaacagggataattttaatataaaaactgttaactgataatggtattaacttttaagagggatgaaagagagctatgatgtcctaggactgagagtaccccaggaaagaatacccttgaaagggtctccccttccccatggtgaagtcaggcctaatggagagagtggctacagcctactcagtgattgggaaattccctgtcttgccctgggccagagctggtgtaccgctggtggatcaggtcttacaagcaaagaacctcacactcccaactggtaagccagaagcctcttgctagggtgtgagcaaaacttggacaggaactctcagtagatgtttgtgtttgtcaagattctccagacaaacttccttaaaaggattggcttgtgttgttattattaagtctaacaagtccaaaagctggagtgtgaggcaggaggctggaaacccaggaaagctgatggtgcaaggtccagtccaaaggtatctgttggaggattctcttgttctgggaagaggacggtctttttttctcttcagaccttcacctgactggatcaagcccactaacatcgaggaggacagtctgcattactcagagttcactgattgatttaaatgtcaatctcatataaaacaccctcacagaaacacctagaataatgtttgaccttataattggaaaatcagagcaaaagttaaatctcaaaaaaaaaaaaaaaaaaagtatgacccagtagctaggcacctgtggccccgccaagttgacacataaaattaactgtcacagtatcatcttagaagtgaaagaagcccctttatcctgcagtgcccctctaccaccacctactgacaaagaacatggtgctatctggcatgggagaaatgttcagtttgctatggcttgtatgtgtcccctcaaattcaagtgttgccaatgtgacagcatcaagaggtggggtctttaagagatcactaggccatgagggattctcttaggactgggatgaaggcccataataaaagaggtttcggggagcatcctgctagcttgccttctgtatgtgagaacacagcaagaaagccctagtcaacaagtgccagctccttgatcttagacttcccatcctccagaactgtgagaaatacatttctgttccttacaaattacccagtctcctgtattctgttatagcagcacaaaatgaagataccatacctgaacacctgaacattcttcacaaggtagtaaatgcactgctttattctggtctcagtattgtgtgcttaataaggaaatgagaaagggtggatcagggcataggatgaacaagttactgctagacctctcacaatgccactaatggataagattgtattttcatcattcttgtctcttcggaagctaacaccatgctataataggcactaaatagatgtctaaaaacaccttaagtatttgtctagaaatctggtgcattgttcagaaagaaccaaaattcaaaataatttcaaagggcctaaagcactagttaatcaaaattcattagtttttaatggtactaccactctcaaatttaaaatgtcatcttacgttcctcttcctcgcattggatttattgctaaaacctggtaaacacttttaatccttttcaattccattaccactgctcttgtccagaattacttcgcagactaatagtcacctgacttctcccctgcatccgatttgctgtctaattctggttacaaataagtaactgccaaactaatctttctaaaaagcaagactgatctcgtcactcctttgctcaacaatgtaaaagctcccattgtctcccaaataaaaccagctttccactgtgtatacaatacatcca

SEQ ID NO: 154760 - DNA, 3676 bp, Homo sapiens
  Payload ID: 10421
  Gene Symbol: MTRF1L
  Gene Name: mitochondrial translational release factor 1-like
  Uniprot ID: Q9UGC7
  ENST ID: ENST00000367233
  CDS Start-End: 1-1143
atgcggtcccgggttctgtggggcgctgcccggtggctctggccccgccgggccgttggcccagcccgccggcccctgagctccggtagcccgccgctggaggagctgttcacccggggcgggcccttgcggaccttcctcgagcgccaggcggggtctgaagcccatttgaaggtcaggaggcccgagttgctggcggtgatcaaactgctgaacgagaaggagcgggagctgcgggagactgagcacttgctgcacgatgagaatgaagatttaaggaaacttgcagagaatgaaatcactttgtgtcaaaaagaaataactcagctgaagcatcagattatcttacttttggttccctcagaagaaacagatgaaaatgatttgatcctggaagtaactgcaggagttggaggtcaggaggcaatgttgtttacatcagagatatttgatatgtatcagcaatatgctgcatttaaaagatggcattttgaaaccctggaatattttccaagtgaactaggtggccttagacatgcatctgccagcattgggggttcagaagcctataggcacatgaaatttgaaggaggtgttcacagagtacaaagagtgccaaagacagaaaagcaaggccgcgtccatactagcaccatgactgtagcaatattaccccagcctactgagattaatctggtgattaatccgaaagatttgagaattgacactaagcgagccagtggagctggggggcagcatgtaaataccacggacagtgctgtccggatagttcatcttccaacaggtgttgtttctgaatgtcaacaagagagatctcagctgaaaaataaagagctggctatgacaaagttacgtgcaaaactgtacagcatgcatctagaagaagaaataaataaaagacagaatgctagaaaaattcagattggaagtaaaggaagatcagagaaaataagaacatataattttccacagaaccgggtcacagatcacagaataaacaagacgctgcatgatcttgaaacttttatgcaaggagattatctactggatgaacttgtacagtcattgaaggaatacgccgattatgaatctttagtagaaattatttcccaaaaagtttaagttgatttgttatttatagactttcgtagcttagaaaaattctacagtacatccacatagggtgaaagtacccttactctcttgaaaaacgttgagttaacacagttggaggtaatatgcatattctgaagtcatagataatttacacagatctctctcaatgcattagcaaaaatcatacaatatacagatggtcctcgatttacattgtggttaattcccaataaacccatcataagttaaaaatgcatataacgttagcaacacagcagtctcctaattaatgacagcttgacttaacaattttccaactttaccatggtgtgaaagaggtatgattcctaagccctaaggagctcctcagcttgaaatggggctgcatccctataaacccatcataaagtcaaaaaatcctaaaacataagttggtgaccatctgtaatcatgatgtggtggtaaatcttggacgctaccttacaataactagacaaaggaaaatcatcctttgtcctgttctgtgtaaatatttaatgaatgatcaaaacttcagtttaaatattatgaaaaactttaaacataaagtagtagaaataagacagtaaatactgtatcctaatatccagtcaggatacagaaaccataccattaacttgaacagggataattttaatataaaaactgttaactgataatggtattaacttttaagagggatgaaagagagctatgatgtcctaggactgagagtaccccaggaaagaatacccttgaaagggtctccccttccccatggtgaagtcaggcctaatggagagagtggctacagcctactcagtgattgggaaattccctgtcttgccctgggccagagctggtgtaccgctggtggatcaggtcttacaagcaaagaacctcacactcccaactggtaagccagaagcctcttgctagggtgtgagcaaaacttggacaggaactctcagtagatgtttgtgtttgtcaagattctccagacaaacttccttaaaaggattggcttgtgttgttattattaagtctaacaagtccaaaagctggagtgtgaggcaggaggctggaaacccaggaaagctgatggtgcaaggtccagtccaaaggtatctgttggaggattctcttgttctgggaagaggacggtctttttttctcttcagaccttcacctgactggatcaagcccactaacatcgaggaggacagtctgcattactcagagttcactgattgatttaaatgtcaatctcatataaaacaccctcacagaaacacctagaataatgtttgaccttataattggaaaatcagagcaaaagttaaatctcaaaaaaaaaaaaaaaaaaagtatgacccagtagctaggcacctgtggccccgccaagttgacacataaaattaactgtcacagtatcatcttagaagtgaaagaagcccctttatcctgcagtgcccctctaccaccacctactgacaaagaacatggtgctatctggcatgggagaaatgttcagtttgctatggcttgtatgtgtcccctcaaattcaagtgttgccaatgtgacagcatcaagaggtggggtctttaagagatcactaggccatgagggattctcttaggactgggatgaaggcccataataaaagaggtttcggggagcatcctgctagcttgccttctgtatgtgagaacacagcaagaaagccctagtcaacaagtgccagctccttgatcttagacttcccatcctccagaactgtgagaaatacatttctgttccttacaaattacccagtctcctgtattctgttatagcagcacaaaatgaagataccatacctgaacacctgaacattcttcacaaggtagtaaatgcactgctttattctggtctcagtattgtgtgcttaataaggaaatgagaaagggtggatcagggcataggatgaacaagttactgctagacctctcacaatgccactaatggataagattgtattttcatcattcttgtctcttcggaagctaacaccatgctataataggcactaaatagatgtctaaaaacaccttaagtatttgtctagaaatctggtgcattgttcagaaagaaccaaaattcaaaataatttcaaagggcctaaagcactagttaatcaaaattcattagtttttaatggtactaccactctcaaatttaaaatgtcatcttacgttcctcttcctcgcattggatttattgctaaaacctggtaaacacttttaatccttttcaattccattaccactgctcttgtccagaattacttcgcagactaatagtcacctgacttctcccctgcatccgatttgctgtctaattctggttacaaataagtaactgccaaactaatctttctaaaaagcaagactgatctcgtcactcctttgctcaacaatgtaaaagctcccattgtctcccaaataaaaccagctttccactgtgtatacaatacatcca

SEQ ID NO: 154761 - DNA, 3229 bp, Homo sapiens
  Payload ID: 10421
  Gene Symbol: MTRF1L
  Gene Name: mitochondrial translational release factor 1-like
  ENST ID: ENST00000414771
  CDS Start-End: 1-696
attatcttacttttggttccctcagaagaaacagatgaaaatgatttgatcctggaagtaactgcaggagttggaggtggccttagacatgcatctgccagcattgggggttcagaagcctataggcacatgaaatttgaaggaggtgttcacagagtacaaagagtgccaaagacagaaaagcaaggccgcgtccatactagcaccatgactgtagcaatattaccccagcctactgagattaatctggtgattaatccgaaagatttgagaattgacactaagcgagccagtggagctggggggcagcatgtaaataccacggacagtgctgtccggatagttcatcttccaacaggtgttgtttctgaatgtcaacaagagagatctcagctgaaaaataaagagctggctatgacaaagttacgtgcaaaactgtacagcatgcatctagaagaagaaataaataaaagacagaatgctagaaaaattcagattggaagtaaaggaagatcagagaaaataagaacatataattttccacagaaccgggtcacagatcacagaataaacaagacgctgcatgatcttgaaacttttatgcaaggagattatctactggatgaacttgtacagtcattgaaggaatacgccgattatgaatctttagtagaaattatttcccaaaaagtttaagttgatttgttatttatagactttcgtagcttagaaaaattctacagtacatccacatagggtgaaagtacccttactctcttgaaaaacgttgagttaacacagttggaggtaatatgcatattctgaagtcatagataatttacacagatctctctcaatgcattagcaaaaatcatacaatatacagatggtcctcgatttacattgtggttaattcccaataaacccatcataagttaaaaatgcatataacgttagcaacacagcagtctcctaattaatgacagcttgacttaacaattttccaactttaccatggtgtgaaagaggtatgattcctaagccctaaggagctcctcagcttgaaatggggctgcatccctataaacccatcataaagtcaaaaaatcctaaaacataagttggtgaccatctgtaatcatgatgtggtggtaaatcttggacgctaccttacaataactagacaaaggaaaatcatcctttgtcctgttctgtgtaaatatttaatgaatgatcaaaacttcagtttaaatattatgaaaaactttaaacataaagtagtagaaataagacagtaaatactgtatcctaatatccagtcaggatacagaaaccataccattaacttgaacagggataattttaatataaaaactgttaactgataatggtattaacttttaagagggatgaaagagagctatgatgtcctaggactgagagtaccccaggaaagaatacccttgaaagggtctccccttccccatggtgaagtcaggcctaatggagagagtggctacagcctactcagtgattgggaaattccctgtcttgccctgggccagagctggtgtaccgctggtggatcaggtcttacaagcaaagaacctcacactcccaactggtaagccagaagcctcttgctagggtgtgagcaaaacttggacaggaactctcagtagatgtttgtgtttgtcaagattctccagacaaacttccttaaaaggattggcttgtgttgttattattaagtctaacaagtccaaaagctggagtgtgaggcaggaggctggaaacccaggaaagctgatggtgcaaggtccagtccaaaggtatctgttggaggattctcttgttctgggaagaggacggtctttttttctcttcagaccttcacctgactggatcaagcccactaacatcgaggaggacagtctgcattactcagagttcactgattgatttaaatgtcaatctcatataaaacaccctcacagaaacacctagaataatgtttgaccttataattggaaaatcagagcaaaagttaaatctcaaaaaaaaaaaaaaaaaaagtatgacccagtagctaggcacctgtggccccgccaagttgacacataaaattaactgtcacagtatcatcttagaagtgaaagaagcccctttatcctgcagtgcccctctaccaccacctactgacaaagaacatggtgctatctggcatgggagaaatgttcagtttgctatggcttgtatgtgtcccctcaaattcaagtgttgccaatgtgacagcatcaagaggtggggtctttaagagatcactaggccatgagggattctcttaggactgggatgaaggcccataataaaagaggtttcggggagcatcctgctagcttgccttctgtatgtgagaacacagcaagaaagccctagtcaacaagtgccagctccttgatcttagacttcccatcctccagaactgtgagaaatacatttctgttccttacaaattacccagtctcctgtattctgttatagcagcacaaaatgaagataccatacctgaacacctgaacattcttcacaaggtagtaaatgcactgctttattctggtctcagtattgtgtgcttaataaggaaatgagaaagggtggatcagggcataggatgaacaagttactgctagacctctcacaatgccactaatggataagattgtattttcatcattcttgtctcttcggaagctaacaccatgctataataggcactaaatagatgtctaaaaacaccttaagtatttgtctagaaatctggtgcattgttcagaaagaaccaaaattcaaaataatttcaaagggcctaaagcactagttaatcaaaattcattagtttttaatggtactaccactctcaaatttaaaatgtcatcttacgttcctcttcctcgcattggatttattgctaaaacctggtaaacacttttaatccttttcaattccattaccactgctcttgtccagaattacttcgcagactaatagtcacctgacttctcccctgcatccgatttgctgtctaattctggttacaaataagtaactgccaaactaatctttctaaaaagcaagactgatctcgtcactcctttgctcaacaatgtaaaagctcccattgtctcccaaataaaaccagctttccactgtgtatacaatacatcca

SEQ ID NO: 154762 - DNA, 508 bp, Homo sapiens
  Payload ID: 10421
  Gene Symbol: MTRF1L
  Gene Name: mitochondrial translational release factor 1-like
  ENST ID: ENST00000448966
  CDS Start-End: 18-508
tatgttttacagtctccatgttcatctccttttatgactttaaaaatatacctcaagatagtagatgtgatggtcaattatttataaatggcaggaataataaaaataattctatttccctgtattttcaaggtggccttagacatgcatctgccagcattgggggttcagaagcctataggcacatgaaatttgaaggaggtgttcacagagtacaaagagtgccaaagacagaaaagcaaggccgcgtccatactagcaccatgactgtagcaatattaccccagcctactgagattaatctggtgattaatccgaaagatttgagaattgacactaagcgagccagtggagctggggggcagcatgtaaataccacggacagtgctgtccggatagttcatcttccaacaggtgttgtttctgaatgtcaacaagagagatctcagctgaaaaataaagagctggctatgacaaagttacgtgcaaaactgtacagcatgcatct

SEQ ID NO: 154763 - DNA, 2961 bp, Homo sapiens
  Payload ID: 10422
  Gene Symbol: MTO1
  Gene Name: mitochondrial tRNA translation optimization 1
  Uniprot ID: Q9Y2Z2
  ENST ID: ENST00000370300
  CDS Start-End: 91-2244
ggccgcgccctgcagattgtctcttgttgcgtaagtttttttgaccgtcactcgtgtcagcttcaaagtcagatagatttttctcccagcatgttctacttccgaggctgtggccgttgggtcgcggtttccttcaccaagcagcaatttccgttggcacggttgagcagtgacagcgcggcgccccggactccgcacttcgacgtgatagtcattggtggaggacatgccgggactgaggcagccaccgccgccgctcggtgcggctctcggactctgctcctcactcaccgcgtggacacgatcggtcagatgtcatgtaatccttcctttggtggcatcggaaagggacatttaatgagggaagtagatgccttggatggcctgtgttctcgcatctgtgaccagtctggtgtacattataaagtattaaaccggcgtaagggaccagctgtgtggggtctgagagctcagattgataggaaactctataaacagaacatgcagaaagaaatcttgaatacaccactgcttactgttcaggagggagctgtagaagatcttattcttacagaaccagagcctgaacacactgggaaatgccgtgtcagtggggttgttttggtggatggaagcacagtatatgcagagagtgtgattctgactactgggacatttctgagaggcatgattgtaattggattggagacgcatccagcaggacgtttaggggatcagccttctataggattggctcagacactggagaagttagggtttgtggtgggaaggttgaagactgggactccaccccgaattgccaaagagtccattaatttcagtattctaaacaagcatataccggacaatccatccataccattcagctttaccaatgagacagtatggattaagccagaagatcagctgccatgttacttgactcacaccaaccctagagtggatgagattgtccttaagaaccttcaccttaatagtcatgttaaagaaacgacaagaggacctcgatactgtccctccattgaatcaaaagttttgcgttttccaaaccgtctacatcaggtttggttggaacctgaaggaatggattctgaccttatctacccacaggggttatctatgacgctaccagctgagttacaagagaaaatgatcacatgcatcagaggcttggagaaagctaaagtgattcagccagacggagttttgctcttgttgcccaggatggagtgcaatggtgcgatctcggctcaccacaacctccccctgccaggctacggtgttcagtatgattacttagatccccgtcagatcaccccttccttggagactcatttggttcaacgactcttctttgctggacagatcaatggcaccactggttatgaggaagctgcagctcaaggtgtgatagccggaatcaacgccagtcttcgggtcagtcgcaagcctccctttgtggttagccgaacagaaggttacataggagtcttgattgatgacctcactactctgggcaccagtgaaccataccgcatgtttaccagccgagtagagttccgtttgtcactgcgccctgataatgctgacagccggctcacactgcgagggtataaagacgctggctgtgtgtcccaacaacgatatgaaagagcttgttggatgaagtcttctttagaagaaggcatttctgtgttgaaatctattgagtttttgagctctaaatggaaaaaattaatcccagaggcttctataagtactagtagaagtctgcctgtcagagctctcgatgttctgaagtatgaggaagttgacatggattcattagccaaggctgttccagagcccttgaagaagtatactaaatgtagagagctggctgaaagactgaaaatagaagccacttatgaatcagtgttgttccatcaactacaagaaataaagggagttcagcaagatgaagctctccaactgccaaaagacctagattatttgactatcagggatgtgtctttgtcccatgaagttcgagagaaactacattttagtcgtccacagacgatcggggctgctagtcgcatacccggagtaacacctgccgccatcatcaatctgctgagatttgtgaagaccactcaacgaagacagtcggctatgaatgaatcatccaagactgatcaatacttatgtgatgcagacagacttcaagagagagagttatagctttcaattcataaaagatttttaaagagcatataaataatttgatcaatacaacagtatagataaaagaattatttagcacatgttaaaatagctttattaggttactatgggtttgccattaatttctgagtgggacagaaattataattgtgctttttcgtgtatatgaaaaaactagtcgtaaacaatttgtactctttctttaaggagctgtaatacaaataactttgtgcagtgttcatcaaagagagagacagtgaacctaaaactgaacctggaataaaactcaacatgcagatttgcctactcatagggactttgcctattaagtctaccaaattaaaagtcttatcattcagcgtgttttgagagttaataatcttttgcttggttatactaggctaggaagcaatatcaaagcccttaaattctcaagactaaagacttgagattatataaaattatccagaatcattcagctaatactattggaatatagtatgtagggtgaaagttgacagaaatctgtacttcttcaggaaatcctcactggtaattgttttgaacattaatgaaagccctataaaatagaaagattggaaatcaccattgtttcctattatccacagtgtggatggatacttatttggtgacctagttatgggagaattgagtaacgttagttattttatatcataccataaaaatattttc

SEQ ID NO: 154764 - DNA, 2174 bp, Homo sapiens
  Payload ID: 10422
  Gene Symbol: MTO1
  Gene Name: mitochondrial tRNA translation optimization 1
  Uniprot ID: Q9Y2Z2
  ENST ID: ENST00000370305
  CDS Start-End: 55-1986
cgtgatattaaagcaagatggccgcgccctgcagattgtctcttgttgcgtcagatgtcatgtaatccttcctttggtggcatcggaaagggacatttaatgagggaagtagatgccttggatggcctgtgttctcgcatctgtgaccagtctggtgtacattataaagtattaaaccggcgtaagggaccagctgtgtggggtctgagagctcagattgataggaaactctataaacagaacatgcagaaagaaatcttgaatacaccactgcttactgttcaggagggagctgtagaagatcttattcttacagaaccagagcctgaacacactgggaaatgccgtgtcagtggggttgttttggtggatggaagcacagtatatgcagagagtgtgattctgactactgggacatttctgagaggcatgattgtaattggattggagacgcatccagcaggacgtttaggggatcagccttctataggattggctcagacactggagaagttagggtttgtggtgggaaggttgaagactgggactccaccccgaattgccaaagagtccattaatttcagtattctaaacaagcatataccggacaatccatccataccattcagctttaccaatgagacagtatggattaagccagaagatcagctgccatgttacttgactcacaccaaccctagagtggatgagattgtccttaagaaccttcaccttaatagtcatgttaaagaaacgacaagaggacctcgatactgtccctccattgaatcaaaagttttgcgttttccaaaccgtctacatcaggtttggttggaacctgaaggaatggattctgaccttatctacccacaggggttatctatgacgctaccagctgagttacaagagaaaatgatcacatgcatcagaggcttggagaaagctaaagtgattcagccagacggagttttgctcttgttgcccaggatggagtgcaatggtgcgatctcggctcaccacaacctccccctgccaggctacggtgttcagtatgattacttagatccccgtcagatcaccccttccttggagactcatttggttcaacgactcttctttgctggacagatcaatggcaccactggttatgaggaagctgcagctcaaggtgtgatagccggaatcaacgccagtcttcgggtcagtcgcaagcctccctttgtggttagccgaacagaaggttacataggagtcttgattgatgacctcactactctgggcaccagtgaaccataccgcatgtttaccagccgagtagagttccgtttgtcactgcgccctgataatgctgacagccggctcacactgcgagggtataaagacgctggctgtgtgtcccaacaacgatatgaaagagcttgttggatgaagtcttctttagaagaaggcatttctgtgttgaaatctattgagtttttgagctctaaatggaaaaaattaatcccagaggcttctataagtactagtagaagtctgcctgtcagagctctcgatgttctgaagtatgaggaagttgacatggattcattagccaaggctgttccagagcccttgaagaagtatactaaatgtagagagctggctgaaagactgaaaatagaagccacttatgaatcagtgttgttccatcaactacaagaaataaagggagttcagcaagatgaagctctccaactgccaaaagacctagattatttgactatcagggatgtgtctttgtcccatgaagttcgagagaaactacattttagtcgtccacagacgatcggggctgctagtcgcatacccggagtaacacctgccgccatcatcaatctgctgagatttgtgaagaccactcaacgaagacagtcggctatgaatgaatcatccaagactgatcaatacttatgtgatgcagacagacttcaagagagagagttatagctttcaattcataaaagatttttaaagagcatataaataatttgatcaatacaacagtatagataaaagaattatttagcacatgttaaaatagctttattaggttactatgggtttgccattaatttctgagtgggacagaaattataattgtgctttttcgtgtatatgaaaaaactagtcgtaaa

SEQ ID NO: 154765 - DNA, 521 bp, Homo sapiens
  Payload ID: 10422
  Gene Symbol: MTO1
  Gene Name: mitochondrial tRNA translation optimization 1
  ENST ID: ENST00000442897
  CDS Start-End: 59-415
accccgtgatattaaagcaagatggccgcgccctgcagattgtctcttgttgcgtcagatgtcatgtaatccttcctttggtggcatcggaaagggacatttaatgagggaagtagatgccttggatggcctgtgttctcgcatctgtgaccagtctggtgtacattataaagtattaaaccggcgtaagggaccagctgtgtggggtctgagagctcagattgataggaaactctataaacagaacatgcagaaagaaatcttgaatacaccactgcttactgttcaggagggagctgtagaagatcttattcttacagaaccagagcctgaacacactgggaaatgccgtgtcagtggggttgttttggccagaagatcagctgccatgttacttgactcacaccaaccctagagtggatgagattgtccttaagaaccttcaccttaatagtcatgttaaagaaacgacaagaggacctcgatactgtccctccattgaatcaaaagttttgcgtttt

SEQ ID NO: 154766 - DNA, 2837 bp, Homo sapiens
  Payload ID: 10422
  Gene Symbol: MTO1
  Gene Name: mitochondrial tRNA translation optimization 1
  Uniprot ID: Q9Y2Z2
  ENST ID: ENST00000415954
  CDS Start-End: 278-2476
taaataaataaataaataaaaataaaaaataataataataaaaaaagcccgcacgaactaggaaagaaaatacacaaccggccctccgtgcgatcacccatctccctcaccaggaaagtagctccaaaccgccaatcagcggcgacgctggacgtagacgtcctaccccgtgatattaaagcaagatggccgcgccctgcagattgtctcttgttgcgtaagtttttttgaccgtcactcgtgtcagcttcaaagtcagatagatttttctcccagcatgttctacttccgaggctgtggccgttgggtcgcggtttccttcaccaagcagcaatttccgttggcacggttgagcagtgacagcgcggcgccccggactccgcacttcgacgtgatagtcattggtggaggacatgccgggactgaggcagccaccgccgccgctcggtgcggctctcggactctgctcctcactcaccgcgtggacacgatcggtcagatgtcatgtaatccttcctttggtggcatcggaaagggacatttaatgagggaagtagatgccttggatggcctgtgttctcgcatctgtgaccagtctggtgtacattataaagtattaaaccggcgtaagggaccagctgtgtggggtctgagagctcagattgataggaaactctataaacagaacatgcagaaagaaatcttgaatacaccactgcttactgttcaggagggagctgtagaagatcttattcttacagaaccagagcctgaacacactgggaaatgccgtgtcagtggggttgttttggtggatggaagcacagtatatgcagagagtgtgattctgactactgggacatttctgagaggcatgattgtaattggattggagacgcatccagcaggacgtttaggggatcagccttctataggattggctcagacactggagaagttagggtttgtggtgggaaggttgaagactgggactccaccccgaattgccaaagagtccattaatttcagtattctaaacaagcatataccggacaatccatccataccattcagctttaccaatgagacagtatggattaagccagaagatcagctgccatgttacttgactcacaccaaccctagagtggatgagattgtccttaagaaccttcaccttaatagtcatgttaaagaaacgacaagaggacctcgatactgtccctccattgaatcaaaagttttgcgttttccaaaccgtctacatcaggtttggttggaacctgaaggaatggattctgaccttatctacccacaggggttatctatgacgctaccagctgagttacaagagaaaatgatcacatgcatcagaggcttggagaaagctaaagtgattcagccaggctacggtgttcagtatgattacttagatccccgtcagatcaccccttccttggagactcatttggttcaacgactcttctttgctggacagatcaatggcaccactggttatgaggaagctgcagctcaaacagagtgttgctctgttgccaggctggagtgcagtgatatgatctcccagcttcaagcgatcctcctgcctcagccctccctagtagctgggactgcaggcatgcaccacaacacccagggtgtgatagccggaatcaacgccagtcttcgggtcagtcgcaagcctccctttgtggttagccgaacagaaggttacataggagtcttgattgatgacctcactactctgggcaccagtgaaccataccgcatgtttaccagccgagtagagttccgtttgtcactgcgccctgataatgctgacagccggctcacactgcgagggtataaagacgctggctgtgtgtcccaacaacgatatgaaagagcttgttggatgaagtcttctttagaagaaggcatttctgtgttgaaatctattgagtttttgagctctaaatggaaaaaattaatcccagaggcttctataagtactagtagaagtctgcctgtcagagctctcgatgttctgaagtatgaggaagttgacatggattcattagccaaggctgttccagagcccttgaagaagtatactaaatgtagagagctggctgaaagactgaaaatagaagccacttatgaatcagtgttgttccatcaactacaagaaataaagggagttcagcaagatgaagctctccaactgccaaaagacctagattatttgactatcagggatgtgtctttgtcccatgaagttcgagagaaactacattttagtcgtccacagacgatcggggctgctagtcgcatacccggagtaacacctgccgccatcatcaatctgctgagatttgtgaagaccactcaacgaagacagtcggctatgaatgaatcatccaagactgatcaatacttatgtgatgcagacagacttcaagagagagagttatagctttcaattcataaaagatttttaaagagcatataaataatttgatcaatacaacagtatagataaaagaattatttagcacatgttaaaatagctttattaggttactatgggtttgccattaatttctgagtgggacagaaattataattgtgctttttcgtgtatatgaaaaaactagtcgtaaacaatttgtactctttctttaaggagctgtaatacaaataactttgtgcagtgttcatcaaagagagagacagtgaacctaaaactgaacctggaataaaactcaacatgcagatttgcctactcatagggactttgcctattaagtctaccaaattaaaagtcttatcattca

SEQ ID NO: 154767 - DNA, 665 bp, Homo sapiens
  Payload ID: 10422
  Gene Symbol: MTO1
  Gene Name: mitochondrial tRNA translation optimization 1
  ENST ID: ENST00000445187
  CDS Start-End: 1-297
gaacctgaaggaatggattctgaccttatctacccacaggggttatctatgacgctaccagctgagttacaagagaaaatgatcacatgcatcagaggcttggagaaagctaaagtgattcagccaggctacggtgttcagtatgattacttagatccccgtcagatcaccccttccttggagactcatttggttcaacgactcttctttgctggacagatcaatggcaccactggttatgaggaagctgcagctcaaagtgttgctctgttgccaggctggagtgcagtgatatgatctcccagcttcaagcgatcctcctgcctcagccctccctagtagctgggactgcaggcatgcaccacaacacccagggtgtgatagccggaatcaacgccagtcttcgggtcagtcgcaagcctccctttgtggttagccgaacagaaggttacataggagtcttgattgatgacctcactactctgggcaccagtgaaccataccgcatgtttaccagccgagtagagttccgtttgtcactgcgccctgataatgctgacagccggctcacactgcgagggtataaagacgctggctgtgtgtcccaacaacgatatgaaagagcttgttggatgaagtcttctttagaagaaggcatttctgtg

SEQ ID NO: 154768 - DNA, 2240 bp, Homo sapiens
  Payload ID: 10422
  Gene Symbol: MTO1
  Gene Name: mitochondrial tRNA translation optimization 1
  ENST ID: ENST00000415228
  CDS Start-End: 91-669
ggccgcgccctgcagattgtctcttgttgcgtaagtttttttgaccgtcactcgtgtcagcttcaaagtcagatagatttttctcccagcatgttctacttccgaggctgtggccgttgggtcgcggtttccttcaccaagcagcaatttccgttggcacggttgagcagtgacagcgcggcgccccggactccgcacttcgacgtgatagtcattggtggaggacatgccgggactgaggcagccaccgccgccgctcggtgcggctctcggactctgctcctcactcaccgcgtggacacgatcggtcagatgtcatgtaatccttcctttggtggcatcggaaagggacatttaatgagggaagtagatgccttggatggcctgtgttctcgcatctgtgaccagtctggtgtacattataaagtattaaaccggcgtaagggaccagctgtgtggggtctgagagctcagattgataggaaactctataaacagaacatgcagaaagaaatcttgaatacaccactgcttactgttcaggagggagctgtagaagatcttattcttacagaaccagagcctgaacacactgggaaatgccgtgtcagtggggttgttttggccagaagatcagctgccatgttacttgactcacaccaaccctagagtggatgagattgtccttaagaaccttcaccttaatagtcatgttaaagaaacgacaagaggacctcgatactgtccctccattgaatcaaaagttttgcgttttccaaaccgtctacatcaggtttggttggaacctgaaggaatggattctgaccttatctacccacaggggttatctatgacgctaccagctgagttacaagagaaaatgatcacatgcatcagaggcttggagaaagctaaagtgattcagccaggctacggtgttcagtatgattacttagatccccgtcagatcaccccttccttggagactcatttggttcaacgactcttctttgctggacagatcaatggcaccactggttatgaggaagctgcagctcaaggtgtgatagccggaatcaacgccagtcttcgggtcagtcgcaagcctccctttgtggttagccgaacagaaggttacataggagtcttgattgatgacctcactactctgggcaccagtgaaccataccgcatgtttaccagccgagtagagttccgtttgtcactgcgccctgataatgctgacagccggctcacactgcgagggtataaagacgctggctgtgtgtcccaacaacgatatgaaagagcttgttggatgaagtcttctttagaagaaggcatttctgtgttgaaatctattgagtttttgagctctaaatggaaaaaattaatcccagaggcttctataagtactagtagaagtctgcctgtcagagctctcgatgttctgaagtatgaggaagttgacatggattcattagccaaggctgttccagagcccttgaagaagtatactaaatgtagagagctggctgaaagactgaaaatagaagccacttatgaatcagtgttgttccatcaactacaagaaataaagggagttcagcaagatgaagctctccaactgccaaaagacctagattatttgactatcagggatgtgtctttgtcccatgaagttcgagagaaactacattttagtcgtccacagacgatcggggctgctagtcgcatacccggagtaacacctgccgccatcatcaatctgctgagatttgtgaagaccactcaacgaagacagtcggctatgaatgaatcatccaagactgatcaatacttatgtgatgcagacagacttcaagagagagagttatagctttcaattcataaaagatttttaaagagcatataaataatttgatcaatacaacagtatagataaaagaattatttagcacatgttaaaatagctttattaggttactatgggtttgccattaatttctgagtgggacagaaattataattgtgctttttcgtgtatatgaaaaaactagtcgtaaacaatttgtactctttctttaaggagctgtaatacaaataactttgtgcagtgttcatcaaagagagagacagtgaacctaaaactgaacctggaataaaactcaacatgcagatttgcctactcatagggactttgcctattaagtctaccaaattaaaagtcttatcattca

SEQ ID NO: 154769 - DNA, 10857 bp, Homo sapiens
  Payload ID: 10422
  Gene Symbol: MTO1
  Gene Name: mitochondrial tRNA translation optimization 1
  Uniprot ID: Q9Y2Z2
  ENST ID: ENST00000498286
  CDS Start-End: 278-2356
taaataaataaataaataaaaataaaaaataataataataaaaaaagcccgcacgaactaggaaagaaaatacacaaccggccctccgtgcgatcacccatctccctcaccaggaaagtagctccaaaccgccaatcagcggcgacgctggacgtagacgtcctaccccgtgatattaaagcaagatggccgcgccctgcagattgtctcttgttgcgtaagtttttttgaccgtcactcgtgtcagcttcaaagtcagatagatttttctcccagcatgttctacttccgaggctgtggccgttgggtcgcggtttccttcaccaagcagcaatttccgttggcacggttgagcagtgacagcgcggcgccccggactccgcacttcgacgtgatagtcattggtggaggacatgccgggactgaggcagccaccgccgccgctcggtgcggctctcggactctgctcctcactcaccgcgtggacacgatcggtcagatgtcatgtaatccttcctttggtggcatcggaaagggacatttaatgagggaagtagatgccttggatggcctgtgttctcgcatctgtgaccagtctggtgtacattataaagtattaaaccggcgtaagggaccagctgtgtggggtctgagagctcagattgataggaaactctataaacagaacatgcagaaagaaatcttgaatacaccactgcttactgttcaggagggagctgtagaagatcttattcttacagaaccagagcctgaacacactgggaaatgccgtgtcagtggggttgttttggtggatggaagcacagtatatgcagagagtgtgattctgactactgggacatttctgagaggcatgattgtaattggattggagacgcatccagcaggacgtttaggggatcagccttctataggattggctcagacactggagaagttagggtttgtggtgggaaggttgaagactgggactccaccccgaattgccaaagagtccattaatttcagtattctaaacaagcatataccggacaatccatccataccattcagctttaccaatgagacagtatggattaagccagaagatcagctgccatgttacttgactcacaccaaccctagagtggatgagattgtccttaagaaccttcaccttaatagtcatgttaaagaaacgacaagaggacctcgatactgtccctccattgaatcaaaagttttgcgttttccaaaccgtctacatcaggtttggttggaacctgaaggaatggattctgaccttatctacccacaggggttatctatgacgctaccagctgagttacaagagaaaatgatcacatgcatcagaggcttggagaaagctaaagtgattcagccaggctacggtgttcagtatgattacttagatccccgtcagatcaccccttccttggagactcatttggttcaacgactcttctttgctggacagatcaatggcaccactggttatgaggaagctgcagctcaaggtgtgatagccggaatcaacgccagtcttcgggtcagtcgcaagcctccctttgtggttagccgaacagaaggttacataggagtcttgattgatgacctcactactctgggcaccagtgaaccataccgcatgtttaccagccgagtagagttccgtttgtcactgcgccctgataatgctgacagccggctcacactgcgagggtataaagacgctggctgtgtgtcccaacaacgatatgaaagagcttgttggatgaagtcttctttagaagaaggcatttctgtgttgaaatctattgagtttttgagctctaaatggaaaaaattaatcccagaggcttctataagtactagtagaagtctgcctgtcagagctctcgatgttctgaagtatgaggaagttgacatggattcattagccaaggctgttccagagcccttgaagaagtatactaaatgtagagagctggctgaaagactgaaaatagaagccacttatgaatcagtgttgttccatcaactacaagaaataaagggagttcagcaagatgaagctctccaactgccaaaagacctagattatttgactatcagggatgtgtctttgtcccatgaagttcgagagaaactacattttagtcgtccacagacgatcggggctgctagtcgcatacccggagtaacacctgccgccatcatcaatctgctgagatttgtgaagaccactcaacgaagacagtcggctatgaatgaatcatccaagactgatcaatacttatgtgatgcagacagacttcaagagagagagttatagctttcaattcataaaagatttttaaagagcatataaataatttgatcaatacaacagtatagataaaagaattatttagcacatgttaaaatagctttattaggttactatgggtttgccattaatttctgagtgggacagaaattataattgtgctttttcgtgtatatgaaaaaactagtcgtaaacaatttgtactctttctttaaggagctgtaatacaaataactttgtgcagtgttcatcaaagagagagacagtgaacctaaaactgaacctggaataaaactcaacatgcagatttgcctactcatagggactttgcctattaagtctaccaaattaaaagtcttatcattcagcgtgttttgagagttaataatcttttgcttggttatactaggctaggaagcaatatcaaagcccttaaattctcaagactaaagacttgagattatataaaattatccagaatcattcagctaatactattggaatatagtatgtagggtgaaagttgacagaaatctgtacttcttcaggaaatcctcactggtaattgttttgaacattaatgaaagccctataaaatagaaagattggaaatcaccattgtttcctattatccacagtgtggatggatacttatttggtgacctagttatgggagaattgagtaacgttagttattttatatcataccataaaaatattttcttaagaaattgtcatggccatcatttcttaataatgaagacaggtccatagtaactggtgagtggtgtttccctgtttttaagtcagaatgacagaaaaaacagaatagtggtagtacccctcttcctctccagtacttcaatggtatgtcttcacaggggttagagtgggataatcagctgggccttttgactcagatacctcagatacctcaaccattctaaatagactaagggatgaatacagccaaatgggccagacagccctgcttgtctctggaattccaacccagatctctggtgtcagcctagggagaagctcccgtgtcaccttcgggccaaagcaggtactcaggagagttctaagggccccaaagtcactttggctacagatgtgtatgttaagcctgattatgggtgtgaggcaaccaagtatcttgttactataattgcatatggccacttggaggtagcttagttttcttgggtttattttatctaattttagtctttccagaaagcagtaagattagtagcaagtaaaaagtatttgtagtgctggataatttaggaatgatgaatattttttaatacttgattcagtgatttcaaaaggtcgtaacttttagtcatagctactcctgggcaaaattcttcttacagagacaatattaattacaataccacattgtgtatatattttgaaaagaggctggttgcagcagctcacgcctgtaatcccagcactttgggaggctgaggcgggtggataacctgaagtcaggagttcaagaccagcctggccaacatggcaaaaccccatctccactaaaaataccaaaattagccaggcgtggtggagcaagcctgtagtcccagctactcaggaggctgaggcaggagaatcgcttgaacccaggaggcagaggttgcagtgagctgagattgtgccactgcactccagcctgggcgacagagtgagactgtttcaaaaaaaagaaaaagaaaagaaggtattttgtgtttttgtgctacccgttcagcaaaataatgaaattcattgtttctaaacttttttttctgattaaatacaagagtaaaaaaagtgaatggagtgccttttgaatagaatataacaaaaatttatcttaaagaaacgggaagtaacctggcacagtggctcacgcctgtaatcccagcactttgggaggctgaggcaggtggatcacgaggtcaggagatcgagaccatcctgcccaacatggtgaaaccccatctctactaaaaatacaaaaattagctaggtgtgttggcacgtgcctgtagtcccaactactcaggaggctgaggcaagagaatcacttgaactcaggaggcagaggttgcagtgagccaagatcatgccactgcactccagcctggcaacagagtgagactctgtctcaaaaaaaaaaaaagaaacaggaagttcaaatattttgggaggttcttgacagctacaatttggggctagtgacactatacacatataaagaaactttaaagtttcttagtaatgaaggtttgtaatgctattccattacaatagtaactgtctcactgaaaaatgtttcatggaaaatacatattttagattctatgatttgctttaggatgtgaacttctttattttttagagacagggtctcactctgttgcccaggctgtagtgcagtggtacaatcatagctcactgcagccttgatctcctgggctcaagtgatccttatgcctcagcctcccaagtggctgggactacaggcacatgccaccatgcctggctaagttttaaaaaaattttttgtaggaatgaagtctcactatgttgcccaggctggtcttgaacttctggcctcaaatgatcctcttgccttggcctcccaaagtgctcagattacaggcatgagccaccacacgtggcctgaaacctctttaaatccacaatgtttgtatgttaacttaaacaaaattacatcacttaatatgtcaaaacagcctaccctctggtgctgctatgcagaagtactacagaatatgatgccctaggaagaaatcagctaaaaatgtaaccttactcaatgtagttacttcatagaaatcccatcactgacaataatcagctgccaacgaaagctggccatacttgtgacttcctctattcaccacagaccagactgcctaccagttgaaaaagccaggtattttttcaattcaattcaacaggaacaccaaaaaataagaaatgactaagaaacactaagcatttgtaaaattactgggggaggaaggatgaagatacgaacctatgctaaattaaacgattatggccttgaaaatgaagttcctttatagccaagagcttaaattttgttactgatggttttaaaagtattttgtcattttttagtttcaacctagattggaatagccatggcttttctacttcagaaatttcaactcctagaagaatgccctgtccagaagaagtggtcaggagtatcaggaaagccaccagcagagactaggggtttattctgatctggaagagccacttaacactggaatgcacacagtgaaaattaattgttcctcttacactccctctccacaatacttctattattacacttacttcgttctaccttaatgtttttatttagagacaagatctcactctgccaccctggctggagtgcagtggcatgattacagctcactgcagcctcaacctccctggctctagctattctcccatctcagccctccaagtagctgggactacaggtgtgcaccaccatgcacggctaatttttaagtttttgtagatatggggtcttactatgttgcccaggctggtctcaaagtcctgggctcaattaatcctccctcttcagcctcctgtgtaggtgatagtacaggcatgagccaccatgtgcctggccctaccttaatgttaatatctgtctaccttaagaagatataagccttgtaaatataagcaatatcacagttgtagatactcgtgctttttaaatagattaatgaatactactaaaggcaagaaatggtattactaaaactcaagtgaataattaaatgagatcaaaatatttgtgacaggccaggcacggtggcttacgcctgtaatcccagcactttgggaggccaggcggatcacttgagctcagcagttcaagaccagcctgggcaacatggcgaaactccgtctttaccaaaaatacaaaaataagccaagcatggtggcacgtacctgttgttccagcaacttgggggctgaggcaggagaatcacttgagccggggagtttgaggctgcagtgagttgatagcatgccaccacactccagcctgggcaacagagtgagaccctgcctgaaaaaaagcccaggtgtggtggctcacatctgtaatcccagcattttgggattacaaatctgccagcgcaagcagatcacttgaggataggagtttgagaccagcctgaccaacatgttgaaaccccatctcttattaaaatacaaaaattagctgggcgtggtggcatgcgcctgtaatccgagctactcaggtggctgaggcacaagaatcgcttgaacctgggagatggaagttgcaatgagctgagatcaagccactgcactccagcctgggcaacagagcaagactgtctcaaaaaaaaaaaatttgtacagtcatgttcaaagtagcattaattcacaatagccaaaagctggaagtagcccaagtatccaccaatgaatgaaaggataaacaaaatgtggcatatacatacaatggaatattatacagccttaaaaaggaaggaaattcatatacatgctacagcatggataaaccttgaaaaagttatgctaactgaaatcagccagtcacaaaaagacaaatactgtatgattccctttataagagttacctggagcactcaaattcatagagacagtaaaatgatggttaccaggggatgggggagggagaaacaggaaactattctttagtgagtacagaatttcagtttttttgttttgtttttgtttttgtttttgagatggagcctcacactgtcacccaggctggagtgcaatggtgtgatcttggttcactgcaacctctgcctcctaggttcaaatgattcttctgcctcagtctcctgagtctgggattacaggcgcctgccatcatgcccagctaatttttgtatttttaatagagacagggtttcacaggttggccaagctagtctcgaactcctgacctcatgatccgcccacctcgacctcccaaagtgctgggattacaggggtgagccaccatgcccagtccagaatttcaagttttgcaagatgaaaagagttctggagatggttgatggtgatggttgcacaacaatttgaatattttaaatgccaatgaactgttcatttacaaatggttacgatggaatttttctttttcttttttttttcttgagacggagtctcgctctgtcactcaggctagagtgcagtggcactatctcggctcactgcaacctcctcctgctgggttaaagtgattctcttgcctcagcctcccgagcagctgagactacaggcgcgtgccaccatgctcagctaattttttctatttttagtggagacagggtttcaccatgttagccagatggtctcgatctcctgacctcgtgatccacctccctcagcctctcaaagtgctgggattacaggcatgagccaccgtgcacagccaagatggaaatttttatgttctttgtttgatatggtttggctgtgtccccacccaaatctcaacttgaactgtatctctcagaattcccacatgttgtgggagggacccacagggaggtaattgaatcacaagggccggtttttaccatgctttcttgtgatagtgaataagtctcacaagatctgatgggtttatcaggggtttccgattttgcttcttcctcattttctcttgccactcccatgtaagaagtgcctttcgcctcccgccaagattctgaggcttcctcagccatgtggaactttggggacgaaaagaggtttaattggacttaaagttccaattaaagtttcaggtatgtctttatcagcagcatgaaaatgaactaatacagtgttttatcactttttttttttttttttttttttgagatggagtttcgctcttgttgcccaggctggagtgcaatggcgcaacatcaggtcactgcaaactctgcctcccgggttcaagcgattctcttgcctcagcctcctgagtagctgggattacaggcttgtgccaccacacccggctaatttttgtatttttagtagagacagagtttcaccatgttggccaggctagtcttgaactcctgacctcaggtgatccacccaccttggcttcccaaagtgggtggatgacctctgggattacaggcgtgcgccaccgcgctcggtctatattcaccaattttaagatgcacatctttccatattttagtatctctaagttggagtatgtcttacaattaatggcatctgacagttataactggcagcatttgtgactgaaaaacatcttagatgcaatgaaatacagtgtgtgtgtttgtattgtgctgcaatataaaatgtatttcaggccaggtatggtggttcacacctgtaatcccagcactttggaaggccaaagtgggaggatcacttgagcccaggagttcaaggctgcagtgagctctgattataccactgtactccagcctaggcaacagagcaagacccagtctctaaaaaataaatgaaaatgtttcttattgtggatcacagtcaaaagtttgaaaaaacacaatctgtttgaacagcactactttctgacaggaaaaccccaacaggttaggatctgtgtattcctcagagtaagaatttttctaaaaagtttttaaaaacttaaagtcttactgatctcttcctatgctccaattttatagatataacttagccttgcgaggtgatgtaattaaagtctaacttcaagttgctgttgagcatagatctcaggtcttctgacttcacaacacctttctgccactttcagtggatttttccctcctagggaccagaggtcctctactggattaaaagtttctccatcccggcagggtgcggtggctcacgcctgtaatcccaacactttgggaggccaaggcgggcggatcacgaggtcaggaaatagagaccatcctggctaacatggtgaaaccccgtgtctactaaaaatacgaaaaattagccgggtgtggtggtgcgcgcctgtagtcccagctactcgggaggctgaggcaggagaatggcgtgaagccaggaggcggagcttgcaatgagccgagatcgcgccactgcactctagcctgggcgacaaagcgagactctgtctcaaaaaaaaaaaaaaaaaaaaaaaattctccatcccttttgaacaatctggaagtctgtttctcttaaccttcagttcccattccaatcctttgtaacctatttcaggttaagcatttatggaggtgccatgcttaattagccattatggcactcactctatttcaaaggttatcccagaatttggaggctgtaggggaattcagagtgtgaatttcacttgaacagcaccctctgcagacttaaaatattcctcctatatctgaagacaataataatttcttagaatttgctaggctaaacaactattttttagtccagtggcttgtaattaagtcatttttagtctttaattatgttggttgcttttagaattctcttttagagttggtctacatccttttaaaacatgggcaatccaaatttataacagtaaattaagatacataaaaaaaaacactggctaaatttaaaaggaaacacttctagaatatactgtattttgacacaagaccagactgtgctatgtgtatgtggtgtttcaagtaatttaagaaaactgttggaattttctgtatttccagtttcacaagaaacaacctcaaggagggcagtttaactgaaaattcagaggtattatagctctgaagaaaaatactgatgagcagttatacaaaatgagaaattgagttctaagaaatgcatccctaacttcaacataaagatagctatgagaaaacattctttgtacccaaccataaatgaataaaaatcacctcatttctcatcagatgtttactgggttgctagttatatatagaatcctgcaagaggctcaacagggaagtccaaagagtcaatcaagaaggtatgataatggctaaagatggggactgtaggtcaatgctccacgaggttcttcttttgttgcaccaatatagctgcactgttatacccatatggttacaatccaggcctcagaaaatgttgcagatgccctcaccagaaggctgagaaccagttcctcagtttgcatgcctccagacagcactagaagtcaaactcaaattgcttacatggtaacttggtttatcccaacaccaactaggatattccctcaatcacatgattgtactgaaaatataaccaagttttatttatgtttttcatttggtattagccatctggtatttaacctctgaaaaccacacaatcttctatacgcttttttcactggaataaatgaaactgcttacttttga

SEQ ID NO: 154770 - DNA, 574 bp, Homo sapiens
  Payload ID: 10422
  Gene Symbol: MTO1
  Gene Name: mitochondrial tRNA translation optimization 1
  ENST ID: ENST00000521032
  CDS Start-End: 54-386
gtgatattaaagcaagatggccgcgccctgcagattgtctcttgttgcgtcagatgtcatgtaatccttcctttggtggcatcggaaagggacatttaatgagggaagtagatgccttggatggcctgtgttctcgcatctgtgaccagtctggtgtacattataaagtattaaaccggcgtaagggaccagctgtgtggggtctgagagctcagattgataggaaactctataaacagaacatgcagaaagaaatcttgaatacaccactgcttactgttcaggagggagctgtagaagatcttattcttacagaaccagagcctgaacacactgggaaatgccgtgtcagtggggttgttttgggctggagtgcagtggcatgatcacagctcgctgtagcctcgaccacctggacccaagtgatcttcctgcctcagcctcctgtgtagctgggaccacagtggatggaagcacagtatatgcagagagtgtgattctgactactgggacatttctgagaggcatgattgtaattggattggagacgcatccagcaggacgtttaggggat

SEQ ID NO: 154771 - DNA, 886 bp, Homo sapiens
  Payload ID: 10422
  Gene Symbol: MTO1
  Gene Name: mitochondrial tRNA translation optimization 1
  ENST ID: ENST00000521156
  CDS Start-End: 1-435
tacataggagtcttgattgatgacctcactactctgggcaccagtgaaccataccgcatgtttaccagccgagtagagttccgtttgtcactgcgccctgataatgctgacagccggctcacactgcgagggtataaagacgctggctgtgtgtcccaacaacgatatgaaagagcttgttggatgaagtcttctttagaagaaggcatttctgtgttgaaatctattgagtttttgagctctaaatggaaaaaattaatcccagaggcttctataagtactagtagaagtctgcctgtcagagctctcgatgttctgaagtatgaggaagttgacatggattcattagccaaggctgttccagagcccttgaagaagtatactaaatgtagagagctggctgaaagactgaaaatagaagatcggggctgctagtcgcatacccggagtaacacctgccgccatcatcaatctgctgagatttgtgaagaccactcaacgaagacagtcggctatgaatgaatcatccaagactgatcaatacttatgtgatgcagacagacttcaagagagagagttatagctttcaattcataaaagatttttaaagagcatataaataatttgatcaatacaacagtatagataaaagaattatttagcacatgttaaaatagctttattaggttactatgggtttgccattaatttctgagtgggacagaaattataattgtgctttttcgtgtatatgaaaaaactagtcgtaaacaatttgtactctttctttaaggagctgtaatacaaataactttgtgcagtgttcatcaaagagagagacagtgaacctaaaactgaacctggaataaaactcaacatgcagatt

SEQ ID NO: 154772 - DNA, 882 bp, Homo sapiens
  Payload ID: 10422
  Gene Symbol: MTO1
  Gene Name: mitochondrial tRNA translation optimization 1
  ENST ID: ENST00000522205
  CDS Start-End: 78-365
agattgtctcttgttgcgtaagtttttttgaccgtcactcgtgtcagcttcaaagtcagatagatttttctcccagcatgttctacttccgaggctgtggccgttgggtcgcggtttccttcaccaagcagcaatttccgttggcacggttgagcagtgacagcgcggcgccccggactccgcacttcgacgtgatagtcattggtggaggacatgccgggactgaggcagccaccgccgccgctcggtgcggctctcggactctgctcctcactcaccgcgtggacacgatcggtgaggagcgcgggtgctgtggaacttggcgtaggacgcaggctgcttccttcccgcctcccccggtctgaagcgggggacctcttcctttcctcaaagctagtcagatgtcatgtaatccttcctttggtggcatcggaaagggacatttaatgagggaagtagatgccttggatggcctgtgttctcgcatctgtgaccagtctggtgtacattataaagtattaaaccggcgtaagggaccagctgtgtggggtctgagagctcagattgataggaaactctataaacagaacatgcagaaagaaatcttgaatacaccactgcttactgttcaggagggagctgtagaagatcttattcttacagaaccagagcctgaacacactgggaaatgccgtgtcagtggggttgttttggtggatggaagcacagtatatgcagagagtgtgattctgactactgggacatttctgagaggcatgattgtaattggattggagacgcatccagcaggacgtttaggggatcagccttctataggattggctcagacactggagaagttagggtttgtggtgggaaggt

SEQ ID NO: 154773 - DNA, 696 bp, Homo sapiens
  Payload ID: 10422
  Gene Symbol: MTO1
  Gene Name: mitochondrial tRNA translation optimization 1
  ENST ID: ENST00000523763
  CDS Start-End: 1-346
tgatgacctcactactctgggcaccagtgaaccataccgcatgtttaccagccgagtagagttccgtttgtcactgcgccctgataatgctgacagccggctcacactgcgagggtataaagacgctggctgtgtgtcccaacaacgatatgaaagagcttgttggatgaagtcttctttagaagaaggcatttctgtgttgaaatctattgagtttttgagctctaaatggaaaaaattaatcccagaggcttctataagtactagtagaagtctgcctgtcaggcgtggtggcagacatcttaatcccagctacttgggaggcagaggcaggagaatcgtttgaacctgggaagcggaggttgcagtgagccgagatcaagccattgcacccaaacctgagggacaagagtgagacttctctcaaaaaaaaagaaaagactcatacaagctctcgatgttctgaagtatgaggaagttgacatggattcattagccaaggctgttccagagcccttgaagaagtatactaaatgtagagagctggctgaaagactgaaaatagaagatcggggctgctagtcgcatacccggagtaacacctgccgccatcatcaatctgctgagatttgtgaagaccactcaacgaagacagtcggctatgaatgaatcatccaagactgatcaatacttatg

SEQ ID NO: 154774 - DNA, 467 bp, Homo sapiens
  Payload ID: 10422
  Gene Symbol: MTO1
  Gene Name: mitochondrial tRNA translation optimization 1
  ENST ID: ENST00000524046
  CDS Start-End: 1-260
gagttttgctcttgttgcccaggatggagtgcaatggtgcgatctcggctcaccacaacctccccctgccaggctacggtgttcagtatgattacttagatccccgtcagatcaccccttccttggagactcatttggttcaacgactcttctttgctggacagatcaatggcaccactggttatgaggaagctgcagctcaaggtataaagacgctggctgtgtgtcccaacaacgatatgaaagagcttgttggatgaagtcttctttagaagaaggcatttctgtgttgaaatctattgagtttttgagctctaaatggaaaaaattaatcccagaggcttctataagtactagtagaagtctgcctgtcagagctctcgatgttctgaagtatgaggaagttgacatggattcattagccaaggctgttccagagcccttgaagaagtatactaaatgtagag

SEQ ID NO: 154775 - DNA, 681 bp, Homo sapiens
  Payload ID: 10423
  Gene Symbol: MT-ATP6
  Gene Name: mitochondrially encoded ATP synthase 6
  Uniprot ID: P00846
  ENST ID: ENST00000361899
  CDS Start-End: 1-681
atgaacgaaaatctgttcgcttcattcattgcccccacaatcctaggcctacccgccgcagtactgatcattctatttccccctctattgatccccacctccaaatatctcatcaacaaccgactaatcaccacccaacaatgactaatcaaactaacctcaaaacaaatgataaccatacacaacactaaaggacgaacctgatctcttatactagtatccttaatcatttttattgccacaactaacctcctcggactcctgcctcactcatttacaccaaccacccaactatctataaacctagccatggccatccccttatgagcgggcacagtgattataggctttcgctctaagattaaaaatgccctagcccacttcttaccacaaggcacacctacaccccttatccccatactagttattatcgaaaccatcagcctactcattcaaccaatagccctggccgtacgcctaaccgctaacattactgcaggccacctactcatgcacctaattggaagcgccaccctagcaatatcaaccattaaccttccctctacacttatcatcttcacaattctaattctactgactatcctagaaatcgctgtcgccttaatccaagcctacgttttcacacttctagtaagcctctacctgcacgacaacacataa

SEQ ID NO: 154776 - DNA, 207 bp, Homo sapiens
  Payload ID: 10424
  Gene Symbol: MT-ATP8
  Gene Name: mitochondrially encoded ATP synthase 8
  Uniprot ID: P03928
  ENST ID: ENST00000361851
  CDS Start-End: 1-207
atgccccaactaaatactaccgtatggcccaccataattacccccatactccttacactattcctcatcacccaactaaaaatattaaacacaaactaccacctacctccctcaccaaagcccataaaaataaaaaattataacaaaccctgagaaccaaaatgaacgaaaatctgttcgcttcattcattgcccccacaatcctag

SEQ ID NO: 154777 - DNA, 1141 bp, Homo sapiens
  Payload ID: 10425
  Gene Symbol: MT-CYB
  Gene Name: mitochondrially encoded cytochrome b
  Uniprot ID: P00156
  ENST ID: ENST00000361789
  CDS Start-End: 1-1141
atgaccccaatacgcaaaactaaccccctaataaaattaattaaccactcattcatcgacctccccaccccatccaacatctccgcatgatgaaacttcggctcactccttggcgcctgcctgatcctccaaatcaccacaggactattcctagccatgcactactcaccagacgcctcaaccgccttttcatcaatcgcccacatcactcgagacgtaaattatggctgaatcatccgctaccttcacgccaatggcgcctcaatattctttatctgcctcttcctacacatcgggcgaggcctatattacggatcatttctctactcagaaacctgaaacatcggcattatcctcctgcttgcaactatagcaacagccttcataggctatgtcctcccgtgaggccaaatatcattctgaggggccacagtaattacaaacttactatccgccatcccatacattgggacagacctagttcaatgaatctgaggaggctactcagtagacagtcccaccctcacacgattctttacctttcacttcatcttgcccttcattattgcagccctagcaacactccacctcctattcttgcacgaaacgggatcaaacaaccccctaggaatcacctcccattccgataaaatcaccttccacccttactacacaatcaaagacgccctcggcttacttctcttccttctctccttaatgacattaacactattctcaccagacctcctaggcgacccagacaattataccctagccaaccccttaaacacccctccccacatcaagcccgaatgatatttcctattcgcctacacaattctccgatccgtccctaacaaactaggaggcgtccttgccctattactatccatcctcatcctagcaataatccccatcctccatatatccaaacaacaaagcataatatttcgcccactaagccaatcactttattgactcctagccgcagacctcctcattctaacctgaatcggaggacaaccagtaagctacccttttaccatcattggacaagtagcatccgtactatacttcacaacaatcctaatcctaataccaactatctccctaattgaaaacaaaatactcaaatgggcct

SEQ ID NO: 154778 - DNA, 1542 bp, Homo sapiens
  Payload ID: 10426
  Gene Symbol: MT-CO1
  Gene Name: mitochondrially encoded cytochrome c oxidase I
  Uniprot ID: P00395
  ENST ID: ENST00000361624
  CDS Start-End: 1-1542
atgttcgccgaccgttgactattctctacaaaccacaaagacattggaacactatacctattattcggcgcatgagctggagtcctaggcacagctctaagcctccttattcgagccgagctgggccagccaggcaaccttctaggtaacgaccacatctacaacgttatcgtcacagcccatgcatttgtaataatcttcttcatagtaatacccatcataatcggaggctttggcaactgactagttcccctaataatcggtgcccccgatatggcgtttccccgcataaacaacataagcttctgactcttacctccctctctcctactcctgctcgcatctgctatagtggaggccggagcaggaacaggttgaacagtctaccctcccttagcagggaactactcccaccctggagcctccgtagacctaaccatcttctccttacacctagcaggtgtctcctctatcttaggggccatcaatttcatcacaacaattatcaatataaaaccccctgccataacccaataccaaacgcccctcttcgtctgatccgtcctaatcacagcagtcctacttctcctatctctcccagtcctagctgctggcatcactatactactaacagaccgcaacctcaacaccaccttcttcgaccccgccggaggaggagaccccattctataccaacacctattctgatttttcggtcaccctgaagtttatattcttatcctaccaggcttcggaataatctcccatattgtaacttactactccggaaaaaaagaaccatttggatacataggtatggtctgagctatgatatcaattggcttcctagggtttatcgtgtgagcacaccatatatttacagtaggaatagacgtagacacacgagcatatttcacctccgctaccataatcatcgctatccccaccggcgtcaaagtatttagctgactcgccacactccacggaagcaatatgaaatgatctgctgcagtgctctgagccctaggattcatctttcttttcaccgtaggtggcctgactggcattgtattagcaaactcatcactagacatcgtactacacgacacgtactacgttgtagcccacttccactatgtcctatcaataggagctgtatttgccatcataggaggcttcattcactgatttcccctattctcaggctacaccctagaccaaacctacgccaaaatccatttcactatcatattcatcggcgtaaatctaactttcttcccacaacactttctcggcctatccggaatgccccgacgttactcggactaccccgatgcatacaccacatgaaacatcctatcatctgtaggctcattcatttctctaacagcagtaatattaataattttcatgatttgagaagccttcgcttcgaagcgaaaagtcctaatagtagaagaaccctccataaacctggagtgactatatggatgccccccaccctaccacacattcgaagaacccgtatacataaaatctaga

SEQ ID NO: 154779 - DNA, 684 bp, Homo sapiens
  Payload ID: 10427
  Gene Symbol: MT-CO2
  Gene Name: mitochondrially encoded cytochrome c oxidase II
  Uniprot ID: P00403
  ENST ID: ENST00000361739
  CDS Start-End: 1-684
atggcacatgcagcgcaagtaggtctacaagacgctacttcccctatcatagaagagcttatcacctttcatgatcacgccctcataatcattttccttatctgcttcctagtcctgtatgcccttttcctaacactcacaacaaaactaactaatactaacatctcagacgctcaggaaatagaaaccgtctgaactatcctgcccgccatcatcctagtcctcatcgccctcccatccctacgcatcctttacataacagacgaggtcaacgatccctcccttaccatcaaatcaattggccaccaatggtactgaacctacgagtacaccgactacggcggactaatcttcaactcctacatacttcccccattattcctagaaccaggcgacctgcgactccttgacgttgacaatcgagtagtactcccgattgaagcccccattcgtataataattacatcacaagacgtcttgcactcatgagctgtccccacattaggcttaaaaacagatgcaattcccggacgtctaaaccaaaccactttcaccgctacacgaccgggggtatactacggtcaatgctctgaaatctgtggagcaaaccacagtttcatgcccatcgtcctagaattaattcccctaaaaatctttgaaatagggcccgtatttaccctatag

SEQ ID NO: 154780 - DNA, 784 bp, Homo sapiens
  Payload ID: 10428
  Gene Symbol: MT-CO3
  Gene Name: mitochondrially encoded cytochrome c oxidase III
  Uniprot ID: P00414
  ENST ID: ENST00000362079
  CDS Start-End: 1-784
atgacccaccaatcacatgcctatcatatagtaaaacccagcccatgacccctaacaggggccctctcagccctcctaatgacctccggcctagccatgtgatttcacttccactccataacgctcctcatactaggcctactaaccaacacactaaccatataccaatgatggcgcgatgtaacacgagaaagcacataccaaggccaccacacaccacctgtccaaaaaggccttcgatacgggataatcctatttattacctcagaagtttttttcttcgcaggatttttctgagccttttaccactccagcctagcccctaccccccaattaggagggcactggcccccaacaggcatcaccccgctaaatcccctagaagtcccactcctaaacacatccgtattactcgcatcaggagtatcaatcacctgagctcaccatagtctaatagaaaacaaccgaaaccaaataattcaagcactgcttattacaattttactgggtctctattttaccctcctacaagcctcagagtacttcgagtctcccttcaccatttccgacggcatctacggctcaacattttttgtagccacaggcttccacggacttcacgtcattattggctcaactttcctcactatctgcttcatccgccaactaatatttcactttacatccaaacatcactttggcttcgaagccgccgcctgatactggcattttgtagatgtggtttgactatttctgtatgtctccatctattgatgagggtctt

SEQ ID NO: 154781 - DNA, 956 bp, Homo sapiens
  Payload ID: 10429
  Gene Symbol: MT-ND1
  Gene Name: mitochondrially encoded NADH dehydrogenase 1
  Uniprot ID: P03886
  ENST ID: ENST00000361390
  CDS Start-End: 1-956
atacccatggccaacctcctactcctcattgtacccattctaatcgcaatggcattcctaatgcttaccgaacgaaaaattctaggctatatacaactacgcaaaggccccaacgttgtaggcccctacgggctactacaacccttcgctgacgccataaaactcttcaccaaagagcccctaaaacccgccacatctaccatcaccctctacatcaccgccccgaccttagctctcaccatcgctcttctactatgaacccccctccccatacccaaccccctggtcaacctcaacctaggcctcctatttattctagccacctctagcctagccgtttactcaatcctctgatcagggtgagcatcaaactcaaactacgccctgatcggcgcactgcgagcagtagcccaaacaatctcatatgaagtcaccctagccatcattctactatcaacattactaataagtggctcctttaacctctccacccttatcacaacacaagaacacctctgattactcctgccatcatgacccttggccataatatgatttatctccacactagcagagaccaaccgaacccccttcgaccttgccgaaggggagtccgaactagtctcaggcttcaacatcgaatacgccgcaggccccttcgccctattcttcatagccgaatacacaaacattattataataaacaccctcaccactacaatcttcctaggaacaacatatgacgcactctcccctgaactctacacaacatattttgtcaccaagaccctacttctaacctccctgttcttatgaattcgaacagcatacccccgattccgctacgaccaactcatacacctcctatgaaaaaacttcctaccactcaccctagcattacttatatgatatgtctccatacccattacaatctccagcattccccctcaaaccta

SEQ ID NO: 154782 - DNA, 1042 bp, Homo sapiens
  Payload ID: 10430
  Gene Symbol: MT-ND2
  Gene Name: mitochondrially encoded NADH dehydrogenase 2
  Uniprot ID: P03891
  ENST ID: ENST00000361453
  CDS Start-End: 1-1042
attaatcccctggcccaacccgtcatctactctaccatctttgcaggcacactcatcacagcgctaagctcgcactgattttttacctgagtaggcctagaaataaacatgctagcttttattccagttctaaccaaaaaaataaaccctcgttccacagaagctgccatcaagtatttcctcacgcaagcaaccgcatccataatccttctaatagctatcctcttcaacaatatactctccggacaatgaaccataaccaatactaccaatcaatactcatcattaataatcataatagctatagcaataaaactaggaatagccccctttcacttctgagtcccagaggttacccaaggcacccctctgacatccggcctgcttcttctcacatgacaaaaactagcccccatctcaatcatataccaaatctctccctcactaaacgtaagccttctcctcactctctcaatcttatccatcatagcaggcagttgaggtggattaaaccaaacccagctacgcaaaatcttagcatactcctcaattacccacataggatgaataatagcagttctaccgtacaaccctaacataaccattcttaatttaactatttatattatcctaactactaccgcattcctactactcaacttaaactccagcaccacgaccctactactatctcgcacctgaaacaagctaacatgactaacacccttaattccatccaccctcctctccctaggaggcctgcccccgctaaccggctttttgcccaaatgggccattatcgaagaattcacaaaaaacaatagcctcatcatccccaccatcatagccaccatcaccctccttaacctctacttctacctacgcctaatctactccacctcaatcacactactccccatatctaacaacgtaaaaataaaatgacagtttgaacatacaaaacccaccccattcctccccacactcatcgcccttaccacgctactcctacctatctccccttttatactaataatcttat

SEQ ID NO: 154783 - DNA, 346 bp, Homo sapiens
  Payload ID: 10431
  Gene Symbol: MT-ND3
  Gene Name: mitochondrially encoded NADH dehydrogenase 3
  Uniprot ID: P03897
  ENST ID: ENST00000361227
  CDS Start-End: 1-346
ataaacttcgccttaattttaataatcaacaccctcctagccttactactaataattattacattttgactaccacaactcaacggctacatagaaaaatccaccccttacgagtgcggcttcgaccctatatcccccgcccgcgtccctttctccataaaattcttcttagtagctattaccttcttattatttgatctagaaattgccctccttttacccctaccatgagccctacaaacaactaacctgccactaatagttatgtcatccctcttattaatcatcatcctagccctaagtctggcctatgagtgactacaaaaaggattagactgaaccgaat

SEQ ID NO: 154784 - DNA, 1378 bp, Homo sapiens
  Payload ID: 10432
  Gene Symbol: MT-ND4
  Gene Name: mitochondrially encoded NADH dehydrogenase 4
  Uniprot ID: P03905
  ENST ID: ENST00000361381
  CDS Start-End: 1-1378
atgctaaaactaatcgtcccaacaattatattactaccactgacatgactttccaaaaaacacataatttgaatcaacacaaccacccacagcctaattattagcatcatccctctactattttttaaccaaatcaacaacaacctatttagctgttccccaaccttttcctccgaccccctaacaacccccctcctaatactaactacctgactcctacccctcacaatcatggcaagccaacgccacttatccagtgaaccactatcacgaaaaaaactctacctctctatactaatctccctacaaatctccttaattataacattcacagccacagaactaatcatattttatatcttcttcgaaaccacacttatccccaccttggctatcatcacccgatgaggcaaccagccagaacgcctgaacgcaggcacatacttcctattctacaccctagtaggctcccttcccctactcatcgcactaatttacactcacaacaccctaggctcactaaacattctactactcactctcactgcccaagaactatcaaactcctgagccaacaacttaatatgactagcttacacaatagcttttatagtaaagatacctctttacggactccacttatgactccctaaagcccatgtcgaagcccccatcgctgggtcaatagtacttgccgcagtactcttaaaactaggcggctatggtataatacgcctcacactcattctcaaccccctgacaaaacacatagcctaccccttccttgtactatccctatgaggcataattataacaagctccatctgcctacgacaaacagacctaaaatcgctcattgcatactcttcaatcagccacatagccctcgtagtaacagccattctcatccaaaccccctgaagcttcaccggcgcagtcattctcataatcgcccacgggcttacatcctcattactattctgcctagcaaactcaaactacgaacgcactcacagtcgcatcataatcctctctcaaggacttcaaactctactcccactaatagctttttgatgacttctagcaagcctcgctaacctcgccttaccccccactattaacctactgggagaactctctgtgctagtaaccacgttctcctgatcaaatatcactctcctacttacaggactcaacatactagtcacagccctatactccctctacatatttaccacaacacaatggggctcactcacccaccacattaacaacataaaaccctcattcacacgagaaaacaccctcatgttcatacacctatcccccattctcctcctatccctcaaccccgacatcattaccgggttttcctctt

SEQ ID NO: 154785 - DNA, 297 bp, Homo sapiens
  Payload ID: 10433
  Gene Symbol: MT-ND4L
  Gene Name: mitochondrially encoded NADH dehydrogenase 4L
  Uniprot ID: P03901
  ENST ID: ENST00000361335
  CDS Start-End: 1-297
atgcccctcatttacataaatattatactagcatttaccatctcacttctaggaatactagtatatcgctcacacctcatatcctccctactatgcctagaaggaataatactatcgctgttcattatagctactctcataaccctcaacacccactccctcttagccaatattgtgcctattgccatactagtctttgccgcctgcgaagcagcggtgggcctagccctactagtctcaatctccaacacatatggcctagactacgtacataacctaaacctactccaatgctaa

SEQ ID NO: 154786 - DNA, 1812 bp, Homo sapiens
  Payload ID: 10434
  Gene Symbol: MT-ND5
  Gene Name: mitochondrially encoded NADH dehydrogenase 5
  Uniprot ID: P03915
  ENST ID: ENST00000361567
  CDS Start-End: 1-1812
ataaccatgcacactactataaccaccctaaccctgacttccctaattccccccatccttaccaccctcgttaaccctaacaaaaaaaactcatacccccattatgtaaaatccattgtcgcatccacctttattatcagtctcttccccacaacaatattcatgtgcctagaccaagaagttattatctcgaactgacactgagccacaacccaaacaacccagctctccctaagcttcaaactagactacttctccataatattcatccctgtagcattgttcgttacatggtccatcatagaattctcactgtgatatataaactcagacccaaacattaatcagttcttcaaatatctactcatcttcctaattaccatactaatcttagttaccgctaacaacctattccaactgttcatcggctgagagggcgtaggaattatatccttcttgctcatcagttgatgatacgcccgagcagatgccaacacagcagccattcaagcaatcctatacaaccgtatcggcgatatcggtttcatcctcgccttagcatgatttatcctacactccaactcatgagacccacaacaaatagcccttctaaacgctaatccaagcctcaccccactactaggcctcctcctagcagcagcaggcaaatcagcccaattaggtctccacccctgactcccctcagccatagaaggccccaccccagtctcagccctactccactcaagcactatagttgtagcaggaatcttcttactcatccgcttccaccccctagcagaaaatagcccactaatccaaactctaacactatgcttaggcgctatcaccactctgttcgcagcagtctgcgcccttacacaaaatgacatcaaaaaaatcgtagccttctccacttcaagtcaactaggactcataatagttacaatcggcatcaaccaaccacacctagcattcctgcacatctgtacccacgccttcttcaaagccatactatttatgtgctccgggtccatcatccacaaccttaacaatgaacaagatattcgaaaaataggaggactactcaaaaccatacctctcacttcaacctccctcaccattggcagcctagcattagcaggaatacctttcctcacaggtttctactccaaagaccacatcatcgaaaccgcaaacatatcatacacaaacgcctgagccctatctattactctcatcgctacctccctgacaagcgcctatagcactcgaataattcttctcaccctaacaggtcaacctcgcttccccacccttactaacattaacgaaaataaccccaccctactaaaccccattaaacgcctggcagccggaagcctattcgcaggatttctcattactaacaacatttcccccgcatcccccttccaaacaacaatccccctctacctaaaactcacagccctcgctgtcactttcctaggacttctaacagccctagacctcaactacctaaccaacaaacttaaaataaaatccccactatgcacattttatttctccaacatactcggattctaccctagcatcacacaccgcacaatcccctatctaggccttcttacgagccaaaacctgcccctactcctcctagacctaacctgactagaaaagctattacctaaaacaatttcacagcaccaaatctccacctccatcatcacctcaacccaaaaaggcataattaaactttacttcctctctttcttcttcccactcatcctaaccctactcctaatcacataa

SEQ ID NO: 154787 - DNA, 525 bp, Homo sapiens
  Payload ID: 10435
  Gene Symbol: MT-ND6
  Gene Name: mitochondrially encoded NADH dehydrogenase 6
  Uniprot ID: P03923
  ENST ID: ENST00000361681
  CDS Start-End: 1-525
atgatgtatgctttgtttctgttgagtgtgggtttagtaatggggtttgtggggttttcttctaagccttctcctatttatgggggtttagtattgattgttagcggtgtggtcgggtgtgttattattctgaattttgggggaggttatatgggtttaatagtttttttaatttatttagggggaatgatggttgtctttggatatactacagcgatggctattgaggagtatcctgaggcatgggggtcaggggttgaggtcttggtgagtgttttagtggggttagcgatggaggtaggattggtgctgtgggtgaaagagtatgatggggtggtggttgtggtaaactttaatagtgtaggaagctgaataatttatgaaggagaggggtcagggttgattcgggaggatcctattggtgcgggggctttgtatgattatgggcgttgattagtagtagttactggttgaacattgtttgttggtgtatatattgtaattgagattgctcgggggaatagg

SEQ ID NO: 154788 - DNA, 1339 bp, Homo sapiens
  Payload ID: 10436
  Gene Symbol: MGARP
  Gene Name: mitochondria-localized glutamic acid-rich protein
  Uniprot ID: Q8TDB4
  ENST ID: ENST00000398955
  CDS Start-End: 181-903
gttaggggaggatggtgaggactacaaaggtctccccacctcccgggggccgcggaggcggggctggatgaaggtcgacgtgcctcctccgggcggggcgctgccaggctctcagcctctctgtggaagggcagcctgcgcctgggtaccgaggctgctgcgcggcggacagcgggcgcgatgtatctccgcagggcggtctccaagactctggcgctgccgctgagggcgccccccaaccccgcgccgctcggaaaggacgcatctctgcgccggatgtcatctaacagattccctggatcatctggatcaaatatgatttattatctggttgtaggcgtcacagtcagtgctggtggatattatgcttacaagacagtcacatcagaccaagccaaacacacagaacataaaacaaatttgaaagaaaaaacaaaagcagagatacatccatttcaaggtgaaaaggagaatgttgcggaaactgagaaagcaagttcagaagccccagaagaacttatagtggaagctgaggtggtagatgctgaagaaagtcccagtgctacagttgtggtcataaaagaggcatctgcctgtccaggtcacgtggaggctgctccggagaccacagcagtcagtgctgaaaccgggccagaggtcacagatgcagcggcgagggaaaccacggaagtaaaccctgaaacaaccccagaggttacaaatgctgccctggatgaagctgtcaccatcgataatgataaagatacaacaaagaacgaaacctctgatgaatatgctgaactagaagaagaaaattctccagctgagtcagagtcctctgctggagatgatttacaggaggaagccagtgttggctctgaggctgcttcggctcaaggctaatctccagccggtagacatttcagcaacaaatgccatagggtgtctgataagtgcttttgtgtttttagtacacttagtttaaaaaaaaaaagacttattttctagaaaacgttaatgggtcttgaagatttttggcatccactgatagattttaggactgagagacttgagattgtacatttcttactactcttctactgtctgagatcagaatatgacattgcagtaaagagcttaaatagtttcatctttggtttttttttctagacacttttcttttatcccagtcatctctgaatttacattttatattaaagaaattgagctatccatacaacctgtatttactttaatttcactatgctttcagcttactttattgtatgatatgtaggtctaaaatatagtttgagtcaaataaaattagaaaagcttt

SEQ ID NO: 154789 - DNA, 2754 bp, Homo sapiens
  Payload ID: 10437
  Gene Symbol: MFN1
  Gene Name: mitofusin 1
  ENST ID: ENST00000263969
  CDS Start-End: 92-2317
ttgatgaatgtcactggtgtgtcatcagtttgcatgtctatcatccactttagttggtgcttttctaactttatctccctctagtagcataatggcagaacctgtttctccactgaagcactttgtgctggctaagaaggcgattactgcaatctttgaccagttactggagtttgttactgaaggatcacattttgttgaagcaacatataagaatccggaacttgatcgaatagccactgaagatgatctggtagaaatgcaaggatataaagacaagctttccatcattggtgaggtgctatctcggagacacatgaaggtggcattttttggcaggacaagcagtgggaagagctctgttatcaatgcaatgttgtgggataaagttctccctagtgggattggccatataaccaattgcttcctaagtgttgaaggaactgatggagataaagcctatcttatgacagaaggatcagatgaaaaaaagagtgtgaagacagttaatcaactggcccatgcccttcacatggacaaagatttgaaagctggctgtcttgtacgtgtgttttggccaaaagcaaaatgtgccctcttgagagatgacctggtgttagtagacagtccaggcacagatgtcactacagagctggatagctggattgataagttttgcctagatgctgatgtctttgttttggtcgcaaactctgaatcaacactaatgaatacggaaaaacacttttttcacaaggtgaatgagcggctttccaagcctaatattttcattctcaataatcgttgggatgcctctgcatcagagccagaatatatggaagacgtacgcagacagcacatggaaagatgcctgcatttcttggtggaggagctcaaagttgtaaatgctttagaagcacagaatcgtatcttctttgtttcagcaaaggaagttcttagtgctagaaagcaaaaagcacaggggatgccagaaagtggtgtggcacttgctgaaggatttcatgcaagattacaggaatttcagaattttgaacaaatctttgaggagtgtatctcgcagtcagcagtgaaaacaaagttcgaacagcacactatcagagctaaacagatactagctactgtgaaaaacataatggattcagtaaacctggcagctgaagataaaaggcattattcagtggaagagagggaagaccaaattgatagactggactttattcgaaaccagatgaaccttttaacactggatgttaagaaaaaaatcaaggaggttaccgaggaggtggcaaacaaagtttcatgtgcaatgacagatgaaatttgtcgactgtctgttttggttgatgaattttgttcagagtttcatcctaatccagatgtattaaaaatatataaaagtgaattaaataagcacatagaggatggtatgggaagaaatttggctgatcgatgcaccgatgaagtaaacgccttagtgcttcagacccagcaagaaattattgaaaatttgaagccattacttccagctggtatacaggataaactacatacactgatcccttgcaagaaatttgatctcagttataatctaaattaccacaagttatgttcagattttcaagaggatattgtatttcgtttttccctgggctggtcttcccttgtacatcgatttttgggccctagaaatgctcaaagggtgctcctaggattatcagagcctatctttcagctccctagatctttagcttctactcccactgctcctaccactccagcaacgccagataatgcatcacaggaagaactcatgattacattagtaacaggattggcgtccgttacatctagaacttctatgggcatcattattgttggaggagtgatttggaaaactataggctggaaactcctatctgtttcattaactatgtatggagctttgtatctttatgaaagactgagctggaccacccatgccaaggagcgagcctttaaacagcagtttgtaaactatgcaactgaaaaactgaggatgattgttagctccacgagtgcaaactgcagtcaccaagtaaaacaacaaatagctaccacttttgctcgcctgtgccaacaagttgatattactcaaaaacagctggaagaagaaattgctagattacccaaagaaatagatcagttggagaaaatacaaaacaattcaaagctcttaagaaataaagctgttcaacttgaaaatgagctggagaattttactaagcagtttctaccttcaagcaatgaagaatcctaacaatagagattgctttggtgaccatgataggaggaaacgaaacttgtaagattggaacagttgttatttttatgaaattactttaaatatgaattgtactaactgtacctaaatagcaaagccctgtgtagattctggtaatgatctgtctcagggtatgtgtatttttgaagagtgttatgtccttagttttaattttgagtaaagaaaaggctaaaatcatgaattagttacaagcaacagtaccaacttatgtgacccctgaggggtggggctgtgagctcttaatttgtttttgattctgaaaaactctgcttcctggcatccaggagttagagattgagcctttcatcttctttctcaaaactagtttttgatgctttctttcatgggaatagtcacttttttatttagtaaatcgcattgctggaaccacc

SEQ ID NO: 154790 - DNA, 3148 bp, Homo sapiens
  Payload ID: 10437
  Gene Symbol: MFN1
  Gene Name: mitofusin 1
  Uniprot ID: Q8IWA4
  ENST ID: ENST00000357390
  CDS Start-End: 84-1196
aacttctcgggaagatgaggcagtttggcatctgtggccgagttgctgttgccgggtgatagttggagcggagacttagcataatggcagaacctgtttctccactgaagcactttgtgctggctaagaaggcgattactgcaatctttgaccagttactggagtttgttactgaaggatcacattttgttgaagcaacatataagaatccggaacttgatcgaatagccactgaagatgatctggtagaaatgcaaggatataaagacaagctttccatcattggtgaggtgctatctcggagacacatgaaggtggcattttttggcaggacaagcagtgggaagagctctgttatcaatgcaatgttgtgggataaagttctccctagtgggattggccatataaccaattgcttcctaagtgttgaaggaactgatggagataaagcctatcttatgacagaaggatcagatgaaaaaaagagtgtgaagacagttaatcaactggcccatgcccttcacatggacaaagatttgaaagctggctgtcttgtacgtgtgttttggccaaaagcaaaatgtgccctcttgagagatgacctggtgttagtagacagtccaggcacagatgtcactacagagctggatagctggattgataagttttgcctagatgctgatgtctttgttttggtcgcaaactctgaatcaacactaatgaatacggaaaaacacttttttcacaaggtgaatgagcggctttccaagcctaatattttcattctcaataatcgttgggatgcctctgcatcagagccagaatatatggaagacgtacgcagacagcacatggaaagatgcctgcatttcttggtggaggagctcaaagttgtaaatgctttagaagcacagaatcgtatcttctttgtttcagcaaaggaagttcttagtgctagaaagcaaaaagcacaggggatgccagaaagtggtgtggcacttgctgaaggatttcatgcaagattacaggaatttcagaattttgaacaaatctttgaggagtgtatctcgcagtcagcagtgaaaacaaagttcgaacagcacactatcagagctaaacagatactagctactgtgaaaaacataatggattcagtaaacctggcagctgaagataaaaggtttcatgtgcaatgacagatgaaatttgtcgactgtctgttttggttgatgaattttgttcagagtttcatcctaatccagatgtattaaaaatatataaaagtgaattaaataagcacatagaggatggtatgggaagaaatttggctgatcgatgcaccgatgaagtaaacgccttagtgcttcagacccagcaagaaattattgaaaatttgaagccattacttccagctggtatacaggataaactacatacactgatcccttgcaagaaatttgatctcagttataatctaaattaccacaagttatgttcagattttcaagaggatattgtatttcgtttttccctgggctggtcttcccttgtacatcgatttttgggccctagaaatgctcaaagggtgctcctaggattatcagagcctatctttcagctccctagatctttagcttctactcccactgctcctaccactccagcaacgccagataatgcatcacaggaagaactcatgattacattagtaacaggattggcgtccgttacatctagaacttctatgggcatcattattgttggaggagtgatttggaaaactataggctggaaactcctatctgtttcattaactatgtatggagctttgtatctttatgaaagactgagctggaccacccatgccaaggagcgagcctttaaacagcagtttgtaaactatgcaactgaaaaactgaggatgattgttagctccacgagtgcaaactgcagtcaccaagtaaaacaacaaatagctaccacttttgctcgcctgtgccaacaagttgatattactcaaaaacagctggaagaagaaattgctagattacccaaagaaatagatcagttggagaaaatacaaaacaattcaaagctcttaagaaataaagctgttcaacttgaaaatgagctggagaattttactaagcagtttctaccttcaagcaatgaagaatcctaacaatagagattgctttggtgaccatgataggaggaaacgaaacttgtaagattggaacagttgttatttttatgaaattactttaaatatgaattgtactaactgtacctaaatagcaaagccctgtgtagattctggtaatgatctgtctcagggtatgtgtatttttgaagagtgttatgtccttagttttaattttgagtaaagaaaaggctaaaatcatgaattagttacaagcaacagtaccaacttatgtgacccctgaggggtggggctgtgagctcttaatttgtttttgattctgaaaaactctgcttcctggcatccaggagttagagattgagcctttcatcttctttctcaaaactagtttttgatgctttctttcatgggaatagtcacttttttatttagtaaatcgcattgctggaaccaccaaggagtgtggaatgtccttgagtgtattatttatgcaagtcacagtcacgttgccatcatggcagctatgtgaaacactaataaatgtgtttttactttttattcccgttaaaactgatgtaaaacaggataaaggcttgttatagtcacttataagtatctgggtctaagtaatttccttagatgtttctaaagaaacattttcagctttgctcccattatgattccaataaggaacgctttcctagtgcaattttaggagtaaagtttgaagagataaaaatagccaaagataggagacgtctgaattttgaatgataaacagtgatgttttaaaaaagctgttgttcttcaggaggcatttgcctaggatattgctggattataccccattggaggcttttaattttatttgtatgaattttccaggatttcattaaaaattattattgtattttttaccttaatgaaagattttgggttcaaatatctttctatattaaaagctgattgagtctgtacatatgt

SEQ ID NO: 154791 - DNA, 543 bp, Homo sapiens
  Payload ID: 10437
  Gene Symbol: MFN1
  Gene Name: mitofusin 1
  ENST ID: ENST00000467174
  CDS Start-End: 80-543
tgcgcggggcgggggtgggctctggccctgactcctgcgcccggtgtgggaaggtgggaggccttttctaagtagcataatggcagaacctgtttctccactgaagcactttgtgctggctaagaaggcgattactgcaatctttgaccagttactggagtttgttactgaaggatcacattttgttgaagcaacatataagaatccggaacttgatcgaatagccactgaagatgatctggtagaaatgcaaggatataaagacaagctttccatcattggtgaggtgctatctcggagacacatgaaggtggcattttttggcaggacaagcagtgggaagagctctgttatcaatgcaatgttgtgggataaagttctccctagtgggattggccatataaccaattgcttcctaagtgttgaaggaactgatggagataaagcctatcttatgacagaaggatcagatgaaaaaaagagtgtgaagacagttaatcaactggcccatgcccttcacatggacaaagatttgaaagctgg

SEQ ID NO: 154792 - DNA, 1919 bp, Homo sapiens
  Payload ID: 10437
  Gene Symbol: MFN1
  Gene Name: mitofusin 1
  ENST ID: ENST00000474903
  CDS Start-End: 1-1482
acagttaatcaactggcccatgcccttcacatggacaaagatttgaaagctggctgtcttgtacgtgtgttttggccaaaagcaaaatgtgccctcttgagagatgacctggtgttagtagacagtccaggcacagatgtcactacagagctggatagctggattgataagttttgcctagatgctgatgtctttgttttggtcgcaaactctgaatcaacactaatgaatacggaaaaacacttttttcacaaggtgaatgagcggctttccaagcctaatattttcattctcaataatcgttgggatgcctctgcatcagagccagaatatatggaagacgtacgcagacagcacatggaaagatgcctgcatttcttggtggaggagctcaaagttgtaaatgctttagaagcacagaatcgtatcttctttgtttcagcaaaggaagttcttagtgctagaaagcaaaaagcacaggggatgccagaaagtggtgtggcacttgctgaaggatttcatgcaagattacaggaatttcagaattttgaacaaatctttgaggagtgtatctcgcagtcagcagtgaaaacaaagttcgaacagcacactatcagagctaaacagatactagctactgtgaaaaacataatggattcagtaaacctggcagctgaagataaaaggcattattcagtggaagagagggaagaccaaattgatagactggactttattcgaaaccagatgaaccttttaacactggatgttaagaaaaaaatcaaggaggttaccgaggaggtggcaaacaaagtttcatgtgcaatgacagatgaaatttgtcgactgtctgttttggttgatgaattttgttcagagtttcatcctaatccagatgtattaaaaatatataaaagtctccctagatctttagcttctactcccactgctcctaccactccagcaacgccagataatgcatcacaggaagaactcatgattacattagtaacaggattggcgtccgttacatctagaacttctatgggcatcattattgttggaggagtgatttggaaaactataggctggaaactcctatctgtttcattaactatgtatggagctttgtatctttatgaaagactgagctggaccacccatgccaaggagcgagcctttaaacagcagtttgtaaactatgcaactgaaaaactgaggatgattgttagctccacgagtgcaaactgcagtcaccaagtaaaacaacaaatagctaccacttttgctcgcctgtgccaacaagttgatattactcaaaaacagctggaagaagaaattgctagattacccaaagaaatagatcagttggagaaaatacaaaacaattcaaagctcttaagaaataaagctgttcaacttgaaaatgagctggagaattttactaagcagtttctaccttcaagcaatgaagaatcctaacaatagagattgctttggtgaccatgataggaggaaacgaaacttgtaagattggaacagttgttatttttatgaaattactttaaatatgaattgtactaactgtacctaaatagcaaagccctgtgtagattctggtaatgatctgtctcagggtatgtgtatttttgaagagtgttatgtccttagttttaattttgagtaaagaaaaggctaaaatcatgaattagttacaagcaacagtaccaacttatgtgacccctgaggggtggggctgtgagctcttaatttgtttttgattctgaaaaactctgcttcctggcatccaggagttagagattgagcctttcatcttctttctcaaaactagtttttgatgctttctttcatgggaatagtcacttttttatttagtaaatcgcattgctggaaccacc

SEQ ID NO: 154793 - DNA, 543 bp, Homo sapiens
  Payload ID: 10437
  Gene Symbol: MFN1
  Gene Name: mitofusin 1
  ENST ID: ENST00000489329
  CDS Start-End: 172-543
atgcgccaccacacccggccaaaaagcactgttaatatttctaactttgaaagccatcactaagtattttgagtactctaaatttttttttcacttcataactaaattagtgaaaaaataaaacttgtccttaatttaaagacagttaatcaactggcccatgcccttcacatggacaaagatttgaaagctggctgtcttgtacgtgtgttttggccaaaagcaaaatgtgccctcttgagagatgacctggtgttagtagacagtccaggcacagatgtcactacagagctggatagctggattgataagttttgcctagatgctgatgtctttgttttggtcgcaaactctgaatcaacactaatgaatacggaaaaacacttttttcacaaggtgaatgagcggctttccaagcctaatattttcattctcaataatcgttgggatgcctctgcatcagagccagaatatatggaagacgtacgcagacagcacatggaaagatgcctgcatttcttggtggaggagctcaaagttgta

SEQ ID NO: 154794 - DNA, 5224 bp, Homo sapiens
  Payload ID: 10437
  Gene Symbol: MFN1
  Gene Name: mitofusin 1
  ENST ID: ENST00000471841
  CDS Start-End: 127-2352
agtgaccgccctttgccactccccctgcctcctctccgcctttaacttctcgggaagatgaggcagtttggcatctgtggccgagttgctgttgccgggtgatagttggagcggagacttagcataatggcagaacctgtttctccactgaagcactttgtgctggctaagaaggcgattactgcaatctttgaccagttactggagtttgttactgaaggatcacattttgttgaagcaacatataagaatccggaacttgatcgaatagccactgaagatgatctggtagaaatgcaaggatataaagacaagctttccatcattggtgaggtgctatctcggagacacatgaaggtggcattttttggcaggacaagcagtgggaagagctctgttatcaatgcaatgttgtgggataaagttctccctagtgggattggccatataaccaattgcttcctaagtgttgaaggaactgatggagataaagcctatcttatgacagaaggatcagatgaaaaaaagagtgtgaagacagttaatcaactggcccatgcccttcacatggacaaagatttgaaagctggctgtcttgtacgtgtgttttggccaaaagcaaaatgtgccctcttgagagatgacctggtgttagtagacagtccaggcacagatgtcactacagagctggatagctggattgataagttttgcctagatgctgatgtctttgttttggtcgcaaactctgaatcaacactaatgaatacggaaaaacacttttttcacaaggtgaatgagcggctttccaagcctaatattttcattctcaataatcgttgggatgcctctgcatcagagccagaatatatggaagacgtacgcagacagcacatggaaagatgcctgcatttcttggtggaggagctcaaagttgtaaatgctttagaagcacagaatcgtatcttctttgtttcagcaaaggaagttcttagtgctagaaagcaaaaagcacaggggatgccagaaagtggtgtggcacttgctgaaggatttcatgcaagattacaggaatttcagaattttgaacaaatctttgaggagtgtatctcgcagtcagcagtgaaaacaaagttcgaacagcacactatcagagctaaacagatactagctactgtgaaaaacataatggattcagtaaacctggcagctgaagataaaaggcattattcagtggaagagagggaagaccaaattgatagactggactttattcgaaaccagatgaaccttttaacactggatgttaagaaaaaaatcaaggaggttaccgaggaggtggcaaacaaagtttcatgtgcaatgacagatgaaatttgtcgactgtctgttttggttgatgaattttgttcagagtttcatcctaatccagatgtattaaaaatatataaaagtgaattaaataagcacatagaggatggtatgggaagaaatttggctgatcgatgcaccgatgaagtaaacgccttagtgcttcagacccagcaagaaattattgaaaatttgaagccattacttccagctggtatacaggataaactacatacactgatcccttgcaagaaatttgatctcagttataatctaaattaccacaagttatgttcagattttcaagaggatattgtatttcgtttttccctgggctggtcttcccttgtacatcgatttttgggccctagaaatgctcaaagggtgctcctaggattatcagagcctatctttcagctccctagatctttagcttctactcccactgctcctaccactccagcaacgccagataatgcatcacaggaagaactcatgattacattagtaacaggattggcgtccgttacatctagaacttctatgggcatcattattgttggaggagtgatttggaaaactataggctggaaactcctatctgtttcattaactatgtatggagctttgtatctttatgaaagactgagctggaccacccatgccaaggagcgagcctttaaacagcagtttgtaaactatgcaactgaaaaactgaggatgattgttagctccacgagtgcaaactgcagtcaccaagtaaaacaacaaatagctaccacttttgctcgcctgtgccaacaagttgatattactcaaaaacagctggaagaagaaattgctagattacccaaagaaatagatcagttggagaaaatacaaaacaattcaaagctcttaagaaataaagctgttcaacttgaaaatgagctggagaattttactaagcagtttctaccttcaagcaatgaagaatcctaacaatagagattgctttggtgaccatgataggaggaaacgaaacttgtaagattggaacagttgttatttttatgaaattactttaaatatgaattgtactaactgtacctaaatagcaaagccctgtgtagattctggtaatgatctgtctcagggtatgtgtatttttgaagagtgttatgtccttagttttaattttgagtaaagaaaaggctaaaatcatgaattagttacaagcaacagtaccaacttatgtgacccctgaggggtggggctgtgagctcttaatttgtttttgattctgaaaaactctgcttcctggcatccaggagttagagattgagcctttcatcttctttctcaaaactagtttttgatgctttctttcatgggaatagtcacttttttatttagtaaatcgcattgctggaaccaccaaggagtgtggaatgtccttgagtgtattatttatgcaagtcacagtcacgttgccatcatggcagctatgtgaaacactaataaatgtgtttttactttttattcccgttaaaactgatgtaaaacaggataaaggcttgttatagtcacttataagtatctgggtctaagtaatttccttagatgtttctaaagaaacattttcagctttgctcccattatgattccaataaggaacgctttcctagtgcaattttaggagtaaagtttgaagagataaaaatagccaaagataggagacgtctgaattttgaatgataaacagtgatgttttaaaaaagctgttgttcttcaggaggcatttgcctaggatattgctggattataccccattggaggcttttaattttatttgtatgaattttccaggatttcattaaaaattattattgtattttttaccttaatgaaagattttgggttcaaatatctttctatattaaaagctgattgagtctgtacatatgtaaattatgcctagtggaggttctgttgactttcttccccactgtggaagaggccagttttgcctccatttgcacattcatttcagttatttctgatccataaatataacatttacaaaattcttccttgagctggtggaaatgcctcaccagtttcctctttaatgaatcaaataaaatctttaactgatgttaaaaaaaattgattgaaactcagatggaatggaaatgtacaaaaatgacaccattctaggaatttgctagacaaaatgtaggactaccagatcagtatctcctagacacttgttagaaatgcacaatcccggggaacgcagtacatttggccacatgtagtttatgtttccttttcatgggagggataaaatttaaagctttttttttctttgaatacagtccttccttttctatgccttttaaggcttctagatgctattcagcctttttacagcaggtgcaactctatttttcaaggtatcttagaagataacactaggccattgaagcctttcaaaaatatatttttatgcaaattgacacgagtgcagtatactaatgcaaattaattttggtgtttagcttttattgctcatttataacccaagaaatggtacagaccacagtaagtgggattaggtaacaactacaacatggaaaaacagtgtctaagatcacgtactgctaatttaggttacaaaactcaaggctgtaacctttatatgaaagtacttaagcttgaaagttcataatagtttggtatcacctcattagtatagtacagtggttctcaaagtttggtcctgggtcatcgacattacttctttttctttctgagacagggtctcagtctgtcacccaggatggagtgcagtggcgtgatcatggctcactgcagcctcaacctctcgggttcaggtgatcctcccacatcagcctcctgggtggctgggactacaggcacacgccaccatgcctggctagtttttgtaaagacgaggtttccccatgttgtgcaggctggtcttgaactcacagactcaagtgatccttttacctcagcctcccaaactgttgggataacaggtgtaagccaccacacacagctataatcaaccttcaaacttataaaaagtgtggatccttgggtctgaacccagacctatggagtcagacagtaggtttgaggcccagcaatctatggtttaacaagccatccaggtgtttctgatgcacagtgaaattggggtaccactggtattaggtttggtatggcaactttttcatcacttgttttatgtagttgtctgatcaattgtgaaaacataatgaatgttggaaatggaacagtaaaataacgaaagccaactttttttttttttttttttttttttgagacggagtctcgctctgtcgcccaggctggagtgcagtggcgcgatctcggctcactgcaagctccgcctcccgggttcacgccattctcctgcctcagcctcccgagtagctgggactacaggcgcccgccaccacgcccggctaattttttgtatttttagtagagacggggtttcaccgtgttagccaggatggtctcgatctcctgacctcgtgatccacccgcctcggcctcccaaagtgctgggattacaggcgtgagccaccgcgcccggccgaaagccaactcttatgcctagaaatatgtgcacctatgaccaagcccatgaattatacaggaattatgtaattatgagtgatgtacttcaaagttattgcacatacacttgtttactttgtatgtttgcaggattaaactttgtataatctttttacaaaaattttttttcagtatgcaagcttgcaagatgaaaataaaacctgtttgcctgata

SEQ ID NO: 154795 - DNA, 4539 bp, Homo sapiens
  Payload ID: 10438
  Gene Symbol: MFN2
  Gene Name: mitofusin 2
  Uniprot ID: O95140
  ENST ID: ENST00000235329
  CDS Start-End: 323-2596
gtaggcggggcgagccggctgggctcagggtccaccagctcacccgggtcgaggggcaatctgaggcgactggtgacgcgcttatccacttccctcctcccgcctccccctggggtggcgctcgctggtgacgtagtgagtgtgatggccgccgcgaggccgggaaggtgaagtcaggactggtggagtcaacacagtcaatcaatagccaacctcaacctgagacaggacagaagagaactcagaatctttttgtcttttggacttcagccatgtccatgatgcctaccctgtgaagatctctcaccatccaaaaaacgcaatgtccctgctcttctctcgatgcaactctatcgtcacagtcaagaaaaataagagacacatggctgaggtgaatgcatccccacttaagcactttgtcactgccaagaagaagatcaatggcatttttgagcagctgggggcctacatccaggagagcgccaccttccttgaagacacgtacaggaatgcagaactggaccccgttaccacagaagaacaggttctggacgtcaaaggttacctatccaaagtgagaggcatcagtgaggtgctggctcggaggcacatgaaagtggctttttttggccggacgagcaatgggaagagcaccgtgatcaatgccatgctctgggacaaagttctgccctctgggattggccacaccaccaattgcttcctgcgggtagagggcacagatggccatgaggcctttctccttaccgagggctcagaggaaaagaggagtgccaagactgtgaaccagctggcccatgccctccaccaggacaagcagctccatgccggcagcctagtgagtgtgatgtggcccaactctaagtgcccacttctgaaggatgacctcgttttgatggacagccctggtattgatgtcaccacagagctggacagctggattgacaagttttgtctggatgctgatgtgtttgtgctggtggccaactcagagtccaccctgatgcagacggaaaagcacttcttccacaaggtgagtgagcgtctctcccggccaaacatcttcatcctgaacaaccgctgggatgcatctgcctcagagcccgagtacatggaggaggtgcggcggcagcacatggagcgttgtaccagcttcctggtggatgagctgggcgtggtggatcgatcccaggccggggaccgcatcttctttgtgtctgctaaggaggtgctcaacgccaggattcagaaagcccagggcatgcctgaaggagggggcgctctcgcagaaggctttcaagtgaggatgtttgagtttcagaattttgagaggagatttgaggagtgcatctcccagtctgcagtgaagaccaagtttgagcagcacacggtccgggccaagcagattgcagaggcggttcgactcatcatggactccctgcacatggcggctcgggagcagcaggtttactgcgaggaaatgcgtgaagagcggcaagaccgactgaaatttattgacaaacagctggagctcttggctcaagactataagctgcgaattaagcagattacggaggaagtggagaggcaggtgtcgactgcaatggccgaggagatcaggcgcctctctgtactggtggacgattaccagatggacttccacccttctccagtagtcctcaaggtttataagaatgagctgcaccgccacatagaggaaggactgggtcgaaacatgtctgaccgctgctccacggccatcaccaactccctgcagaccatgcagcaggacatgatagatggcttgaaacccctccttcctgtgtctgtgcggagtcagatagacatgctggtcccacgccagtgcttctccctcaactatgacctaaactgtgacaagctgtgtgctgacttccaggaagacattgagttccatttctctctcggatggaccatgctggtgaataggttcctgggccccaagaacagccgtcgggccttgatgggctacaatgaccaggtccagcgtcccatccctctgacgccagccaaccccagcatgcccccactgccacagggctcgctcacccaggaggagttcatggtttccatggttaccggcctggcctccttgacatccaggacctccatgggcattcttgttgttggaggagtggtgtggaaggcagtgggctggcggctcattgccctctcctttgggctctatggcctcctctacgtctatgagcgtctgacctggaccaccaaggccaaggagagggccttcaagcgccagtttgtggagcatgccagcgagaagctgcagcttgtcatcagctacactggctccaactgcagccaccaagtccagcaggaactgtctgggacctttgctcatctgtgtcagcaagttgacgtcacccgggagaacctggagcaggaaattgccgccatgaacaagaaaattgaggttcttgactcacttcagagcaaagcaaagctgctcaggaataaagccggttggttggacagtgagctcaacatgttcacacaccagtacctgcagcccagcagatagtgggcacctgaggcggagtctgcgtggagaggggcggtgctgccagccctaagtgccatgtgggctcccccaggggcacgtgtggctcctgccccctggccactgccaagagaatgaagcacccagtctcgtaccattttgagccctccagcactacttattttcccccacctttgcctgctgttgctggaagagctggctcatacccccaaaggacactttcagcgacagctatggacagcatggtaccaaggagttaagttgaggctttttccagctttctctggttcatttgattgcttgataaggcctcaggatctcagcattgcacaatgcctcatggaagcctttgagggtatcacacagacacccccaccttcctccagcctgtgcgcacctgccctccttgcagcccagcacacctgcaggtgtaagggacgattggagtttcttcccagagagtctgtcccagaaggactgtggcttgtgtgtgtccatctcgcctgttggctcagtgcttcatcccatttgcagagcctcagacacgtcttggtggtgaggctcagttacccctgggcttaggctgaggcgggccctgtgctgggggtggtagaaaggatgctgctgaggcagctggaggagtgggagtagctcagaggggagggctgttggatgtatggggagctggcagagcaggtggcagtcactgggacaaggagggacttgcctctcttctcattattgtgtcctttgctttagtgtcagtcctggacttgtgcaggcctgttttgtgtagatctgttttggaagatggcatggtctaggtggttgaaggatgtagtagaaggatggatggtggaaggtggggacgttggtggctggctgaggtgcatgggccccacacaggacagctggagaatgggccgtccacttggcctcgttctgcgaggggctcatgggtctgagagcccccacccactaggcttgattgcatccctgttgtgccctttaagagacatgtttccaccccacccccaaccttgtcccaagtgccctggactaaatttcctgtgccagtgactgcagttggccaagggacaatgtggaaaacccagtgtccatctttccaccctccctgatctccagaaccttcgactgacccccttgtctttatgctgatgttgagttttgggattgttactggttgaagtgggggcagatgcctgtcaccaaggtgttgactgtgtgagaaaagcagtttgggtgacaaatcctgtgtggcacaagttggatcgcttcctagaaataagcaacacctctcccaaaaagcagcccacaaggcaggggcccagcagcccagccatcactcatctttgaggaaatgagttggtagcctctgtgcactgtttggtggccacatcacaggtgatgtcctgttcacatacctgcttgtatttaaagccctcagtctgtcctgttgtgtggggcgaagtgatggactctgccaggtggacatgctgtgggtggatgttcccggcgtgtgccgggcctgaatggacaggggccacttcacagcatgtcagggaaaatcactgtcacacaattccaatggattttgtgctctttttgaaaaaaaaaaattctttagcgtaaacatgaattttttttcaatgtagcccctggggaatgaatgaaattttgagcttcttcaatacgtaaaattaaatttataccactgagggagagaccctttctgaaagaagtatggccaaaagcactttaatgctgctgacattgttgtttttatgttcatttgctggagcgcaagacgtgctgacacagtgagttttctctgatgtatttaaggtgatgtatttgcttgagttactcctgtatcattgctcataatattggaaactaaaataaaacctagttggaaatcc

SEQ ID NO: 154796 - DNA, 489 bp, Homo sapiens
  Payload ID: 10438
  Gene Symbol: MFN2
  Gene Name: mitofusin 2
  ENST ID: ENST00000412236
  CDS Start-End: 196-489
agtcaatcaatagccaacctcaacctgagacaggacagaagagaactcagaatctttttgtcttttggacttcagccatgtccatgatgcctaccctgtgaagatctctcaccatccaaaaaattgtgccagcagacgatccgtggatccattttattttccctgctaggagttgctgtacataacactggcgcaatgtccctgctcttctctcgatgcaactctatcgtcacagtcaagaaaaataagagacacatggctgaggtgaatgcatccccacttaagcactttgtcactgccaagaagaagatcaatggcatttttgagcagctgggggcctacatccaggagagcgccaccttccttgaagacacgtacaggaatgcagaactggaccccgttaccacagaagaacaggttctggacgtcaaaggttacctatccaaagtgagaggcatcagtgaggtgctggctcggaggcacatgaaa

SEQ ID NO: 154797 - DNA, 4531 bp, Homo sapiens
  Payload ID: 10438
  Gene Symbol: MFN2
  Gene Name: mitofusin 2
  Uniprot ID: O95140
  ENST ID: ENST00000444836
  CDS Start-End: 309-2582
atgatgcagtgggagtccgagcctctgcgtcgtccgcttgggacgcgccggcggaggagtggcgcgcggaggagtggcgcgctgagacgccgctcgaagcgccgagtcgcggggcagcagaggcgtaaggagtaggcggggcgagccggctgggctcagggtccaccagctcacccgggtcgaggggcaatctgaggcgactggtgacgcgcttatccacttccctcctcccgcctccccctggggtggcgctcgctggtgacgtagtgagtgtgatggccgccgcgaggccgggaaggtgaagcgcaatgtccctgctcttctctcgatgcaactctatcgtcacagtcaagaaaaataagagacacatggctgaggtgaatgcatccccacttaagcactttgtcactgccaagaagaagatcaatggcatttttgagcagctgggggcctacatccaggagagcgccaccttccttgaagacacgtacaggaatgcagaactggaccccgttaccacagaagaacaggttctggacgtcaaaggttacctatccaaagtgagaggcatcagtgaggtgctggctcggaggcacatgaaagtggctttttttggccggacgagcaatgggaagagcaccgtgatcaatgccatgctctgggacaaagttctgccctctgggattggccacaccaccaattgcttcctgcgggtagagggcacagatggccatgaggcctttctccttaccgagggctcagaggaaaagaggagtgccaagactgtgaaccagctggcccatgccctccaccaggacaagcagctccatgccggcagcctagtgagtgtgatgtggcccaactctaagtgcccacttctgaaggatgacctcgttttgatggacagccctggtattgatgtcaccacagagctggacagctggattgacaagttttgtctggatgctgatgtgtttgtgctggtggccaactcagagtccaccctgatgcagacggaaaagcacttcttccacaaggtgagtgagcgtctctcccggccaaacatcttcatcctgaacaaccgctgggatgcatctgcctcagagcccgagtacatggaggaggtgcggcggcagcacatggagcgttgtaccagcttcctggtggatgagctgggcgtggtggatcgatcccaggccggggaccgcatcttctttgtgtctgctaaggaggtgctcaacgccaggattcagaaagcccagggcatgcctgaaggagggggcgctctcgcagaaggctttcaagtgaggatgtttgagtttcagaattttgagaggagatttgaggagtgcatctcccagtctgcagtgaagaccaagtttgagcagcacacggtccgggccaagcagattgcagaggcggttcgactcatcatggactccctgcacatggcggctcgggagcagcaggtttactgcgaggaaatgcgtgaagagcggcaagaccgactgaaatttattgacaaacagctggagctcttggctcaagactataagctgcgaattaagcagattacggaggaagtggagaggcaggtgtcgactgcaatggccgaggagatcaggcgcctctctgtactggtggacgattaccagatggacttccacccttctccagtagtcctcaaggtttataagaatgagctgcaccgccacatagaggaaggactgggtcgaaacatgtctgaccgctgctccacggccatcaccaactccctgcagaccatgcagcaggacatgatagatggcttgaaacccctccttcctgtgtctgtgcggagtcagatagacatgctggtcccacgccagtgcttctccctcaactatgacctaaactgtgacaagctgtgtgctgacttccaggaagacattgagttccatttctctctcggatggaccatgctggtgaataggttcctgggccccaagaacagccgtcgggccttgatgggctacaatgaccaggtccagcgtcccatccctctgacgccagccaaccccagcatgcccccactgccacagggctcgctcacccaggaggagttcatggtttccatggttaccggcctggcctccttgacatccaggacctccatgggcattcttgttgttggaggagtggtgtggaaggcagtgggctggcggctcattgccctctcctttgggctctatggcctcctctacgtctatgagcgtctgacctggaccaccaaggccaaggagagggccttcaagcgccagtttgtggagcatgccagcgagaagctgcagcttgtcatcagctacactggctccaactgcagccaccaagtccagcaggaactgtctgggacctttgctcatctgtgtcagcaagttgacgtcacccgggagaacctggagcaggaaattgccgccatgaacaagaaaattgaggttcttgactcacttcagagcaaagcaaagctgctcaggaataaagccggttggttggacagtgagctcaacatgttcacacaccagtacctgcagcccagcagatagtgggcacctgaggcggagtctgcgtggagaggggcggtgctgccagccctaagtgccatgtgggctcccccaggggcacgtgtggctcctgccccctggccactgccaagagaatgaagcacccagtctcgtaccattttgagccctccagcactacttattttcccccacctttgcctgctgttgctggaagagctggctcatacccccaaaggacactttcagcgacagctatggacagcatggtaccaaggagttaagttgaggctttttccagctttctctggttcatttgattgcttgataaggcctcaggatctcagcattgcacaatgcctcatggaagcctttgagggtatcacacagacacccccaccttcctccagcctgtgcgcacctgccctccttgcagcccagcacacctgcaggtgtaagggacgattggagtttcttcccagagagtctgtcccagaaggactgtggcttgtgtgtgtccatctcgcctgttggctcagtgcttcatcccatttgcagagcctcagacacgtcttggtggtgaggctcagttacccctgggcttaggctgaggcgggccctgtgctgggggtggtagaaaggatgctgctgaggcagctggaggagtgggagtagctcagaggggagggctgttggatgtatggggagctggcagagcaggtggcagtcactgggacaaggagggacttgcctctcttctcattattgtgtcctttgctttagtgtcagtcctggacttgtgcaggcctgttttgtgtagatctgttttggaagatggcatggtctaggtggttgaaggatgtagtagaaggatggatggtggaaggtggggacgttggtggctggctgaggtgcatgggccccacacaggacagctggagaatgggccgtccacttggcctcgttctgcgaggggctcatgggtctgagagcccccacccactaggcttgattgcatccctgttgtgccctttaagagacatgtttccaccccacccccaaccttgtcccaagtgccctggactaaatttcctgtgccagtgactgcagttggccaagggacaatgtggaaaacccagtgtccatctttccaccctccctgatctccagaaccttcgactgacccccttgtctttatgctgatgttgagttttgggattgttactggttgaagtgggggcagatgcctgtcaccaaggtgttgactgtgtgagaaaagcagtttgggtgacaaatcctgtgtggcacaagttggatcgcttcctagaaataagcaacacctctcccaaaaagcagcccacaaggcaggggcccagcagcccagccatcactcatctttgaggaaatgagttggtagcctctgtgcactgtttggtggccacatcacaggtgatgtcctgttcacatacctgcttgtatttaaagccctcagtctgtcctgttgtgtggggcgaagtgatggactctgccaggtggacatgctgtgggtggatgttcccggcgtgtgccgggcctgaatggacaggggccacttcacagcatgtcagggaaaatcactgtcacacaattccaatggattttgtgctctttttgaaaaaaaaaaattctttagcgtaaacatgaattttttttcaatgtagcccctggggaatgaatgaaattttgagcttcttcaatacgtaaaattaaatttataccactgagggagagaccctttctgaaagaagtatggccaaaagcactttaatgctgctgacattgttgtttttatgttcatttgctggagcgcaagacgtgctgacacagtgagttttctctgatgtatttaaggtgatgtatttgcttgagttactcctgtatcattgctcataatattggaaactaaaataaaacctagttggaaatcctttgtg

SEQ ID NO: 154798 - DNA, 11022 bp, Homo sapiens
  Payload ID: 10439
  Gene Symbol: MAPK1
  Gene Name: mitogen-activated protein kinase 1
  Uniprot ID: P28482
  ENST ID: ENST00000215832
  CDS Start-End: 190-1272
aggcaatcggtccgagtggctgtcggctcttcagctctcccgctcggcgtcttccttcctcctcccggtcagcgtcggcggctgcaccggcggcggcgcagtccctgcgggaggggcgacaagagctgagcggcggccgccgagcgtcgagctcagcgcggcggaggcggcggcggcccggcagccaacatggcggcggcggcggcggcgggcgcgggcccggagatggtccgcgggcaggtgttcgacgtggggccgcgctacaccaacctctcgtacatcggcgagggcgcctacggcatggtgtgctctgcttatgataatgtcaacaaagttcgagtagctatcaagaaaatcagcccctttgagcaccagacctactgccagagaaccctgagggagataaaaatcttactgcgcttcagacatgagaacatcattggaatcaatgacattattcgagcaccaaccatcgagcaaatgaaagatgtatatatagtacaggacctcatggaaacagatctttacaagctcttgaagacacaacacctcagcaatgaccatatctgctattttctctaccagatcctcagagggttaaaatatatccattcagctaacgttctgcaccgtgacctcaagccttccaacctgctgctcaacaccacctgtgatctcaagatctgtgactttggcctggcccgtgttgcagatccagaccatgatcacacagggttcctgacagaatatgtggccacacgttggtacagggctccagaaattatgttgaattccaagggctacaccaagtccattgatatttggtctgtaggctgcattctggcagaaatgctttctaacaggcccatctttccagggaagcattatcttgaccagctgaaccacattttgggtattcttggatccccatcacaagaagacctgaattgtataataaatttaaaagctaggaactatttgctttctcttccacacaaaaataaggtgccatggaacaggctgttcccaaatgctgactccaaagctctggacttattggacaaaatgttgacattcaacccacacaagaggattgaagtagaacaggctctggcccacccatatctggagcagtattacgacccgagtgacgagcccatcgccgaagcaccattcaagttcgacatggaattggatgacttgcctaaggaaaagctcaaagaactaatttttgaagagactgctagattccagccaggatacagatcttaaatttgtcaggacaagggctcagaggactggacgtgctcagacatcggtgttcttcttcccagttcttgacccctggtcctgtctccagcccgtcttggcttatccactttgactcctttgagccgtttggaggggcggtttctggtagttgtggcttttatgctttcaaagaatttcttcagtccagagaattcctcctggcagccctgtgtgtgtcacccattggtgacctgcggcagtatgtacttcagtgcacctactgcttactgttgctttagtcactaattgctttctggtttgaaagatgcagtggttcctccctctcctgaatccttttctacatgatgccctgctgaccatgcagccgcaccagagagagattcttccccaattggctctagtcactggcatctcactttatgatagggaaggctactacctagggcactttaagtcagtgacagccccttatttgcacttcaccttttgaccataactgtttccccagagcaggagcttgtggaaataccttggctgatgttgcagcctgcagcaagtgcttccgtctccggaatccttggggagcacttgtccacgtcttttctcatatcatggtagtcactaacatatataaggtatgtgctattggcccagcttttagaaaatgcagtcatttttctaaataaaaaggaagtactgcacccagcagtgtcactctgtagttactgtggtcacttgtaccatatagaggtgtaacacttgtcaagaagcgttatgtgcagtacttaatgtttgtaagacttacaaaaaaagatttaaagtggcagcttcactcgacatttggtgagagaagtacaaaggttgcagtgctgagctgtgggcggtttctggggatgtcccagggtggaactccacatgctggtgcatatacgcccttgagctacttcaaatgtgggtgtttcagtaaccacgttccatgcctgaggatttagcagagaggaacactgcgtctttaaatgagaaagtatacaattctttttccttctacagcatgtcagcatctcaagttcatttttcaacctacagtataacaatttgtaataaagcctccaggagctcatgacgtgaagcactgttctgtcctcaagtactcaaatatttctgatactgctgagtcagactgtcagaaaaagctagcactaactcgtgtttggagctctatccatattttactgatctctttaagtatttgttcctgccactgtgtactgtggagttgactcggtgttctgtcccagtgcggtgcctcctcttgacttccccactgctctctgtggtgagaaatttgccttgttcaataattactgtaccctcgcatgactgttacagctttctgtgcagagatgactgtccaagtgccacatgcctacgattgaaatgaaaactctattgttacctctgagttgtgttccacggaaaatgctatccagcagatcatttaggaaaaataattctatttttagcttttcatttctcagctgtccttttttcttgtttgatttttgacagcaatggagaatgggttatataaagactgcctgctaatatgaacagaaatgcatttgtaattcatgaaaataaatgtacatcttctatcttcacattcatgttaagattcagtgttgctttcctctggatcagcgtgtctgaatggacagtcaggttcaggttgtgctgaacacagaaatgctcacaggcctcactttgccgcccaggcactggcccagcacttggatttacataagatgagttagaaaggtacttctgtagggtcctttttacctctgctcggcagagaatcgatgctgtcatgttcctttattcacaatcttaggtctcaaatattctgtcaaaccctaacaaagaagccccgacatctcaggttggattccctggttctctctaaagagggcctgcccttgtgccccagaggtgctgctgggcacagccaagagttgggaagggccgccccacagtacgcagtcctcaccacccagcccagggtgctcacgctcaccactcctgtggctgaggaaggatagctggctcatcctcggaaaacagacccacatctctattcttgccctgaaatacgcgcttttcacttgcgtgctcagagctgccgtctgaaggtccacacagcattgacgggacacagaaatgtgactgttaccggataacactgattagtcagttttcatttataaaaaagcattgacagttttattactcttgtttctttttaaatggaaagttactattataaggttaatttggagtcctcttctaaatagaaaaccatatccttggctactaacatctggagactgtgagctccttcccattccccttcctggtactgtggagtcagattggcatgaaaccactaacttcattctagaatcattgtagccataagttgtgtgctttttattaatcatgccaaacataatgtaactgggcagagaatggtcctaaccaaggtacctatgaaaagcgctagctatcatgtgtagtagatgcatcattttggctcttcttacatttgtaaaaatgtacagattaggtcatcttaattcatattagtgacacggaacagcacctccactatttgtatgttcaaataagctttcagactaatagcttttttggtgtctaaaatgtaagcaaaaaattcctgctgaaacattccagtcctttcatttagtataaaagaaatactgaacaagccagtgggatggaattgaaagaactaatcatgaggactctgtcctgacacaggtcctcaaagctagcagagatacgcagacattgtggcatctgggtagaagaatactgtattgtgtgtgcagtgcacagtgtgtggtgtgtgcacactcattccttctgctcttgggcacaggcagtgggtgtagaggtaaccagtagctttgagaagctacatgtagctcaccagtggttttctctaaggaatcacaaaagtaaactacccaaccacatgccacgtaatatttcagccattcagaggaaactgttttctctttatttgcttatatgttaatatggtttttaaattggtaacttttatatagtatggtaacagtatgttaatacacacatacatacgcacacatgctttgggtccttccataatacttttatatttgtaaatcaatgttttggagcaatcccaagtttaagggaaatatttttgtaaatgtaatggttttgaaaatctgagcaatccttttgcttatacatttttaaagcatttgtgctttaaaattgttatgctggtgtttgaaacatgatactcctgtggtgcagatgagaagctataacagtgaatatgtggtttctcttacgtcatccaccttgacatgatgggtcagaaacaaatggaaatccagagcaagtcctccagggttgcaccaggtttacctaaagcttgttgccttttcttgtgctgtttatgcgtgtagagcactcaagaaagttctgaaactgctttgtatctgctttgtactgttggtgccttcttggtattgtaccccaaaattctgcatagattatttagtataatggtaagttaaaaaatgttaaaggaagattttattaagaatctgaatgtttattcattatattgttacaatttaacattaacatttatttgtggtatttgtgatttggttaatctgtataaaaattgtaagtagaaaggtttatatttcatcttaattcttttgatgttgtaaacgtactttttaaaagatggattatttgaatgtttatggcacctgacttgtaaaaaaaaaaaactacaaaaaaatccttagaatcattaaattgtgtccctgtattaccaaaataacacagcaccgtgcatgtatagtttaattgcagtttcatctgtgaaaacgtgaaattgtctagtccttcgttatgttccccagatgtcttccagatttgctctgcatgtggtaacttgtgttagggctgtgagctgttcctcgagttgaatggggatgtcagtgctcctagggttctccaggtggttcttcagaccttcacctgtgggggggggggtaggcggtgcccacgcccatctcctcatcctcctgaacttctgcaaccccactgctgggcagacatcctgggcaaccccttttttcagagcaagaagtcataaagataggatttcttggacatttggttcttatcaatattgggcattatgtaatgacttatttacaaaacaaagatactggaaaatgttttggatgtggtgttatggaaagagcacaggccttggacccatccagctgggttcagaactaccccctgcttataactgcggctggctgtgggccagtcattctgcgtctctgctttcttcctctgcttcagactgtcagctgtaaagtggaagcaatattacttgccttgtatatggtaaagattataaaaatacatttcaactgttcagcatagtacttcaaagcaagtactcagtaaatagcaagtctttttaaatgctgctttatttcactaaattttgttgtgaggtgtcactaaaatgcctgcaaacaaacgtaactgctaatctgagaggaaaccctcttactaatcagagaagaaaccctcctgtcagaaaccttcagggaagtgagctgatcacacctaaactgggagtttgcaatggggtatttgaagcactgtgggagtattccactggccctctccctgagagacttaacagtcttccctgttgtccagattctgtataaggcaatcagaataatcatcttccttgttcagcagaggagcctggtcccattttccccactttgtgatgggcttctctcagcggtagctcagcagttccagatggcagtttggaccagcatctaggctggccagttcgctgtgtttacttagaaccaacacgttcagagctggcctggaccatctgaggggaacaggaaacacccctaggctgtggaagcaagtgcagacccccacccccggccctgaagccaagggggcagggtttgggagtggccaaagagaagcagtgcagggatgggttttcctagggacaggcttagcattcctgactctaggaagaaggagcagtgaggcggagaaacagtggaggggatggtggcattgggccccatggggccgagatggacacagggctcgttctcttgagtctggtgccaaggacagctgaagacgacatcattttcaggtggagaggagagagtggagggagatcatgccctgtgatgtgtcttttgcaggtgaaggtgggagacaaggtctctgctgacgatgaggcagagccaccgtgaaagttgtaataggaggactgcccgccgctggaagggcctgcagtgacgctaggacaccctctgcctgcatgtcacgttagctgggctgggcgaagtagaagaccaaggggaagaggtgcagtggggagaccaggtgggatgcaaccacaggaccagtggaggggctgtggcacgtgggcggagactgagtggctgggcatgtgttgtggctgagcatgtggtgtgggcagtggtcctagaccccgccatgtccggacaatgatatagagcgtctcagcatcgccagtctagactgtctatggagagcagaaagttgtctggggctgcctggggaactgtgaggccagctatatcaccgtcgctgatggtgacattacggtggtggcaggagcaaggagagagggaagaaggaccccgtccagctttagtcacaaaatacccaatggaagatgccagtgccaatcctgtgggtttccttgggacttcacactggctttcttatctgctccagatccattcagtagtcactgagttcctgccaaatactttgtagcgccagaagccaggagcggggtctgcagcagggcagtccccattttcaggaaatgcctggagctgctggtccctgagagaaaggaaaacatctttcagccgtacgcaggccaagaaggccaatgtccagtagctttgtgattttttttatatttttttatttatttatttttgagatagagtcttgctctgtcgctcaggctggagtgcagtggcgtgatctccactcactgcaacttccgcctcctggggtcaagcagttctgcctcagcctcccgagtagctgggattacaggcacacgccaccacacccagctaatttttgtgtttttagtagagacggtttcaccatgtcggccaggctggtctcaaactcctgacctcagatgattcagcctcccaaagtgctgggattacaggtgtgagccactgcacccagcctgtgatgtttctgtggggttccacaaatgtgtgtgtgtgtaaaagctgatgattacagcaagaatgtgaacagtagcagttttccatttgaaggcaagttttgtctttatctgggtatcagaaggaccctctgggccattgtcgcttcctgtactcagagccaccctagtactacgggcacacacagaaaacagcagcctgcgtactttcaaaggaaaggcatctttaatcaccaatgcctggaaaaattattttgtttccctcttccttccgtcttgtttcctaacttcttaccaaagtttagagtctgagtttttcgtataataatgtcccacatccacacatcgggcctacagatgctctcccttgaatcgactggaaacatgacaccggttccatgctctggaactgtcacctgtgatgtgctgggctgtgtcccaagcacaggaatcccagcagtttcagctcgatgcagaaccaccatgctccagacacaggcttgggaaagacacgtcaaaattaaaatactaggtaagagaagcacctgattgggtagaagttggagaggaatcctggaattttgtggccagaaggagccactgccccttttgtttagtaagactagacagtaacagaagccagttgtcagctatgaaagtggtgggtgaagcaggggaggctcctctatggtgggaccctggacaagggaagccgaatgtgtgaagaaggggtgcgggggtgtgcggtgccctaggacactagggcaaaggtttcaaacctggaacaaggcactggaggaagatctgctgccagtcagcagtgcgggccctcgagttagcagtccgtgcgcagaggggccagttctgagaccagtttggagagtcaggcagtgacccattggccatgtcataattccttcagcctgcctcctctttaatcccagagagtgctctttcttcatacttcctttaaaatactaaattgttcccattccatggggagctggctaggctttacaggctaggaaatgtaggttttctgagatggaaccatctacacaaggaggaggaaggcactaagactacagatgagacccatgacagggctgagcatttggaagccaaccctggttgcttttcaagaattgctttgtggctgggtgcagtggttcacacctgtaattgcagcactttgggaggctgaggcaggtggattgcttgaacccaggagttcgagaccagcctgggcaacatatgggacaccccaccgcccccggctctgcaaaaaaattaaaaattagccaggcgtggtgtcatgagcctgtggtctcaactactcaggaggctgaggctggaggatcgcttgaacctgggaggtcaaggctccagtgaaccataattgtgccactgcactgcagcctgggcgacaatttgttttctaaattgcttttgaaagtctactgcattacatattccaaaaagcagtggttttcaaatacttttatcaccgatatccttttatgaaatgaaatcagtagaactttctctgctctgaataagcaagggtgggaacctgtctacctcccacagatagcataatgtgcctgccatagaggagccaaaaaatggtgatgggaactgagaggagagcaaatgtcacaaaagactgagcaattgagaaaacaaaacaagaccacagatgactgttaacgcctccacagtggaccaagaaaggacagagagctggcagcatgggcatcactgtctggtcggcagcaggaaggcctcgctagggaattgagtacagtcatctaactagtttaaaagtacaggaaggatgattaaggctattggagaggtcatacaaataggggaggggcaggcaatggctgataagacatgaatttgtaaggcgatgagtattgcagtcagcaaaacaaacgagactgctctcccaacacataactcagcagggaggccaggcattggtttaaccatttaatataaagaagttaaaattacaaatgcgctaagtgcctaaagaagaataagtgcaggaatgagagcagcatggactgccacagttttagaataagcactgtcactgctagattggaaacaaaaatccataaatttggcccggtgtggtggcggacgcctgtagtcccagctacttggaggctgaggcgtgagaatcgcttgaacccgggaggcggaggttgcagtgagccgagatggcgccactgcactccagcctgggcgtcagagtgagaactctgtatcaaaaaataaaaataaaaaaaagtccataaatctgcaatgtctcagttaagaaagaaagactgggccaatgcagatttcaaaccggagaaagtcatactgtcagtgaaggccgcctgtggccggaaggcgccaggggattagcaccctggactcagtgttgctgggaaacagggccccaaggctgggagcacagtgtttaaagggcatctacccaagaagggagcacagggcaaggaggagctgcaggggggcttggctgccaaagtgaattctgaggagagagctattgctgcctacgatatgcaggctgcacagaacacaagtggaatcagcaggcaggagaggcagctaacgacgcagcccgtttcttatttctgttttctcacaagcgatgaaagtggaaaagagggtgagcaggtggcccacacatgtgcctccagtgctgcggcccctccggggaccatcagccaggccccggggagggagccagccacagtgtgtccggctcttctctgaagggaagagagccttgaatagactgaagcgaagacggttctgcaaggacaaggcagaccgaaggcattggttttttttttcagataaggagaattagactcccaagtagacaccagagtcactgtttggttggtgggtgatagtggggtcacagtggctgcctgtgctcccccagggtgagcgtgactgtgctaacctgggtggggcagcatgcacacccctctggcagccctttgttgctcgctgatgacaagtttggatgatcccgccaaacagcttgctaagatgtagtccccagtgttggaggtggggcctgatgggaggtgctacccttgtgagataaggttgtgtaaaagcctgtggcacctccccacactgacgctctcacccctgctctggccatgtgccgcgcctgctcccacttccccttctgccaggagtaaaagcccccgagacctcccagaagccaagcagatgctagtgccatgcttcctctgcagcctgcagaactgtgagccaattaaacctcttttctctataaa

SEQ ID NO: 154799 - DNA, 1487 bp, Homo sapiens
  Payload ID: 10439
  Gene Symbol: MAPK1
  Gene Name: mitogen-activated protein kinase 1
  Uniprot ID: P28482
  ENST ID: ENST00000398822
  CDS Start-End: 241-1323
gcccctccctccgcccgcccgccggcccgcccgtcagtctggcaggcaggcaggcaatcggtccgagtggctgtcggctcttcagctctcccgctcggcgtcttccttcctcctcccggtcagcgtcggcggctgcaccggcggcggcgcagtccctgcgggaggggcgacaagagctgagcggcggccgccgagcgtcgagctcagcgcggcggaggcggcggcggcccggcagccaacatggcggcggcggcggcggcgggcgcgggcccggagatggtccgcgggcaggtgttcgacgtggggccgcgctacaccaacctctcgtacatcggcgagggcgcctacggcatggtgtgctctgcttatgataatgtcaacaaagttcgagtagctatcaagaaaatcagcccctttgagcaccagacctactgccagagaaccctgagggagataaaaatcttactgcgcttcagacatgagaacatcattggaatcaatgacattattcgagcaccaaccatcgagcaaatgaaagatgtatatatagtacaggacctcatggaaacagatctttacaagctcttgaagacacaacacctcagcaatgaccatatctgctattttctctaccagatcctcagagggttaaaatatatccattcagctaacgttctgcaccgtgacctcaagccttccaacctgctgctcaacaccacctgtgatctcaagatctgtgactttggcctggcccgtgttgcagatccagaccatgatcacacagggttcctgacagaatatgtggccacacgttggtacagggctccagaaattatgttgaattccaagggctacaccaagtccattgatatttggtctgtaggctgcattctggcagaaatgctttctaacaggcccatctttccagggaagcattatcttgaccagctgaaccacattttgggtattcttggatccccatcacaagaagacctgaattgtataataaatttaaaagctaggaactatttgctttctcttccacacaaaaataaggtgccatggaacaggctgttcccaaatgctgactccaaagctctggacttattggacaaaatgttgacattcaacccacacaagaggattgaagtagaacaggctctggcccacccatatctggagcagtattacgacccgagtgacgagcccatcgccgaagcaccattcaagttcgacatggaattggatgacttgcctaaggaaaagctcaaagaactaatttttgaagagactgctagattccagccaggatacagatcttaaatttgtcaggtacctggagtttaatacagtgagctctagcaagggaggcgctgccttttgtttctagaatattatgttcctcaaggtccattattttgtattcttttccaagctccttattggaaggtatttttttaaatttagaattaaaaattatttagaaa

SEQ ID NO: 154800 - DNA, 951 bp, Homo sapiens
  Payload ID: 10439
  Gene Symbol: MAPK1
  Gene Name: mitogen-activated protein kinase 1
  Uniprot ID: P28482
  ENST ID: ENST00000544786
  CDS Start-End: 1-951
atggcggcggcggcggcggcgggcgcgggcccggagatggtccgcgggcaggtgttcgacgtggggccgcgctacaccaacctctcgtacatcggcgagggcgcctacggcatggtgtgctctgcttatgataatgtcaacaaagttcgagtagctatcaagaaaatcagcccctttgagcaccagacctactgccagagaaccctgagggagataaaaatcttactgcgcttcagacatgagaacatcattggaatcaatgacattattcgagcaccaaccatcgagcaaatgaaagatgtatatatagtacaggacctcatggaaacagatctttacaagctcttgaagacacaacacctcagcaatgaccatatctgctattttctctaccagatcctcagagggttaaaatatatccattcagctaacgttctgcaccgtgacctcaagccttccaacctgctgctcaacaccacctgtgatctcaagatctgtgactttggcctggcccgtgttgcagatccagaccatgatcacacagggttcctgacagaatatgtggccacacgttggtacagggctccagaaattatgttgaattccaagggctacaccaagtccattgatatttggtctgtaggctgcattctggcagaaatgctttctaacaggcccatctttccagggaagcattatcttgaccagctgaaccacattttggctctggacttattggacaaaatgttgacattcaacccacacaagaggattgaagtagaacaggctctggcccacccatatctggagcagtattacgacccgagtgacgagcccatcgccgaagcaccattcaagttcgacatggaattggatgacttgcctaaggaaaagctcaaagaactaatttttgaagagactgctagattccagccaggatacagatcttaa

SEQ ID NO: 154801 - DNA, 6480 bp, Homo sapiens
  Payload ID: 10440
  Gene Symbol: MAPK1IP1L
  Gene Name: mitogen-activated protein kinase 1 interacting protein 1-like
  Uniprot ID: Q8NDC0
  ENST ID: ENST00000395468
  CDS Start-End: 178-915
aggcggtgcgctcggcgcttcctgttccggcgccaggaggagccgcgcgctgctggtgctgttgccgccgctgctctagctgccgtcagtcaggctgcgcccgcgtcttcagggcccagtccctcggacccatcgccgcttctagaccctactgcggtctcggatattgccgggaaaatgtctgatgaattttcgttggcagatgcactacctgaacactcccctgccaaaacctctgctgtgagcaatacaaaacctggccaacctcctcaaggctggccaggctccaacccttggaataatccgagtgctccatcttcagtgccatctggactcccaccaagtgcaacaccctccactgtgccttttggaccagcaccaacaggaatgtatccctccgtgcctcccaccggaccacctccaggacccccagcaccctttcctccttccggaccatcatgtcccccacctggtggtccttatccagccccaactgtgccgggccctggccccacagggccatatcctacaccaaatatgccctttccagagctacccagaccatatggtgcacccacagatccagctgcagctggtcctttaggtccatggggatccatgtcttctggaccttgggcgccaggaatgggagggcagtatcctacccctaatatgccatatccatctccaggcccatatcccgctcctcctcctccccaagcccctggggcagcaccacctgttccatggggcaccgttccaccaggagcctggggaccaccagcaccatatcctgcccctacaggatcgtatcccacaccaggactctatcctactcccagtaatcctttccaagtgccttcaggaccttctggtgctccaccaatgcctggtggcccccattcttaccattaagttaacaatggacgaagagatgacgctttgctttttgaagtacatgtatatgcacatgaatgcatatataaaaattgctggtttcactattagagggcattcatgaaagaacaactcttgcacctctcagagaagataactgcctcttgtacttggatgcgtagtacatcatatgtatacaatcagataaaagcatagaagtaaatcattcggatgtgatttttatttggttttcatggaaagttaaagtgataaagtatattgaatagttctttgacagaatttgtttaaactatgaaactacacacttaaaaatctaagatgtggattattgttagaatctgcaacttcattggcaaattatttcaagtatttttctataatcactttccccttctaaataaataaacttcgagaataacccatcataatccaaacaaatgatgcctcaacattttgagctgctctgtcggacaaataaacctggtcctcttgaggttatattttggatatacatttttaaactgtcagtaattattgtcagatgtggagttcaatagccagccagtgttcatttttatccttgagcttttagtaaaaacttcctggttttatttttagtcattgggtcatacagcactaaagtctgctatttatggaaactaacttttttgtttttaatccaggccaacatgtatgtaaattaaatttttagataattgattatctctttgtactacttgagatttgattatgagatgtgcatattgctttgggaagagctcgaggaaggaaataattctctcctttgttttgaacctcaaactagataaaccctaggaattgcttaactgcaacaagtaattttcattcccacaaaaacctgaggcagctcttttgcccagagcgttccctgtagccacccccaccccacttgcccttggttctttagaaggagcacacacatcccttgattcctccctgatgtggtaaactggcacactccaggggtctaaaacataaaacagttgtgtttagggaaccttaagtcatgcagacatgactgttctctttgtacaagtgtgaatcaaaatatgtatctctttttcagagtctggttaagctatgtcattgtctactgcatagtttcctgagtctgtttgtaaagtgcttatggctaacagttcagttctgtatttgttgacaggtaaataagtggagttgagtgccatctttgaaaaaattaccctctagctctaacactgaaaataataataaattgtagatctctgcaactaagtttaaagcagtgtgactgtgttgcttaaatatcaagtattgtttataaccaccaaaaaaaaaaagccctggtagttttttggcaccttatgtttaaatcagattcttagatttggagtagacctgaccttgttatttattagataacattttgaatgtatccattggatttctaaaatgtattgtgaatttctcagacaaacaggatttatgctggagctctgttttgcttagaaataaaatatttagtagtttatttctgctctaattaaaatgtcaagaatgccaaatgctgccagttttttggtttgatagctacctccttctaagaaagcaaaatggttacctttgagaggaacattcagtgtttaatcatcccttatgttaactagatgatagattcaagcttttagaaatgagaaagtagaaactaatttgttaagatattttcagactgcggaatgttgttagctttttctttcacttctcttcaaggacaggtgttagctgtctacaatactgttgaactctgttgtcaaagtagcccccttagtctacaaggcaggtagccttggcttgaattatcaatatcaaaatgtcagttaaccatggagggataaagtaatgtgaaaagtgagatggctgcaaagatagctctccttacagttattttggctgtcctacattgggataagctgacaaattagcagtatttagtttaacactggagcaaatataatttgagtaggaagaagagatagcaggtttgggaatctataattatgaagtccattgattttgggagaaaatctgttgctaaaggatttgaagggccatgaacacaatttgggattattactccctataagtataataattttgctagtgacccatactgtccagtgtgccctaaatcatactgctattgtactccctttgttttcaaggactttgcaactggtatttgggggagatttttttttttttttgagacggagtctcgctctgtcgcccatgctggagtgcagtggtgctatcttggttcactgcaagctccatctcccaggttcacaccattctcctgcctcagcctcccaagcagctgggactacaggtgcccgccaccatgcccggctaatttttttttttttttttttttagtagagatggggtttcactgtgttagccaggatggtctcgatctcctgacctcgtgatctgcccgccttggcttcccaaagtgctgggattacaggcgtgagccaccacgtccggccgatttttttttttttttttaatgtaagaatggagataaaagggataatataatttgcttttatattgttatttttgtaaagcatcttttcttcaattcttgttggcattctgggccaaaatatttcaggttggttcggtgtggagttaagaaaagcaggcgttttagtggagaaatggggaacagcatcaagaaaggcttttttccttttttcttttttttttggagacagagtcttgccctgtcacccaggctggagtgcaatggcgtgatcttggctcgctgcaacctctgcctccaggttcaaacgattcttctgcctcagcctcccaagtagctgggattacaggtgcccgccaccacacccatttttgtatttttagtagagacgggggtttcaccatgttggccagggtggtctgaaactcctgacctcgtgatccgcctgcctcagcctcccaaagtgctgagattacaggcgtgagccaccatgcgtgacctttttttctttttaaaagggaacaatgttgctttcaaaacaagacatgctaggctgaaactgatttatggaaaagactgcttgttagcaagtatatttggtcttgagggggatacagattatagaatatgctgacatttgggcttcagaggaagaattttcaaatctaatggaaatagttgaggtgttcaggaatgctgtttcttggagttggaagcttaggttttgaaatgttgaaaccaaaaagacaaaaattaaaacatagaccttaggtcgtcattcacacccggttctcaagaatcaagtggagcacttcaaagaccttggcttgtctgtcccatcctgccactttctcatcttttcatgcttttgaagacaccatttacagctctgactcagccctattttgtgtaaagtaatatattgattattcagaaatagacaatacattttttaattacccaaggactgactgttttgtgcattttactgttggttgtcttcagtagagaatagtaatagggcagagaaaagtatatattttgcctcagtcagtcccaccaccacaatggactattgggatattttctaaaaaaccaatcaatttgcccatgattacctcacaaataattagtgctacctggggtactctcaaatatacagcttttgaaactgtagatgaaaaaagctctactcagagtttttgtcaagactgtgcctgggttgaatatcagtcaattgcctacacttctaaacaataagtgccaatgtctcaattttctcaccctgaatgatagaagctagctttatcaaatgccaaggttagaaagcctggaaataaaacttaagcacagacattcaagtttttgaaaagcataagcctaaattcagataaatcacactgatatattgtactatgcatagaaagttgtaggtggcgttcagggaagactttgattttaataaagcaatatttagtattgaagacaaacactttttattttcagatttctgccaagtaaaacagaaattgccaataaaataatcagtattttgtaaatggcaggcaagcttctggctgtcgaaaacatctgagtcatttattcagtagacaatatgtccttgatccaggttctttgccagctataagggaatccctgtccttgagaggctcatagtctataagtaacattacagaatttgttagcatacccattcattattagttttacctaaacgtgttaggatcactactggtggaaattgtaaccagcctttgggcatcttaaagggtgacatgtggcatgcctttttttttttttaagaatttaatgtttttcaagattgtagtgttgatcagcgcaacaattcaagtgtgcaaagtaacaggatagtttgcctcttcactttacccctggataaaggcactttcactgcctgtcactgatcagcagatactgacttgttgccattaagtgaacttgacttcttatgtgtgctctatgagtttgttgtaattttcttcttgaaattgtgatttttcactgacagtaatgacaaatttaatgtatgtaattgtctatgcattttaagttaaactgcctaaaatgtgatttgagacatatacatatgtttgtattataaattgtaagcaatcagtttgagatactaggttttatcacctgctgctgtatttgtaaacaaagacaaatgttgctttaagaagtaattataattaggaataggctatggatgtgatacttggtattttttaagataaacttgtttgcttttgtgtattatacctggaaactttttttaaaaaatgtattttcatggtttcacagatttttcatgttattttattctttaggcccaattctgggcttctctgagcaagtccagagcctaattaactgtaaatttgttgtcaaaaaggaagaaaaaagggcctgagatacctctttgcatgtgacctgcattcactaaggatatctggaaaccacccttcctccgcaaaccctctcagcaacatggtgtccattgtggtgattttctcttcttttaaggctaggctactcttggtaaccagattatccgtatatatgataatatgaagtcagggaactttctctgtctgtccctactcccctcactcccccactttctgttatgaaagatagttctacttttatcattaactgctacgcatttagtgagggtcacattattaaacttggagtttaccattttcccacaggagatttcgctggcattccttggaactcccaatttcagtagggcaatgaatgaatgaatactttgcagtgctacttttggaaggaatttctgctttttgccttatgattggacaaaatgcagctgtaaaattttaaattgtttttgatatgttattcaatatcccatgaaagtattcacctaaagtggagttatgaaatggatggtgaaataataagaccattctggagca

SEQ ID NO: 154802 - DNA, 2836 bp, Homo sapiens
  Payload ID: 10440
  Gene Symbol: MAPK1IP1L
  Gene Name: mitogen-activated protein kinase 1 interacting protein 1-like
  Uniprot ID: Q8NDC0
  ENST ID: ENST00000622254
  CDS Start-End: 126-863
ctggtgctgttgccgccgctgctctagctgccgtcagtcaggctgcgcccgcgtcttcagggcccagtccctcggacccatcgccgcttctagaccctactgcggtctcggatattgccgggaaaatgtctgatgaattttcgttggcagatgcactacctgaacactcccctgccaaaacctctgctgtgagcaatacaaaacctggccaacctcctcaaggctggccaggctccaacccttggaataatccgagtgctccatcttcagtgccatctggactcccaccaagtgcaacaccctccactgtgccttttggaccagcaccaacaggaatgtatccctccgtgcctcccaccggaccacctccaggacccccagcaccctttcctccttccggaccatcatgtcccccacctggtggtccttatccagccccaactgtgccgggccctggccccacagggccatatcctacaccaaatatgccctttccagagctacccagaccatatggtgcacccacagatccagctgcagctggtcctttaggtccatggggatccatgtcttctggaccttgggcgccaggaatgggagggcagtatcctacccctaatatgccatatccatctccaggcccatatcccgctcctcctcctccccaagcccctggggcagcaccacctgttccatggggcaccgttccaccaggagcctggggaccaccagcaccatatcctgcccctacaggatcgtatcccacaccaggactctatcctactcccagtaatcctttccaagtgccttcaggaccttctggtgctccaccaatgcctggtggcccccattcttaccattaagttaacaatggacgaagagatgacgctttgctttttgaagtacatgtatatgcacatgaatgcatatataaaaattgctggtttcactattagagggcattcatgaaagaacaactcttgcacctctcagagaagataactgcctcttgtacttggatgcgtagtacatcatatgtatacaatcagataaaagcatagaagtaaatcattcggatgtgatttttatttggttttcatggaaagttaaagtgataaagtatattgaatagttctttgacagaatttgtttaaactatgaaactacacacttaaaaatctaagatgtggattattgttagaatctgcaacttcattggcaaattatttcaagtatttttctataatcactttccccttctaaataaataaacttcgagaataacccatcataatccaaacaaatgatgcctcaacattttgagctgctctgtcggacaaataaacctggtcctcttgaggttatattttggatatacatttttaaactgtcagtaattattgtcagatgtggagttcaatagccagccagtgttcatttttatccttgagcttttagtaaaaacttcctggttttatttttagtcattgggtcatacagcactaaagtctgctatttatggaaactaacttttttgtttttaatccaggccaacatgtatgtaaattaaatttttagataattgattatctctttgtactacttgagatttgattatgagatgtgcatattgctttgggaagagctcgaggaaggaaataattctctcctttgttttgaacctcaaactagataaaccctaggaattgcttaactgcaacaagtaattttcattcccacaaaaacctgaggcagctcttttgcccagagcgttccctgtagccacccccaccccacttgcccttggttctttagaaggagcacacacatcccttgattcctccctgatgtggtaaactggcacactccaggggtctaaaacataaaacagttgtgtttagggaaccttaagtcatgcagacatgactgttctctttgtacaagtgtgaatcaaaatatgtatctctttttcagagtctggttaagctatgtcattgtctactgcatagtttcctgagtctgtttgtaaagtgcttatggctaacagttcagttctgtatttgttgacaggtaaataagtggagttgagtgccatctttgaaaaaattaccctctagctctaacactgaaaataataataaattgtagatctctgcaactaagtttaaagcagtgtgactgtgttgcttaaatatcaagtattgtttataaccaccaaaaaaaaaaagccctggtagttttttggcaccttatgtttaaatcagattcttagatttggagtagacctgaccttgttatttattagataacattttgaatgtatccattggatttctaaaatgtattgtgaatttctcagacaaacaggatttatgctggagctctgttttgcttagaaataaaatatttagtagtttatttctgctctaattaaaatgtcaatttacccctggataaaggcactttcactgcctgtcactgatcagcagatactgacttgttgccattaagtgaacttgacttcttatgtgtgctctatgagtttgttgtaattttcttcttgaaattgtgatttttcactgacagtaatgacaaatttaatgtatgtaattgtctatgcattttaagttaaactgcctaaaatgtgatttgagacatatacatatgtttgtattataaattgtaagcaatcagtttgagatactaggttttatcacctgctgctgtatttgtaaacaaagacaaatgttgctttaagaagtaattataattaggaataggctatggatgtgatacttggtattttttaagataaacttgtttgcttttgtgtatt

SEQ ID NO: 154803 - DNA, 2477 bp, Homo sapiens
  Payload ID: 10441
  Gene Symbol: MAPK10
  Gene Name: mitogen-activated protein kinase 10
  ENST ID: ENST00000310816
  CDS Start-End: 392-823
cctgtgaggccaggcagaaatggcgtggcaggggacccagcgagcccagagggattttgccgctgcttcctctacccctgtatttcacgcagctctctaaattgactcagctccagaaccataattatcatgtgatctagacctgatacattgtagatgaagaaacatgtcgacagagccactatctgcccaacatctgatgggtagtcatagtcacagtggaactgagactaaggtttccatttttatttgactatgcttcttcccaaggctagtgtgagaaacaccaacagcaggcccatctcagatcttcactatggcaacttatgcaagaaactgttgaattagacccgtttcctatagatgagaaaccatacaagctgtggtatttatgagcctccatttcttatactactgcagtgaaccaacattggatgtgaaaattgccttttgtcagggattcgataaacaagtggatgtgtcatatattgccaaacattacaacatgagcaaaagcaaagttgacaaccagttctacagtgtggaagtgggagactcaaccttcacagttctcaagcgctaccagaatctaaagcctattggctctggggctcagggcatagtttgtgccgcgtatgatgctgtccttgacagaaatgtggccattaagaagctcagcagaccctttcagaaccaaacacatgccaagagagcgtaccgggagctggtcctcatgaagtgtgtgaaccataaaaacttacttagtaatggaactgatggatgccaacttatgtcaagtgattcagatggaattagaccatgagcgaatgtcttacctgctgtaccaaatgttgtgtggcattaagcacctccattctgctggaattattcacagggatttaaaaccaagtaacattgtagtcaagtctgattgcacattgaaaatcctggactttggactggccaggacagcaggcacaagcttcatgatgactccatatgtggtgacacgttattacagagcccctgaggtcatcctggggatgggctacaaggagaacgttgacatgtggtcagtagggtgcatcatgggagaaatgataaaaggtgcagtgctgtttcctggcactgatcatattgaccagtggaataaggtaattgaacaactaggaacaccatgtccagaattcatgaagaaattgcaacccacagtaagaaactatgtggagaatcggcccaagtatgcgggactcaccttccccaaactcttcccagattccctcttcccagcggactccgagcacaataaactcaaagccagccaagccagggacttgttgtcaaagatgctagtgattgacccagcaaaaagaatatcagtggacgacgccttacagcatccctacatcaacgtctggtatgacccagccgaagtggaggcgcctccacctcagatatatgacaagcagttggatgaaagagaacacacaattgaagaatggaaagaacttatctacaaggaagtaatgaattcagaagaaaagactaaaaatggtgtagtaaaaggacagccttctccttcaggtgcagcagtgaacagcagtgagagtctccctccatcctcgtctgtcaatgacatctcctccatgtccaccgaccagaccctggcatctgacactgacagcagcctggaagcctcggcaggacccctgggttgttgcaggtgactagccgcctgcctgcgaaacccagcgttcttcaggagatgatgtgatggaacacacacacacgcagacacacacacacacacaaatgcagacacacaacatcaagaaaacagcaagggagagaatccaagcctaaaattaaataaatctttcagcctgcttcttccccagggttctgtattgcagctaagctcaaatgtatatttaacttctagttgctcttgctttggtcttcttccaatgatgcttactacagaaagcaaatcagacacaattagagaagccttttccataaagtgtaattttaatggctgcaaaaccggcaacctgtaactgcccttttaaatggcatgacaaggtgtgcagtggccccatccagcatgtgtgtgtctctatcttgcatctacctgctccttggcctagtcagatggatgtagatacagatccgcatgtgtctgtattcatacagcactacttacttagagatgctactgtcagtgtcctcagggctctaccaagacataatgcactggggtaccacatggtccatttcatgtgatctattactctgacataaacccatctgtaatatattgccagtatataagctgtttagtttgttaattgattaaactgtatgtcttataagaaaacatgtaaagggggaatatatggggggagtgagctctctcagacccttgaagatgtagcttccaaatttgaatggattaaatggcacctgtataccaa

SEQ ID NO: 154804 - DNA, 2672 bp, Homo sapiens
  Payload ID: 10441
  Gene Symbol: MAPK10
  Gene Name: mitogen-activated protein kinase 10
  Uniprot ID: P53779
  ENST ID: ENST00000359221
  CDS Start-End: 528-1922
ggtaggttccacaatggtacaggcagcatcacgctgcacaatggtttccaggcagtgaaagagggtgattcagcaagccactcttcttctattttctttaacctccccttcactttttatttttatgggggtgggtggtgcttgctatatgcttacctttttcttttcttttttcatttttacaaatttccttttttgtcctcacccctcaattcctaggggcttgagtgagtttaagattgggttttcttggaaatcacctgtccatcgttaattttaaacaatctccatatctccaaagaatctcttccatgttagtctggaatgtggttaatgaaaaacaagtagggaggatttctggggcaaacactgccggatcaggatcgtagttctcaggcacggaatggctagtgtgagaaacaccaacagcaggcccatctcagatcttcactatggcaacttatgcaagaaactgttgaattagacccgtttcctatagatgagaaaccatacaagctgtggtatttatgagcctccatttcttatactactgcagtgaaccaacattggatgtgaaaattgccttttgtcagggattcgataaacaagtggatgtgtcatatattgccaaacattacaacatgagcaaaagcaaagttgacaaccagttctacagtgtggaagtgggagactcaaccttcacagttctcaagcgctaccagaatctaaagcctattggctctggggctcagggcatagtttgtgccgcgtatgatgctgtccttgacagaaatgtggccattaagaagctcagcagaccctttcagaaccaaacacatgccaagagagcgtaccgggagctggtcctcatgaagtgtgtgaaccataaaaacattattagtttattaaatgtcttcacaccccagaaaacgctggaggagttccaagatgtttacttagtaatggaactgatggatgccaacttatgtcaagtgattcagatggaattagaccatgagcgaatgtcttacctgctgtaccaaatgttgtgtggcattaagcacctccattctgctggaattattcacagggatttaaaaccaagtaacattgtagtcaagtctgattgcacattgaaaatcctggactttggactggccaggacagcaggcacaagcttcatgatgactccatatgtggtgacacgttattacagagcccctgaggtcatcctggggatgggctacaaggagaacgtggatatatggtctgtgggatgcattatgggagaaatggttcgccacaaaatcctctttccaggaagggactatattgaccagtggaataaggtaattgaacaactaggaacaccatgtccagaattcatgaagaaattgcaacccacagtaagaaactatgtggagaatcggcccaagtatgcgggactcaccttccccaaactcttcccagattccctcttcccagcggactccgagcacaataaactcaaagccagccaagccagggacttgttgtcaaagatgctagtgattgacccagcaaaaagaatatcagtggacgacgccttacagcatccctacatcaacgtctggtatgacccagccgaagtggaggcgcctccacctcagatatatgacaagcagttggatgaaagagaacacacaattgaagaatggaaagaacttatctacaaggaagtaatgaattcagaagaaaagactaaaaatggtgtagtaaaaggacagccttctccttcaggtgcagcagtgaacagcagtgagagtctccctccatcctcgtctgtcaatgacatctcctccatgtccaccgaccagaccctggcatctgacactgacagcagcctggaagcctcggcaggacccctgggttgttgcaggtgactagccgcctgcctgcgaaacccagcgttcttcaggagatgatgtgatggaacacacacacacgcagacacacacacacacacaaatgcagacacacaacatcaagaaaacagcaagggagagaatccaagcctaaaattaaataaatctttcagcctgcttcttccccagggttctgtattgcagctaagctcaaatgtatatttaacttctagttgctcttgctttggtcttcttccaatgatgcttactacagaaagcaaatcagacacaattagagaagccttttccataaagtgtaattttaatggctgcaaaaccggcaacctgtaactgcccttttaaatggcatgacaaggtgtgcagtggccccatccagcatgtgtgtgtctctatcttgcatctacctgctccttggcctagtcagatggatgtagatacagatccgcatgtgtctgtattcatacagcactacttacttagagatgctactgtcagtgtcctcagggctctaccaagacataatgcactggggtaccacatggtccatttcatgtgatctattactctgacataaacccatctgtaatatattgccagtatataagctgtttagtttgttaattgattaaactgtatgtcttataagaaaacatgtaaagggggaatatatggggggagtgagctctctcagacccttgaagatgtagcttccaaatttgaatggattaaatggcacctgtataccaa

SEQ ID NO: 154805 - DNA, 2371 bp, Homo sapiens
  Payload ID: 10441
  Gene Symbol: MAPK10
  Gene Name: mitogen-activated protein kinase 10
  Uniprot ID: P53779
  ENST ID: ENST00000361569
  CDS Start-End: 223-1491
agaaatggcgtggcaggggacccagcgagcccagagggattttgccgctgcttcctctacccctgtatttcacgcagctctctaaattgactcagctccaggctagtgtgagaaacaccaacagcaggcccatctcagatcttcactatggcaacttatgcaagaaactgttgaattagacccgtttcctatagatgagaaaccatacaagctgtggtatttatgagcctccatttcttatactactgcagtgaaccaacattggatgtgaaaattgccttttgtcagggattcgataaacaagtggatgtgtcatatattgccaaacattacaacatgagcaaaagcaaagttgacaaccagttctacagtgtggaagtgggagactcaaccttcacagttctcaagcgctaccagaatctaaagcctattggctctggggctcagggcatagtttgtgccgcgtatgatgctgtccttgacagaaatgtggccattaagaagctcagcagaccctttcagaaccaaacacatgccaagagagcgtaccgggagctggtcctcatgaagtgtgtgaaccataaaaacattattagtttattaaatgtcttcacaccccagaaaacgctggaggagttccaagatgtttacttagtaatggaactgatggatgccaacttatgtcaagtgattcagatggaattagaccatgagcgaatgtcttacctgctgtaccaaatgttgtgtggcattaagcacctccattctgctggaattattcacagggatttaaaaccaagtaacattgtagtcaagtctgattgcacattgaaaatcctggactttggactggccaggacagcaggcacaagcttcatgatgactccatatgtggtgacacgttattacagagcccctgaggtcatcctggggatgggctacaaggagaacgtggatatatggtctgtgggatgcattatgggagaaatggttcgccacaaaatcctctttccaggaagggactatattgaccagtggaataaggtaattgaacaactaggaacaccatgtccagaattcatgaagaaattgcaacccacagtaagaaactatgtggagaatcggcccaagtatgcgggactcaccttccccaaactcttcccagattccctcttcccagcggactccgagcacaataaactcaaagccagccaagccagggacttgttgtcaaagatgctagtgattgacccagcaaaaagaatatcagtggacgacgccttacagcatccctacatcaacgtctggtatgacccagccgaagtggaggcgcctccacctcagatatatgacaagcagttggatgaaagagaacacacaattgaagaatggaaagaacttatctacaaggaagtaatgaattcagaagaaaagactaaaaatggtgtagtaaaaggacagccttctccttcagcacaggtgcagcagtgaacagcagtgagagtctccctccatcctcgtctgtcaatgacatctcctccatgtccaccgaccagaccctggcatctgacactgacagcagcctggaagcctcggcaggacccctgggttgttgcaggtgactagccgcctgcctgcgaaacccagcgttcttcaggagatgatgtgatggaacacacacacacgcagacacacacacacacacaaatgcagacacacaacatcaagaaaacagcaagggagagaatccaagcctaaaattaaataaatctttcagcctgcttcttccccagggttctgtattgcagctaagctcaaatgtatatttaacttctagttgctcttgctttggtcttcttccaatgatgcttactacagaaagcaaatcagacacaattagagaagccttttccataaagtgtaattttaatggctgcaaaaccggcaacctgtaactgcccttttaaatggcatgacaaggtgtgcagtggccccatccagcatgtgtgtgtctctatcttgcatctacctgctccttggcctagtcagatggatgtagatacagatccgcatgtgtctgtattcatacagcactacttacttagagatgctactgtcagtgtcctcagggctctaccaagacataatgcactggggtaccacatggtccatttcatgtgatctattactctgacataaacccatctgtaatatattgccagtatataagctgtttagtttgttaattgattaaactgtatgtcttataagaaaacatgtaaagggggaatatatggggggagtgagctctctcagacccttgaagatgtagcttccaaatttgaatggattaaatggcacctgtatacca

SEQ ID NO: 154806 - DNA, 1828 bp, Homo sapiens
  Payload ID: 10441
  Gene Symbol: MAPK10
  Gene Name: mitogen-activated protein kinase 10
  ENST ID: ENST00000395157
  CDS Start-End: 119-1078
gacagaaatgtggccattaagaagctcagcagaccctttcagaaccaaacacatgccaagagagcgtaccgggagctggtcctcatgaagtgtgtgaaccataaaaacttacttagtaatggaactgatggatgccaacttatgtcaagtgattcagatggaattagaccatgagcgaatgtcttacctgctgtaccaaatgttgtgtggcattaagcacctccattctgctggaattattcacagggatttaaaaccaagtaacattgtagtcaagtctgattgcacattgaaaatcctggactttggactggccaggacagcaggcacaagcttcatgatgactccatatgtggtgacacgttattacagagcccctgaggtcatcctggggatgggctacaaggagaacgtggatatatggtctgtgggatgcattatgggagaaatggttcgccacaaaatcctctttccaggaagggactatattgaccagtggaataaggtaattgaacaactaggaacaccatgtccagaattcatgaagaaattgcaacccacagtaagaaactatgtggagaatcggcccaagtatgcgggactcaccttccccaaactcttcccagattccctcttcccagcggactccgagcacaataaactcaaagccagccaagccagggacttgttgtcaaagatgctagtgattgacccagcaaaaagaatatcagtggacgacgccttacagcatccctacatcaacgtctggtatgacccagccgaagtggaggcgcctccacctcagatatatgacaagcagttggatgaaagagaacacacaattgaagaatggaaagaacttatctacaaggaagtaatgaattcagaagaaaagactaaaaatggtgtagtaaaaggacagccttctccttcaggtgcagcagtgaacagcagtgagagtctccctccatcctcgtctgtcaatgacatctcctccatgtccaccgaccagaccctggcatctgacactgacagcagcctggaagcctcggcaggacccctgggttgttgcaggtgactagccgcctgcctgcgaaacccagcgttcttcaggagatgatgtgatggaacacacacacacgcagacacacacacacacacaaatgcagacacacaacatcaagaaaacagcaagggagagaatccaagcctaaaattaaataaatctttcagcctgcttcttccccagggttctgtattgcagctaagctcaaatgtatatttaacttctagttgctcttgctttggtcttcttccaatgatgcttactacagaaagcaaatcagacacaattagagaagccttttccataaagtgtaattttaatggctgcaaaaccggcaacctgtaactgcccttttaaatggcatgacaaggtgtgcagtggccccatccagcatgtgtgtgtctctatcttgcatctacctgctccttggcctagtcagatggatgtagatacagatccgcatgtgtctgtattcatacagcactacttacttagagatgctactgtcagtgtcctcagggctctaccaagacataatgcactggggtaccacatggtccatttcatgtgatctattactctgacataaacccatctgtaatatattgccagtatataagctgtttagtttgttaattgattaaactgtatgtcttataagaaaacatgtaaagggggaatatatggggggagtgagctctctcagacccttgaagatgtagcttccaaatttgaatggattaaatggcacctgtataccaa

SEQ ID NO: 154807 - DNA, 2154 bp, Homo sapiens
  Payload ID: 10441
  Gene Symbol: MAPK10
  Gene Name: mitogen-activated protein kinase 10
  Uniprot ID: P53779
  ENST ID: ENST00000395160
  CDS Start-End: 442-1275
aattatatgctatattcttggcaagatctttttcttctcctttgccctcttctactccttccccccttctcctgtttctccttcttcccttcctccaactcttcttcatcctcctagcatgtagaatattcttatgccagtcactcatatctttacttaaagcctgattggcatgtgaccagagtagacagtatctaagattccgaaatagcattttctttaccagtatccttaatcaagtaggcaagagttctaaggaatcttttgttcttaattctgagttgctcttggatctctacagtgccgcgtatgatgctgtccttgacagaaatgtggccattaagaagctcagcagaccctttcagaaccaaacacatgccaagagagcgtaccgggagctggtcctcatgaagtgtgtgaaccataaaaacttacttagtaatggaactgatggatgccaacttatgtcaagtgattcagatggaattagaccatgagcgaatgtcttacctgctgtaccaaatgttgtgtggcattaagcacctccattctgctggaattattcacagggatttaaaaccaagtaacattgtagtcaagtctgattgcacattgaaaatcctggactttggactggccaggacagcaggcacaagcttcatgatgactccatatgtggtgacacgttattacagagcccctgaggtcatcctggggatgggctacaaggagaacgtggatatatggtctgtgggatgcattatgggagaaatggttcgccacaaaatcctctttccaggaagggactatattgaccagtggaataaggtaattgaacaactaggaacaccatgtccagaattcatgaagaaattgcaacccacagtaagaaactatgtggagaatcggcccaagtatgcgggactcaccttccccaaactcttcccagattccctcttcccagcggactccgagcacaataaactcaaagccagccaagccagggacttgttgtcaaagatgctagtgattgacccagcaaaaagaatatcagtggacgacgccttacagcatccctacatcaacgtctggtatgacccagccgaagtggaggcgcctccacctcagatatatgacaagcagttggatgaaagagaacacacaattgaagaatggaaagaacttatctacaaggaagtaatgaattcagaagaaaagactaaaaatggtgtagtaaaaggacagccttctccttcagcacaggtgcagcagtgaacagcagtgagagtctccctccatcctcgtctgtcaatgacatctcctccatgtccaccgaccagaccctggcatctgacactgacagcagcctggaagcctcggcaggacccctgggttgttgcaggtgactagccgcctgcctgcgaaacccagcgttcttcaggagatgatgtgatggaacacacacacacgcagacacacacacacacacaaatgcagacacacaacatcaagaaaacagcaagggagagaatccaagcctaaaattaaataaatctttcagcctgcttcttccccagggttctgtattgcagctaagctcaaatgtatatttaacttctagttgctcttgctttggtcttcttccaatgatgcttactacagaaagcaaatcagacacaattagagaagccttttccataaagtgtaattttaatggctgcaaaaccggcaacctgtaactgcccttttaaatggcatgacaaggtgtgcagtggccccatccagcatgtgtgtgtctctatcttgcatctacctgctccttggcctagtcagatggatgtagatacagatccgcatgtgtctgtattcatacagcactacttacttagagatgctactgtcagtgtcctcagggctctaccaagacataatgcactggggtaccacatggtccatttcatgtgatctattactctgacataaacccatctgtaatatattgccagtatataagctgtttagtttgttaattgattaaactgtatgtcttataagaaaacatgtaaagggggaatatatggggggagtgagctctctcagacccttgaagatgtagcttccaaatttgaatggattaaatggcacctgtatacc

SEQ ID NO: 154808 - DNA, 4186 bp, Homo sapiens
  Payload ID: 10441
  Gene Symbol: MAPK10
  Gene Name: mitogen-activated protein kinase 10
  ENST ID: ENST00000395161
  CDS Start-End: 1122-2081
ttcaccggaaaacacagtagctgtagctgcacatagacgcttcctctttctgtttccccctcatccccctccctagacctctctgggctttgacgtcatgtgtgctcctttcggttgccatagcaaccccattccccaagccctctgtccgtctcctctggtaggttccacaatggtacaggcagcatcacgctgcacaatggtttccaggcagtgaaagagggtgattcagcaagccactcttcttctattttctttaacctccccttcactttttatttttatgggggtgggtggtgcttgctatatgcttacctttttcttttcttttttcatttttacaaatttccttttttgtcctcacccctcaattcctaggggcttgagtgagtttaagattgggttttcttggaaatcacctgtccatcgttaattttaaacaatctccatatctccaaagaatctcttccatgttagtctggaatgtggttaatgaaaaacaagtagggaggatttctggggcaaacactgccggatcaggatcgtagttctcaggcacggaatggctagtgtgagaaacaccaacagcaggcccatctcagatcttcactatggcaacttatgcaagaaactgttgaattagacccgtttcctatagatgagaaaccatacaagctgtggtatttatgagcctccatttcttatactactgcagtgaaccaacattggatgtgaaaattgccttttgtcagggattcgataaacaagtggatgtgtcatatattgccaaacattacaacatgagcaaaagcaaagttgacaaccagttctacagtgtggaagtgggagactcaaccttcacagttctcaagcgctaccagaatctaaagcctattggctctggggctcagggcatagtttgtgccgcgtatgatgctgtccttgacagaaatgtggccattaagaagctcagcagaccctttcagaaccaaacacatgccaagagagcgtaccgggagctggtcctcatgaagtgtgtgaaccataaaaacattattagtttattaaatgtcttcacaccccagaaaacgctggaggagttccaagatgtttacttagtaatggaactgatggatgccaacttatgtcaagtgattcagatggaattagaccatgagcgaatgtcttacctgctgtaccaaatgttgtgtggcattaagcacctccattctgctggaattattcacagggatttaaaaccaagtaacattgtagtcaagtctgattgcacattgaaaatcctggactttggactggccaggacagcaggcacaagcttcatgatgactccatatgtggtgacacgttattacagagcccctgaggtcatcctggggatgggctacaaggagaacgttgacatgtggtcagtagggtgcatcatgggagaaatgataaaaggtgcagtgctgtttcctggcactgatcatattgaccagtggaataaggtaattgaacaactaggaacaccatgtccagaattcatgaagaaattgcaacccacagtaagaaactatgtggagaatcggcccaagtatgcgggactcaccttccccaaactcttcccagattccctcttcccagcggactccgagcacaataaactcaaagccagccaagccagggacttgttgtcaaagatgctagtgattgacccagcaaaaagaatatcagtggacgacgccttacagcatccctacatcaacgtctggtatgacccagccgaagtggaggcgcctccacctcagatatatgacaagcagttggatgaaagagaacacacaattgaagaatggaaagaacttatctacaaggaagtaatgaattcagaagaaaagactaaaaatggtgtagtaaaaggacagccttctccttcaggtgcagcagtgaacagcagtgagagtctccctccatcctcgtctgtcaatgacatctcctccatgtccaccgaccagaccctggcatctgacactgacagcagcctggaagcctcggcaggacccctgggttgttgcaggtgactagccgcctgcctgcgaaacccagcgttcttcaggagatgatgtgatggaacacacacacacgcagacacacacacacacacaaatgcagacacacaacatcaagaaaacagcaagggagagaatccaagcctaaaattaaataaatctttcagcctgcttcttccccagggttctgtattgcagctaagctcaaatgtatatttaacttctagttgctcttgctttggtcttcttccaatgatgcttactacagaaagcaaatcagacacaattagagaagccttttccataaagtgtaattttaatggctgcaaaaccggcaacctgtaactgcccttttaaatggcatgacaaggtgtgcagtggccccatccagcatgtgtgtgtctctatcttgcatctacctgctccttggcctagtcagatggatgtagatacagatccgcatgtgtctgtattcatacagcactacttacttagagatgctactgtcagtgtcctcagggctctaccaagacataatgcactggggtaccacatggtccatttcatgtgatctattactctgacataaacccatctgtaatatattgccagtatataagctgtttagtttgttaattgattaaactgtatgtcttataagaaaacatgtaaagggggaatatatggggggagtgagctctctcagacccttgaagatgtagcttccaaatttgaatggattaaatggcacctgtataccaatttgtagaaagaacatatgtgatacttatgtaaagtgtggggcgagtgggtaacagttttcaggcacaaaatggtttggccttctgaaggcaggtgtgaataaaagctgagagtcttttctgtgacagtaaagagtaggagagactggagggtagtgtgtggtgtggactaagactgaaaggaggttattacccagatactaggagacactggtgtccctgttttagagatttggctctatacccatttgtcatttctcaattactggtcacaacaagaggccactggagaaagtggcaggtggtgaagcaaggttattgtgtgtgcttttgatgataagaatctctctctggaactgagcagaattgcctccatgtgaattccttcaacaaaaaaatgagcctgcctagactactttcagattgtggattgtgttttccatgtgtgggctgcttccctgattcatactctgccaaagttttattttgagaaataatattactttcctcttctgaaataaaataataataataataatgaaacccccaaaccacagtgtgagtctcaggttagcatttgaaaacatctccagagacattgttattcctcaggagtttccctgactccttaatgtggctgatgtttcatgtttatttatttattttaataagtatgagcaatcgaagggctgatcatctgagttttgtactgcagtagatgtaagagcaataactctgcccataaatttactgctgccaaatagttttagcaatatgagtttgtcttaaaagccatgaagcattaatgtcaatgtttagcaaaatctccagaatttagcttaaattaaattaaatgaaagtgctttcctgagcacttaaggaggcactgtgaaacatcttggttatgtacaaggcaataccaaggtgatctcagcaataatcaggcttcccttcttattcacttcgaagtatccatcacagttatttgcactctgaccatgttggtgctcactagagtggtgatatttcacctgaagaagtgaaagacaggaagtggatggttgatgagtgtgaactgattggcaaatagaatatccccaaaacagagcaaacaagaatgccagtgctctgaaaactgccttaaatataataatagggaactttctttctctcttcaagcaatagagaccacagggaactgcacccacctgcaccatcgccatgccagtggtgctgccattctgagattatttcacacagtcagattcagtacacgcagtcatttgtttaaaataaatagaagaacattcctttgtgcagcttgtcccctggaataaaaatggcccattttctcta

SEQ ID NO: 154809 - DNA, 3081 bp, Homo sapiens
  Payload ID: 10441
  Gene Symbol: MAPK10
  Gene Name: mitogen-activated protein kinase 10
  Uniprot ID: P53779
  ENST ID: ENST00000395166
  CDS Start-End: 1053-2333
attctgtgctgggatactgtgtcccctgcaaatgtcagagctcttttgaaaaaaaaatcagaaataagtatggcagtatatttgttagaatctatgtatttgtgccttcaacaaaataaatgtaatttactggaaaatctgtaagtaaatcaggctatagatattacaagaaaactatctatccatatatttttctcaccctccccaaacatttaaatctagagacctagtctctgcttttacccccttaaacagataacttcccagggtactgcaatttagccacagaaaaagaatggcttatgccacagcagtaggctctgaagcaatcacaaggttgtttacatgggctgcctttggtgcagagcctgacagtgtctgtacagcagccctgcctgcttctggccatgttgatgataacttttatgaacaaactgcaaggaagcaggctaagtcatatgggatagactacagttcaggtggaaggaaaacgagtgtaagtgcaccaggcattgccagcacaacatccaatatctccttctatccctcatcggctagttgtcggaccctggaagataacacagaatgcttatcaacatatttaaaatagttgcagtaaggaccatttctctcagagaagcttctgtgaattttctactttaggtgagcatatatgttacaaatatataacaaataaatatataagtatatcacaagcttctgactccacttcagaaccattagattttaggggctggatgctttggatgtagcggtttggctgcctctggctagtgtgagaaacaccaacagcaggcccatctcagatcttcactatggcaacttatgcaagaaactgttgaattagacccgtttcctatagatgagaaaccatacaagctgtggtatttatgagcctccatttcttatactactgcagtgaaccaacattggatgtgaaaattgccttttgtcaggtgtgtgttccttacaggtaaaacaagggattcgataaacaagtggatgtgtcatatattgccaaacattacaacatgagcaaaagcaaagttgacaaccagttctacagtgtggaagtgggagactcaaccttcacagttctcaagcgctaccagaatctaaagcctattggctctggggctcagggcatagtttgtgccgcgtatgatgctgtccttgacagaaatgtggccattaagaagctcagcagaccctttcagaaccaaacacatgccaagagagcgtaccgggagctggtcctcatgaagtgtgtgaaccataaaaacattattagtttattaaatgtcttcacaccccagaaaacgctggaggagttccaagatgtttacttagtaatggaactgatggatgccaacttatgtcaagtgattcagatggaattagaccatgagcgaatgtcttacctgctgtaccaaatgttgtgtggcattaagcacctccattctgctggaattattcacagggatttaaaaccaagtaacattgtagtcaagtctgattgcacattgaaaatcctggactttggactggccaggacagcaggcacaagcttcatgatgactccatatgtggtgacacgttattacagagcccctgaggtcatcctggggatgggctacaaggagaacgtggatatatggtctgtgggatgcattatgggagaaatggttcgccacaaaatcctctttccaggaagggactatattgaccagtggaataaggtaattgaacaactaggaacaccatgtccagaattcatgaagaaattgcaacccacagtaagaaactatgtggagaatcggcccaagtatgcgggactcaccttccccaaactcttcccagattccctcttcccagcggactccgagcacaataaactcaaagccagccaagccagggacttgttgtcaaagatgctagtgattgacccagcaaaaagaatatcagtggacgacgccttacagcatccctacatcaacgtctggtatgacccagccgaagtggaggcgcctccacctcagatatatgacaagcagttggatgaaagagaacacacaattgaagaatggaaagaacttatctacaaggaagtaatgaattcagaagaaaagactaaaaatggtgtagtaaaaggacagccttctccttcaggtgcagcagtgaacagcagtgagagtctccctccatcctcgtctgtcaatgacatctcctccatgtccaccgaccagaccctggcatctgacactgacagcagcctggaagcctcggcaggacccctgggttgttgcaggtgactagccgcctgcctgcgaaacccagcgttcttcaggagatgatgtgatggaacacacacacacgcagacacacacacacacacaaatgcagacacacaacatcaagaaaacagcaagggagagaatccaagcctaaaattaaataaatctttcagcctgcttcttccccagggttctgtattgcagctaagctcaaatgtatatttaacttctagttgctcttgctttggtcttcttccaatgatgcttactacagaaagcaaatcagacacaattagagaagccttttccataaagtgtaattttaatggctgcaaaaccggcaacctgtaactgcccttttaaatggcatgacaaggtgtgcagtggccccatccagcatgtgtgtgtctctatcttgcatctacctgctccttggcctagtcagatggatgtagatacagatccgcatgtgtctgtattcatacagcactacttacttagagatgctactgtcagtgtcctcagggctctaccaagacataatgcactggggtaccacatggtccatttcatgtgatctattactctgacataaacccatctgtaatatattgccagtatataagctgtttagtttgttaattgattaaactgtatgtcttataagaaaacatgtaaagggggaatatatggggggagtgagctctctcagacccttgaagatgtagcttccaaatttgaatggattaaatggcacctgtatacc

SEQ ID NO: 154810 - DNA, 4107 bp, Homo sapiens
  Payload ID: 10441
  Gene Symbol: MAPK10
  Gene Name: mitogen-activated protein kinase 10
  Uniprot ID: P53779
  ENST ID: ENST00000395169
  CDS Start-End: 722-2002
cctttcggttgccatagcaaccccattccccaagccctctgtccgtctcctctggtaggttccacaatggtacaggcagcatcacgctgcacaatggtttccaggcagtgaaagagggtgattcagcaagccactcttcttctattttctttaacctccccttcactttttatttttatgggggtgggtggtgcttgctatatgcttacctttttcttttcttttttcatttttacaaatttccttttttgtcctcacccctcaattcctaggggcttgagtgagtttaagattgggttttcttggaaatcacctgtccatcgttaattttaaacaatctccatatctccaaagaatctcttccatgttagtctggaatgtggttaatgaaaaacaagtagggaggatttctggggcaaacactgccggatcaggatcgtagttctcaggcacggaatggctagtgtgagaaacaccaacagcaggcccatctcagatcttcactatggcaacttatgcaagaaactgttgaattagacccgtttcctatagatgagaaaccatacaagctgtggtatttatgagcctccatttcttatactactgcagtgaaccaacattggatgtgaaaattgccttttgtcaggtgtgtgttccttacaggtaaaacaagggattcgataaacaagtggatgtgtcatatattgccaaacattacaacatgagcaaaagcaaagttgacaaccagttctacagtgtggaagtgggagactcaaccttcacagttctcaagcgctaccagaatctaaagcctattggctctggggctcagggcatagtttgtgccgcgtatgatgctgtccttgacagaaatgtggccattaagaagctcagcagaccctttcagaaccaaacacatgccaagagagcgtaccgggagctggtcctcatgaagtgtgtgaaccataaaaacattattagtttattaaatgtcttcacaccccagaaaacgctggaggagttccaagatgtttacttagtaatggaactgatggatgccaacttatgtcaagtgattcagatggaattagaccatgagcgaatgtcttacctgctgtaccaaatgttgtgtggcattaagcacctccattctgctggaattattcacagggatttaaaaccaagtaacattgtagtcaagtctgattgcacattgaaaatcctggactttggactggccaggacagcaggcacaagcttcatgatgactccatatgtggtgacacgttattacagagcccctgaggtcatcctggggatgggctacaaggagaacgtggatatatggtctgtgggatgcattatgggagaaatggttcgccacaaaatcctctttccaggaagggactatattgaccagtggaataaggtaattgaacaactaggaacaccatgtccagaattcatgaagaaattgcaacccacagtaagaaactatgtggagaatcggcccaagtatgcgggactcaccttccccaaactcttcccagattccctcttcccagcggactccgagcacaataaactcaaagccagccaagccagggacttgttgtcaaagatgctagtgattgacccagcaaaaagaatatcagtggacgacgccttacagcatccctacatcaacgtctggtatgacccagccgaagtggaggcgcctccacctcagatatatgacaagcagttggatgaaagagaacacacaattgaagaatggaaagaacttatctacaaggaagtaatgaattcagaagaaaagactaaaaatggtgtagtaaaaggacagccttctccttcaggtgcagcagtgaacagcagtgagagtctccctccatcctcgtctgtcaatgacatctcctccatgtccaccgaccagaccctggcatctgacactgacagcagcctggaagcctcggcaggacccctgggttgttgcaggtgactagccgcctgcctgcgaaacccagcgttcttcaggagatgatgtgatggaacacacacacacgcagacacacacacacacacaaatgcagacacacaacatcaagaaaacagcaagggagagaatccaagcctaaaattaaataaatctttcagcctgcttcttccccagggttctgtattgcagctaagctcaaatgtatatttaacttctagttgctcttgctttggtcttcttccaatgatgcttactacagaaagcaaatcagacacaattagagaagccttttccataaagtgtaattttaatggctgcaaaaccggcaacctgtaactgcccttttaaatggcatgacaaggtgtgcagtggccccatccagcatgtgtgtgtctctatcttgcatctacctgctccttggcctagtcagatggatgtagatacagatccgcatgtgtctgtattcatacagcactacttacttagagatgctactgtcagtgtcctcagggctctaccaagacataatgcactggggtaccacatggtccatttcatgtgatctattactctgacataaacccatctgtaatatattgccagtatataagctgtttagtttgttaattgattaaactgtatgtcttataagaaaacatgtaaagggggaatatatggggggagtgagctctctcagacccttgaagatgtagcttccaaatttgaatggattaaatggcacctgtataccaatttgtagaaagaacatatgtgatacttatgtaaagtgtggggcgagtgggtaacagttttcaggcacaaaatggtttggccttctgaaggcaggtgtgaataaaagctgagagtcttttctgtgacagtaaagagtaggagagactggagggtagtgtgtggtgtggactaagactgaaaggaggttattacccagatactaggagacactggtgtccctgttttagagatttggctctatacccatttgtcatttctcaattactggtcacaacaagaggccactggagaaagtggcaggtggtgaagcaaggttattgtgtgtgcttttgatgataagaatctctctctggaactgagcagaattgcctccatgtgaattccttcaacaaaaaaatgagcctgcctagactactttcagattgtggattgtgttttccatgtgtgggctgcttccctgattcatactctgccaaagttttattttgagaaataatattactttcctcttctgaaataaaataataataataataatgaaacccccaaaccacagtgtgagtctcaggttagcatttgaaaacatctccagagacattgttattcctcaggagtttccctgactccttaatgtggctgatgtttcatgtttatttatttattttaataagtatgagcaatcgaagggctgatcatctgagttttgtactgcagtagatgtaagagcaataactctgcccataaatttactgctgccaaatagttttagcaatatgagtttgtcttaaaagccatgaagcattaatgtcaatgtttagcaaaatctccagaatttagcttaaattaaattaaatgaaagtgctttcctgagcacttaaggaggcactgtgaaacatcttggttatgtacaaggcaataccaaggtgatctcagcaataatcaggcttcccttcttattcacttcgaagtatccatcacagttatttgcactctgaccatgttggtgctcactagagtggtgatatttcacctgaagaagtgaaagacaggaagtggatggttgatgagtgtgaactgattggcaaatagaatatccccaaaacagagcaaacaagaatgccagtgctctgaaaactgccttaaatataataatagggaactttctttctctcttcaagcaatagagaccacagggaactgcacccacctgcaccatcgccatgccagtggtgctgccattctgagattatttcacacagtcagattcagtacacgcagtcatttgtttaaaataaatagaagaacattcctttgtgcagcttgtcccctggaataaaaatggcccattttctcta

SEQ ID NO: 154811 - DNA, 2382 bp, Homo sapiens
  Payload ID: 10441
  Gene Symbol: MAPK10
  Gene Name: mitogen-activated protein kinase 10
  ENST ID: ENST00000449047
  CDS Start-End: 675-1634
ctctcttttccattttgttacagaaccataattatcatgtgatctagacctgatacattgtagatgaagaaacatgtcgacagagccactatctgcccaacatctgatgggtagtcatagtcacagtggaactgagactaaggtttccatttttatttgactatgcttcttcccaaggctagtgtgagaaacaccaacagcaggcccatctcagatcttcactatggcaacttatgcaagaaactgttgaattagacccgtttcctatagatgagaaaccatacaagctgtggtatttatgagcctccatttcttatactactgcagtgaaccaacattggatgtgaaaattgccttttgtcagggattcgataaacaagtggatgtgtcatatattgccaaacattacaacatgagcaaaagcaaagttgacaaccagttctacagtgtggaagtgggagactcaaccttcacagttctcaagcgctaccagaatctaaagcctattggctctggggctcagggcatagtttgtgccgcgtatgatgctgtccttgacagaaatgtggccattaagaagctcagcagaccctttcagaaccaaacacatgccaagagagcgtaccgggagctggtcctcatgaagtgtgtgaaccataaaaacttacttagtaatggaactgatggatgccaacttatgtcaagtgattcagatggaattagaccatgagcgaatgtcttacctgctgtaccaaatgttgtgtggcattaagcacctccattctgctggaattattcacagggatttaaaaccaagtaacattgtagtcaagtctgattgcacattgaaaatcctggactttggactggccaggacagcaggcacaagcttcatgatgactccatatgtggtgacacgttattacagagcccctgaggtcatcctggggatgggctacaaggagaacgttgacatgtggtcagtagggtgcatcatgggagaaatgataaaaggtgcagtgctgtttcctggcactgatcatattgaccagtggaataaggtaattgaacaactaggaacaccatgtccagaattcatgaagaaattgcaacccacagtaagaaactatgtggagaatcggcccaagtatgcgggactcaccttccccaaactcttcccagattccctcttcccagcggactccgagcacaataaactcaaagccagccaagccagggacttgttgtcaaagatgctagtgattgacccagcaaaaagaatatcagtggacgacgccttacagcatccctacatcaacgtctggtatgacccagccgaagtggaggcgcctccacctcagatatatgacaagcagttggatgaaagagaacacacaattgaagaatggaaagaacttatctacaaggaagtaatgaattcagaagaaaagactaaaaatggtgtagtaaaaggacagccttctccttcaggtgcagcagtgaacagcagtgagagtctccctccatcctcgtctgtcaatgacatctcctccatgtccaccgaccagaccctggcatctgacactgacagcagcctggaagcctcggcaggacccctgggttgttgcaggtgactagccgcctgcctgcgaaacccagcgttcttcaggagatgatgtgatggaacacacacacacgcagacacacacacacacacaaatgcagacacacaacatcaagaaaacagcaagggagagaatccaagcctaaaattaaataaatctttcagcctgcttcttccccagggttctgtattgcagctaagctcaaatgtatatttaacttctagttgctcttgctttggtcttcttccaatgatgcttactacagaaagcaaatcagacacaattagagaagccttttccataaagtgtaattttaatggctgcaaaaccggcaacctgtaactgcccttttaaatggcatgacaaggtgtgcagtggccccatccagcatgtgtgtgtctctatcttgcatctacctgctccttggcctagtcagatggatgtagatacagatccgcatgtgtctgtattcatacagcactacttacttagagatgctactgtcagtgtcctcagggctctaccaagacataatgcactggggtaccacatggtccatttcatgtgatctattactctgacataaacccatctgtaatatattgccagtatataagctgtttagtttgttaattgattaaactgtatgtcttataagaaaacatgtaaagggggaatatatggggggagtgagctctctcagacccttgaagatgtagcttccaaatttgaatggattaaatggcacctgtatacc

SEQ ID NO: 154812 - DNA, 489 bp, Homo sapiens
  Payload ID: 10441
  Gene Symbol: MAPK10
  Gene Name: mitogen-activated protein kinase 10
  ENST ID: ENST00000513186
  CDS Start-End: 344-489
gccccggttgccatgacaaccagtgccttgggcctggcttttcgcgttcttcggactagccagaggctcaggttggtgaccgagcggcagagttcctagcgcctgcagtgtggtgaactccaacttttaggccaagttgaaaatgcagccgacgacccccacacttctaacttcagaatcaaaactatgaccctagggagtgaggaggagagtgaaaaatgcgctagtgtgagaaacaccaacagcaggcccatctcagatcttcactatggcaacttatgcaagaaactgttgaattagacccgtttcctatagatgagaaaccatacaagctgtggtatttatgagcctccatttcttatactactgcagtgaaccaacattggatgtgaaaattgccttttgtcagggattcgataaacaagtggatgtgtcatatattgccaaacattacaacatgagcaaaagcaaagttgacaaccagttcta

SEQ ID NO: 154813 - DNA, 562 bp, Homo sapiens
  Payload ID: 10441
  Gene Symbol: MAPK10
  Gene Name: mitogen-activated protein kinase 10
  ENST ID: ENST00000506773
  CDS Start-End: 289-562
gtaagtgcaccaggcattgccagcacaacatccaatatctccttctatccctcatcggctagttgtcggaccctggaagataacacagaatgcttatcaacatatttaaaatagttgcagtaaggaccatttctctcagagaagcttctgtgaattttctactttaggctagtgtgagaaacaccaacagcaggcccatctcagatcttcactatggcaacttatgcaagaaactgttgaattagacccgtttcctatagatgagaaaccatacaagctgtggtatttatgagcctccatttcttatactactgcagtgaaccaacattggatgtgaaaattgccttttgtcagggattcgataaacaagtggatgtgtcatatattgccaaacattacaacatgagcaaaagcaaagttgacaaccagttctacagtgtggaagtgggagactcaaccttcacagttctcaagcgctaccagaatctaaagcctattggctctggggctcagggcatagtttgtgccgcgtatgatgctgtccttgacagaaatgtggcca

SEQ ID NO: 154814 - DNA, 581 bp, Homo sapiens
  Payload ID: 10441
  Gene Symbol: MAPK10
  Gene Name: mitogen-activated protein kinase 10
  ENST ID: ENST00000503911
  CDS Start-End: 430-581
agctttcccagtgcctccagcagccctcctcaaggacccctgtgaggccaggcagaaatggcgtggcaggggacccagcgagcccagagggattttgccgctgcttcctctacccctgtatttcacgcagctctctaaattgactcagctccagagacaggatctagttctgtcacccaggctggatggagtgcagtggcattatcatagctcattgcagccagaaactcctgtgcttgagtgatcctcctgcctcagccttcccaatggctgggactacaggttcaaaccactaggacagcatttgccacattattgttccactaatgaaccacctcagtggctatggagatgaaattagaggcgcagggttggtgtgtggagatgggtattgacagtcaattctcccagataatataacaggtatttatgagcctccatttcttatactactgcagtgaaccaacattggatgtgaaaattgccttttgtcagggattcgataaacaagtggatgtgtcatatattgccaaacattacaacatgagcaaaagcaaagttgacaaccagttctacagtgt

SEQ ID NO: 154815 - DNA, 569 bp, Homo sapiens
  Payload ID: 10441
  Gene Symbol: MAPK10
  Gene Name: mitogen-activated protein kinase 10
  ENST ID: ENST00000511328
  CDS Start-End: 218-569
tttcccagtgcctccagcagccctcctcaaggacccctgtgaggccaggcagaaatggcgtggcaggggacccagcgagcccagagggattttgccgctgcttcctctacccctgtatttcacgcagctctctaaattgactcagctccaggttcaaaccactaggacagcatttgccacattattgttccactaatgaaccacctcagtggtatttatgagcctccatttcttatactactgcagtgaaccaacattggatgtgaaaattgccttttgtcagggattcgataaacaagtggatgtgtcatatattgccaaacattacaacatgagcaaaagcaaagttgacaaccagttctacagtgtggaagtgggagactcaaccttcacagttctcaagcgctaccagaatctaaagcctattggctctggggctcagggcatagtttgtgccgcgtatgatgctgtccttgacagaaatgtggccattaagaagctcagcagaccctttcagaaccaaacacatgccaagagagcgtaccgggagctggtcctcatgaagtgtg

SEQ ID NO: 154816 - DNA, 743 bp, Homo sapiens
  Payload ID: 10441
  Gene Symbol: MAPK10
  Gene Name: mitogen-activated protein kinase 10
  ENST ID: ENST00000511167
  CDS Start-End: 380-743
ttcctctgctgttgcaaagtgtctttaatttgaggggctcctgttcttaaaaaatcctcacagtttcagtaaaacgattctggatagtgaggcagtaagaaattatatgtagagtgggaaaatcagctgcctccagcttcctgcctgctagccccagaacagcatctgctgttgagaggagtgtgtttgccatgctggaaggggatgtttatgaacagatcccagaggggctgagtgtgtttttgctgtcattgtctggctagtgtgagaaacaccaacagcaggcccatctcagatcttcactatggcaacttatgcaagaaactgttgaattagacccgtttcctatagatgagaaaccatacaagctgtggtatttatgagcctccatttcttatactactgcagtgaaccaacattggatgtgaaaattgccttttgtcagggattcgataaacaagtggatgtgtcatatattgccaaacattacaacatgagcaaaagcaaagttgacaaccagttctacagtgtggaagtgggagactcaaccttcacagttctcaagcgctaccagaatctaaagcctattggctctggggctcagggcatagtttgtgccgcgtatgatgctgtccttgacagaaatgtggccattaagaagctcagcagaccctttcagaaccaaacacatgccaagagagcgtaccgggagctggtcctcatgaagtgtgtgaaccataaaa

SEQ ID NO: 154817 - DNA, 564 bp, Homo sapiens
  Payload ID: 10441
  Gene Symbol: MAPK10
  Gene Name: mitogen-activated protein kinase 10
  ENST ID: ENST00000512564
  CDS Start-End: 313-564
ttagattttaggggctggatgctttggatgtagcggtttggctgcctctggctagtgtgagaaacaccaacagcaggcccatctcagatcttcactatggcaacttatgcaagaaactgttgaattagacccgtttcctatagatgagaaaccatacaagctgtggtatttatgagcctccatttcttatactactgcagtgaaccaacattggatgtgaaaattgccttttgtcaggtgtgtgttccttacaggtaaaacaagggattcgataaacaagtggatgtgtcatatattgccaaacattacaacatgagcaaaagcaaagttgacaaccagttctacagtgtggaagtgggagactcaaccttcacagttctcaagcgctaccagaatctaaagcctattggctctggggctcagggcatagtttgtgccgcgtatgatgctgtccttgacagaaatgtggccattaagaagctcagcagaccctttcagaaccaaacacatgccaagagagcgtaccgggagctggtcctcatgaagtgtgtgaaccataaaaac

SEQ ID NO: 154818 - DNA, 563 bp, Homo sapiens
  Payload ID: 10441
  Gene Symbol: MAPK10
  Gene Name: mitogen-activated protein kinase 10
  ENST ID: ENST00000502302
  CDS Start-End: 464-563
agtgccttgggcctggcttttcgcgttcttcggactagccagaggctcaggttggtgaccgagcggcagagttcctagcgcctgcagtgtggtgaactccaacttttaggccaagttgaaaatgcagccgacgacccccacacttctaacttcagaatcaaaactatgaccctagggagtgaggaggagagtgaaaaatgcgctagtgtgagaaacaccaacagcaggcccatctcagatcttcactatggcaacttatgcaagaaactgttgaattagacccgtttcctatagatgagaaaccatacaagctgtggtatttatgagcctccatttcttatactactgcagtgaaccaacattggatgtgaaaattgccttttgtcaggtgtgtgttccttacaggtaaaacaagggattcgataaacaagtggatgtgtcatatattgccaaacattacaacatgagcaaaagcaaagttgacaaccagttctacagtgtggaagtgggagactcaaccttcacagttctcaagcgctaccagaatctaaagcctattggct

SEQ ID NO: 154819 - DNA, 550 bp, Homo sapiens
  Payload ID: 10441
  Gene Symbol: MAPK10
  Gene Name: mitogen-activated protein kinase 10
  ENST ID: ENST00000509464
  CDS Start-End: 330-550
atgctggaaggggatgtttatgaacagatcccagaggggctgagtgtgtttttgctgtcattgtctggctagtgtgagaaacaccaacagcaggcccatctcagatcttcactatggcaacttatgcaagaaactgttgaattagacccgtttcctatagatgagaaaccatacaagctgtggtatttatgagcctccatttcttatactactgcagtgaaccaacattggatgtgaaaattgccttttgtcaggtgtgtgttccttacaggtaaaacaagggattcgataaacaagtggatgtgtcatatattgccaaacattacaacatgagcaaaagcaaagttgacaaccagttctacagtgtggaagtgggagactcaaccttcacagttctcaagcgctaccagaatctaaagcctattggctctggggctcagggcatagtttgtgccgcgtatgatgctgtccttgacagaaatgtggccattaagaagctcagcagaccctttcagaaccaaacacatgccaagagagcgtaccgggagct

SEQ ID NO: 154820 - DNA, 1331 bp, Homo sapiens
  Payload ID: 10441
  Gene Symbol: MAPK10
  Gene Name: mitogen-activated protein kinase 10
  ENST ID: ENST00000515400
  CDS Start-End: 1-1006
aaatgtggccattaagaagctcagcagaccctttcagaaccaaacacatgccaagagagcgtaccgggagctggtcctcatgaagtgtgtgaaccataaaaacattattagtttattaaatgtcttcacaccccagaaaacgctggaggagttccaagatgtttacttagtaatggaactgatggatgccaacttatgtcaagtgattcagatggaattagaccatgagcgaatgtcttacctgctgtaccaaatgttgtgtggcattaagcacctccattctgctggaattattcacagggatttaaaaccaagtaacattgtagtcaagtctgattgcacattgaaaatcctggactttggactggccaggacagcaggcacaagcttcatgatgactccatatgtggtgacacgttattacagagcccctgaggtcatcctggggatgggctacaaggagaacgttgacatgtggtcagtagggtgcatcatgggagaaatgataaaaggtgcagtgctgtttcctggcactgatcatattgaccagtggaataaggtaattgaacaactaggaacaccatgtccagaattcatgaagaaattgcaacccacagtaagaaactatgtggagaatcggcccaagtatgcgggactcaccttccccaaactcttcccagattccctcttcccagcggactccgagcacaataaactcaaagccagccaagccagggacttgttgtcaaagatgctagtgattgacccagcaaaaagaatatcagtggacgacgccttacagcatccctacatcaacgtctggtatgacccagccgaagtggaggcgcctccacctcagatatatgacaagcagttggatgaaagagaacacacaattgaagaatggaaagaacttatctacaaggaagtaatgaattcagaagaaaagactaaaaatggtgtagtaaaaggacagccttctccttcagcacaggtgcagcagtgaacagcagtgagagtctccctccatcctcgtctgtcaatgacatctcctccatgtccaccgaccagaccctggcatctgacactgacagcagcctggaagcctcggcaggacccctgggttgttgcaggtgactagccgcctgcctgcgaaacccagcgttcttcaggagatgatgtgatggaacacacacacacgcagacacacacacacacacaaatgcagacacacaacatcaagaaaacagcaagggagagaatccaagcctaaaattaaataaatctttcagcctgcttcttccccagggttctgtattgcagctaagctc

SEQ ID NO: 154821 - DNA, 595 bp, Homo sapiens
  Payload ID: 10441
  Gene Symbol: MAPK10
  Gene Name: mitogen-activated protein kinase 10
  ENST ID: ENST00000512017
  CDS Start-End: 173-595
attagattttaggggctggatgctttggatgtagcggtttggctgcctctggctagtgtgagaaacaccaacagcaggcccatctcagatcttcactatggcaacttatgcaagaaactgttgaattagacccgtttcctatagatgagaaaccatacaagctgtggtatttatgagcctccatttcttatactactgcagtgaaccaacattggatgtgaaaattgccttttgtcagggattcgataaacaagtggatgtgtcatatattgccaaacattacaacatgagcaaaagcaaagttgacaaccagttctacagtgtggaagtgggagactcaaccttcacagttctcaagcgctaccagaatctaaagcctattggctctggggctcagggcatagtttgtgccgcgtatgatgctgtccttgacagaaatgtggccattaagaagctcagcagaccctttcagaaccaaacacatgccaagagagcgtaccgggagctggtcctcatgaagtgtgtgaaccataaaaacattattagtttattaaatgtcttcacaccccagaaaacgctggaggagttccaagat

SEQ ID NO: 154822 - DNA, 722 bp, Homo sapiens
  Payload ID: 10441
  Gene Symbol: MAPK10
  Gene Name: mitogen-activated protein kinase 10
  ENST ID: ENST00000512689
  CDS Start-End: 568-722
ggtgcagagcctgacagtgtctgtacagcagccctgcctgcttctggccatgttgatgataacttttatgaacaaactgcaaggaagcaggctaagtcatatgggatagactacagttcaggtggaaggaaaacgagtgtaagtgcaccaggcattgccagcacaacatccaatatctccttctatccctcatcggctagttgtcggaccctggaagataacacagaatgcttatcaacatatttaaaatagttgcagtaaggaccatttctctcagagaagcttctgtgaattttctactttaggctagtgtgagaaacaccaacagcaggcccatctcagatcttcactatggcaacttatgcaagaaactgttgaattagacccgtttcctatagatgagaaaccatacaagctgtggtatttatgagcctccatttcttatactactgcagtgaaccaacattggatgtgaaaattgccttttgtcaggtgtgtgttccttacaggtaaaacaagggattcgataaacaagtggatgtgtcatatattgccaaacattacaacatgagcaaaagcaaagttgacaaccagttctacagtgtggaagtgggagactcaaccttcacagttctcaagcgctaccagaatctaaagcctattggctctggggctcagggcatagtttgtgccgcgtatgatgctgtccttgacagaaatgt

SEQ ID NO: 154823 - DNA, 2431 bp, Homo sapiens
  Payload ID: 10442
  Gene Symbol: MAPK11
  Gene Name: mitogen-activated protein kinase 11
  Uniprot ID: Q15759
  ENST ID: ENST00000330651
  CDS Start-End: 102-1196
cgccgcctccgccgccctccgctccgctcggctcgggctcggctcgggcgcgggcgcggggcgcggggctgggcccgggcggagcggcggctgctccggacatgtcgggccctcgcgccggcttctaccggcaggagctgaacaagaccgtgtgggaggtgccgcagcggctgcaggggctgcgcccggtgggctccggcgcctacggctccgtctgttcggcctacgacgcccggctgcgccagaaggtggcggtgaagaagctgtcgcgccccttccagtcgctgatccacgcgcgcagaacgtaccgggagctgcggctgctcaagcacctgaagcacgagaacgtcatcgggcttctggacgtcttcacgccggccacgtccatcgaggacttcagcgaagtgtacttggtgaccaccctgatgggcgccgacctgaacaacatcgtcaagtgccaggcgctgagcgacgagcacgttcaattcctggtttaccagctgctgcgcgggctgaagtacatccactcggccgggatcatccaccgggacctgaagcccagcaacgtggctgtgaacgaggactgtgagctcaggatcctggattttgggctggcgcgccaggcggacgaggagatgaccggctatgtggccacgcgctggtaccgggcacctgagatcatgctcaactggatgcattacaaccaaacagtggatatctggtccgtgggctgcatcatggctgagctgctccagggcaaggccctcttcccgggaagcgactacattgaccagctgaagcgcatcatggaagtggtgggcacacccagccctgaggttctggcaaaaatctcctcagaacacgcccggacatatatccagtccctgccccccatgccccagaaggacctgagcagcatcttccgtggagccaaccccctggccatagacctccttggaaggatgctggtgctggacagtgaccagagggtcagtgcagctgaggcactggcccacgcctacttcagccagtaccacgaccccgaggatgagccagaggccgagccatatgatgagagcgttgaggccaaggagcgcacgctggaggagtggaaggagctcacttaccaggaagtcctcagcttcaagcccccagagccaccgaagccacctggcagcctggagattgagcagtgaggtgctgcccagcagcccctgagagcctgtggaggggcttgggcctgcacccttccacagctggcctggtttcctcgagaggcacctcccacactcctatggtcacagacttctggcctaggacccctcgccttcaggagaatctacacgcatgtatgcatgcacaaacatgtgtgtacatgtgcttgccatgtgtaggagtctgggcacaagtgtccctgggcctaccttggtcctcctgtcctcttctggctactgcactctccactgggacctgactgtggggtcctagatgccaaaggggttcccctgcggagttcccctgtctgtcccaggccgacccaagggagtgtcagccttgggctctcttctgtcccagggctttctggaggacgcgctggggccgggaccccgggagactcaaagggagaggtctcagtggttagagctgctcagcctggaggtagggggctgtcttggtcactgctgagacccacaggtctaagaggagaggcagagccagtgtgccaccaggctgggcagggacaaccaccaggtgtcaaatgagaaaagctgcctggagtcttgtgttcacccgtgggtgtgtgtgggcacgtgtggatgagcgtgcactccccgtgttcatatgtcagggcacatgtgatgtggtgcgtgtgaatctgtgggcgcccaaggccagcagccatatctggcaagaagctggagccggggtgggtgtgctgttgccttccctctcctcggttcctgatgccttgaggggtgtttcagactggcggctccagtgggccaaagggcaaccacatgagcatgggcaggggctttctccttggatgtgggacccacagcagcttcctgaggctgggggtgggtgggtgggtggtttggccttgaggacgctagggcaggcagcacacctggatgtggacttggactcggacacttctgccctgcaccctggcccgctctctacctctgcccaccgttgtggccctgcagccggagatctgaggtgctctggtctgtgggtcagtcctctttccttgtcccaggatggagctgatccagtaacctcggagacgggaccctgcccagagctgagttgggggtgtggctctgccctggaaagggggtgacctcttgcctcgaggggcccagggaagcctgggtgtcaagtgcctgcaccaggggtgcacaataaagggggttctctctca

SEQ ID NO: 154824 - DNA, 1512 bp, Homo sapiens
  Payload ID: 10442
  Gene Symbol: MAPK11
  Gene Name: mitogen-activated protein kinase 11
  Uniprot ID: Q15759
  ENST ID: ENST00000395764
  CDS Start-End: 102-1196
cgccgcctccgccgccctccgctccgctcggctcgggctcggctcgggcgcgggcgcggggcgcggggctgggcccgggcggagcggcggctgctccggacatgtcgggccctcgcgccggcttctaccggcaggagctgaacaagaccgtgtgggaggtgccgcagcggctgcaggggctgcgcccggtgggctccggcgcctacggctccgtctgttcggcctacgacgcccggctgcgccagaaggtggcggtgaagaagctgtcgcgccccttccagtcgctgatccacgcgcgcagaacgtaccgggagctgcggctgctcaagcacctgaagcacgagaacgtcatcgggcttctggacgtcttcacgccggccacgtccatcgaggacttcagcgaagtgtacttggtgaccaccctgatgggcgccgacctgaacaacatcgtcaagtgccaggcgctgagcgacgagcacgttcaattcctggtttaccagctgctgcgcgggctgaagtacatccactcggccgggatcatccaccgggacctgaagcccagcaacgtggctgtgaacgaggactgtgagctcaggatcctggattttgggctggcgcgccaggcggacgaggagatgaccggctatgtggccacgcgctggtaccgggcacctgagatcatgctcaactggatgcattacaaccaaacagtggatatctggtccgtgggctgcatcatggctgagctgctccagggcaaggccctcttcccgggaagcgactacattgaccagctgaagcgcatcatggaagtggtgggcacacccagccctgaggttctggcaaaaatctcctcagaacacgcccggacatatatccagtccctgccccccatgccccagaaggacctgagcagcatcttccgtggagccaaccccctggccatagacctccttggaaggatgctggtgctggacagtgaccagagggtcagtgcagctgaggcactggcccacgcctacttcagccagtaccacgaccccgaggatgagccagaggccgagccatatgatgagagcgttgaggccaaggagcgcacgctggaggagtggaaggagctcacttaccaggaagtcctcagcttcaagcccccagagccaccgaagccacctggcagcctggagattgagcagtgaggtgctgcccagcagcccctgagagcctgtggaggggcttgggcctgcacccttccacagctggcctggtttcctcgagaggcacctcccacactcctatggtcacagacttctggcctaggacccctcgccttcaggagaatctacacgcatgatggagctgatccagtaacctcggagacgggaccctgcccagagctgagttgggggtgtggctctgccctggaaagggggtgacctcttgcctcgaggggcccagggaagcctgggtgtcaagtgcctgcaccaggggtgcacaataaagggggttctctct

SEQ ID NO: 154825 - DNA, 2409 bp, Homo sapiens
  Payload ID: 10442
  Gene Symbol: MAPK11
  Gene Name: mitogen-activated protein kinase 11
  ENST ID: ENST00000417877
  CDS Start-End: 102-593
cgccgcctccgccgccctccgctccgctcggctcgggctcggctcgggcgcgggcgcggggcgcggggctgggcccgggcggagcggcggctgctccggacatgtcgggccctcgcgccggcttctaccggcaggagctgaacaagaccgtgtgggaggtgccgcagcggctgcaggggctgcgcccggtgggctccggcgcctacggctccgtctgttcggcctacgacgcccggctgcgccagaaggtggcggtgaagaagctgtcgcgccccttccagtcgctgatccacgcgcgcagaacgtaccgggagctgcggctgctcaagcacctgaagcacgagaacgtcatcgggcttctggacgtcttcacgccggccacgtccatcgaggacttcagcgaagtgtacttggtgaccaccctgatgggcgccgacctgaacaacatcgtcaagtgccaggcgctgagcgacgagcacgttcaattcctggtttaccagctgctgcgcgggctgaagtacatccactcggccgggatcatccaccgggtaggacctgaagcccagcaacgtggctgtgaacgaggactgtgagctcaggatcctggattttgggctggcgcgccaggcggacgaggagatgaccggctatgtggccacgcgctggtaccgggcacctgagatcatgctcaactggatgcattacaaccaaacagtggatatctggtccgtgggctgcatcatggctgagctgctccagggcaaggccctcttcccgggaagcgactacattgaccagctgaagcgcatcatggaagtggtgggcacacccagccctgaggttctggcaaaaatctcctcagaacacgcccggacatatatccagtccctgccccccatgccccagaaggacctgagcagcatcttccgtggagccaaccccctggccatagacctccttggaaggatgctggtgctggacagtgaccagagggtcagtgcagctgaggcactggcccacgcctacttcagccagtaccacgaccccgaggatgagccagaggccgagccatatgatgagagcgttgaggccaaggagcgcacgctggaggagtggaaggagctcacttaccaggaagtcctcagcttcaagcccccagagccaccgaagccacctggcagcctggagattgagcagtgaggtgctgcccagcagcccctgagagcctgtggaggggcttgggcctgcacccttccacagctggcctggtttcctcgagaggcacctcccacactcctatggtcacagacttctggcctaggacccctcgccttcaggagaatctacacgcatgtatgcatgcacaaacatgtgtgtacatgtgcttgccatgtgtaggagtctgggcacaagtgtccctgggcctaccttggtcctcctgtcctcttctggctactgcactctccactgggacctgactgtggggtcctagatgccaaaggggttcccctgcggagttcccctgtctgtcccaggccgacccaagggagtgtcagccttgggctctcttctgtcccagggctttctggaggacgcgctggggccgggaccccgggagactcaaagggagaggtctcagtggttagagctgctcagcctggaggtagggggctgtcttggtcactgctgagacccacaggtctaagaggagaggcagagccagtgtgccaccaggctgggcagggacaaccaccaggtgtcaaatgagaaaagctgcctggagtcttgtgttcacccgtgggtgtgtgtgggcacgtgtggatgagcgtgcactccccgtgttcatatgtcagggcacatgtgatgtggtgcgtgtgaatctgtgggcgcccaaggccagcagccatatctggcaagaagctggagccggggtgggtgtgctgttgccttccctctcctcggttcctgatgccttgaggggtgtttcagactggcggctccagtgggccaaagggcaaccacatgagcatgggcaggggctttctccttggatgtgggacccacagcagcttcctgaggctgggggtgggtgggtgggtggtttggccttgaggacgctagggcaggcagcacacctggatgtggacttggactcggacacttctgccctgcaccctggcccgctctctacctctgcccaccgttgtggccctgcagccggagatctgaggtgctctggtctgtgggtcagtcctctttccttgtcccaggatggagctgatccagtaacctcggagacgggaccctgcccagagctgagttgggggtgtggctctgccctggaaagggggtgacctcttgcctcgaggggcccagggaagcctgggtgtcaagtgcctgcaccagggg

SEQ ID NO: 154826 - DNA, 1918 bp, Homo sapiens
  Payload ID: 10443
  Gene Symbol: MAPK12
  Gene Name: mitogen-activated protein kinase 12
  Uniprot ID: P53778
  ENST ID: ENST00000215659
  CDS Start-End: 317-1420
cggcggcggccgcctcgggtttccggaggggccggagggcgggcgagggcgtcacgtgcgcgccgcccgcgggccggttggtccccgggcgggggaggggccgtgcgcagcctgggtcggggtcgggccggggtcggcacctgggacatccctgagggaagggccgggagcgggagcgccccagcggccggcgggcgggcgggcgagcggacgagcggcgcggagccggcccgaggcgcgcgccgagggagccccgtccccggtcgtgggggcaccgcccgcaggctctgcggggtgggcagctcccgggcctgccatgagctctccgccgcccgcccgcagtggcttttaccgccaggaggtgaccaagacggcctgggaggtgcgcgccgtgtaccgggacctgcagcccgtgggctcgggcgcctacggcgcggtgtgctcggccgtggacggccgcaccggcgctaaggtggccatcaagaagctgtatcggcctttccagtccgagctgttcgccaagcgcgcctaccgcgagctgcgcctgctcaagcacatgcgccacgagaacgtgatcgggctgctggacgtattcactcctgatgagaccctggatgacttcacggacttttacctggtgatgccgttcatgggcaccgacctgggcaagctcatgaaacatgagaagctaggcgaggaccggatccagttcctcgtgtaccagatgctgaaggggctgaggtatatccacgctgccggcatcatccacagagacctgaagcccggcaacctggctgtgaacgaagactgtgagctgaagatcctggacttcggcctggccaggcaggcagacagtgagatgactgggtacgtggtgacccggtggtaccgggctcccgaggtcatcttgaattggatgcgctacacgcagacggtggacatctggtctgtgggctgcatcatggcggagatgatcacaggcaagacgctgttcaagggcagcgaccacctggaccagctgaaggagatcatgaaggtgacggggacgcctccggctgagtttgtgcagcggctgcagagcgatgaggccaagaactacatgaagggcctccccgaattggagaagaaggattttgcctctatcctgaccaatgcaagccctctggctgtgaacctcctggagaagatgctggtgctggacgcggagcagcgggtgacggcaggcgaggcgctggcccatccctacttcgagtccctgcacgacacggaagatgagccccaggtccagaagtatgatgactcctttgacgacgttgaccgcacactggatgaatggaagcgtgttacttacaaagaggtgctcagcttcaagcctccccggcagctgggggccagggtctccaaggagacgcctctgtgaagatctctgggctccggggtggcagtgaggaccaccttcaccttccacctgagaggggactctcgttgccaccttgaccttggctggggcttgcatcccaaggcatccatcagagcagacgcccgggttccatggaccctcctccccacggccatgcctctgctcttgggcgcccatcatggaggagcacctgaactttctggacaagacctctggccgacctggggatggcctctgatccctggagcagtggcccacttgcccggtgctctcagaaacctcagagctggtggggctccagatcaggccttggcctctgagccctgcctgctctgggccatgcagaggaaggacagagggtgggcgcagggcaccaactcagggacatcccctctcctgggcgacgtcagtggaccttcctgcacccccagcctggaatgtaaatcagctgtgtggtgcccgcgtggctggaaggaaatagacccttttgtagctccc

SEQ ID NO: 154827 - DNA, 605 bp, Homo sapiens
  Payload ID: 10443
  Gene Symbol: MAPK12
  Gene Name: mitogen-activated protein kinase 12
  ENST ID: ENST00000395778
  CDS Start-End: 35-394
aggctctgcggggtgggcagctcccgggcctgccatgagctctccgccgcccgcccgcagtggcttttaccgccaggaggtgaccaagacggcctgggaggtgcgcgccgtgtaccgggacctgcagcccgtgggctcgggcgcctacggcgcggtgtgctcggccgtggacggccgcaccggcgctaaggtggccatcaagaagctgtatcggcctttccagtccgagctgttcgccaagcgcgcctaccgcgagctgcgcctgctcaagcacatgcgccacgagaacgtgatcgggctgctggacgtattcactcctgatgagaccctggatgacttcacggacttgaaggtcccgtgctcgggaccctggcaccaagtgtgtggccggtaactggagctgctgaccttttccagcgggtgggggagaagcggtagggaggacccaccctgcccctgccctgcagccgaccaccctgggactcacaccctgtcggccaagagtgaagggccaggccgaggaaggcctggagagggtagcaggcgcctcccgcctgacttgcagaggtcaagtcagtggcctctgggaaggtgctaaataccat

SEQ ID NO: 154828 - DNA, 1459 bp, Homo sapiens
  Payload ID: 10443
  Gene Symbol: MAPK12
  Gene Name: mitogen-activated protein kinase 12
  ENST ID: ENST00000395780
  CDS Start-End: 128-961
tccgccccgcagctcggccgtggacggccgcaccggcgctaaggtggccatcaagaagctgtatcggcctttccagtccgagctgttcgccaagcgcgcctaccgcgagctgcgcctgctcaagcacatgcgccacgagaacgtgatcgggctgctggacgtattcactcctgatgagaccctggatgacttcacggacttttacctggtgatgccgttcatgggcaccgacctgggcaagctcatgaaacatgagaagctaggcgaggaccggatccagttcctcgtgtaccagatgctgaaggggctgagggacctgaagcccggcaacctggctgtgaacgaagactgtgagctgaagatcctggacttcggcctggccaggcaggcagacagtgagatgactgggtacgtggtgacccggtggtaccgggctcccgaggtcatcttgaattggatgcgctacacgcagacggtggacatctggtctgtgggctgcatcatggcggagatgatcacaggcaagacgctgttcaagggcagcgaccacctggaccagctgaaggagatcatgaaggtgacggggacgcctccggctgagtttgtgcagcggctgcagagcgatgaggccaagaactacatgaagggcctccccgaattggagaagaaggattttgcctctatcctgaccaatgcaagccctctggctgtgaacctcctggagaagatgctggtgctggacgcggagcagcgggtgacggcaggcgaggcgctggcccatccctacttcgagtccctgcacgacacggaagatgagccccaggtccagaagtatgatgactcctttgacgacgttgaccgcacactggatgaatggaagcgtgttacttacaaagaggtgctcagcttcaagcctccccggcagctgggggccagggtctccaaggagacgcctctgtgaagatctctgggctccggggtggcagtgaggaccaccttcaccttccacctgagaggggactctcgttgccaccttgaccttggctggggcttgcatcccaaggcatccatcagagcagacgcccgggttccatggaccctcctccccacggccatgcctctgctcttgggcgcccatcatggaggagcacctgaactttctggacaagacctctggccgacctggggatggcctctgatccctggagcagtggcccacttgcccggtgctctcagaaacctcagagctggtggggctccagatcaggccttggcctctgagccctgcctgctctgggccatgcagaggaaggacagagggtgggcgcagggcaccaactcagggacatcccctctcctgggcgacgtcagtggaccttcctgcacccccagcctggaatgtaaatcagctgtgtggtgcccgcgtggctggaaggaaatagacccttttgtagctccc

SEQ ID NO: 154829 - DNA, 1779 bp, Homo sapiens
  Payload ID: 10443
  Gene Symbol: MAPK12
  Gene Name: mitogen-activated protein kinase 12
  Uniprot ID: P53778
  ENST ID: ENST00000622558
  CDS Start-End: 208-1281
gcctgggtcggggtcgggccggggtcggcacctgggacatccctgagggaagggccgggagcgggagcgccccagcggccggcgggcgggcgggcgagcggacgagcggcgcggagccggcccgaggcgcgcgccgagggagccccgtccccggtcgtgggggcaccgcccgcaggctctgcggggtgggcagctcccgggcctgccatgagctctccgccgcccgcccgcagtggcttttaccgccaggaggtgaccaagacggcctgggaggtgcgcgccgtgtaccgggacctgcagcccgtgggctcgggcgcctacggcgcggtgtgctcggccgtggacggccgcaccggcgctaaggtggccatcaagaagctgtatcggcctttccagtccgagctgttcgccaagcgcgcctaccgcgagctgcgcctgctcaagcacatgcgccacgagaacgtgatcgggctgctggacgtattcactcctgatgagaccctggatgacttcacggacttttacctggtgatgccgttcatgggcaccgacctgggcaagctcatgaaacatgagaagctaggcgaggaccggatccagttcctcgtgtaccagatgctgaaggggctgagggacctgaagcccggcaacctggctgtgaacgaagactgtgagctgaagatcctggacttcggcctggccaggcaggcagacagtgagatgactgggtacgtggtgacccggtggtaccgggctcccgaggtcatcttgaattggatgcgctacacgcagacggtggacatctggtctgtgggctgcatcatggcggagatgatcacaggcaagacgctgttcaagggcagcgaccacctggaccagctgaaggagatcatgaaggtgacggggacgcctccggctgagtttgtgcagcggctgcagagcgatgaggccaagaactacatgaagggcctccccgaattggagaagaaggattttgcctctatcctgaccaatgcaagccctctggctgtgaacctcctggagaagatgctggtgctggacgcggagcagcgggtgacggcaggcgaggcgctggcccatccctacttcgagtccctgcacgacacggaagatgagccccaggtccagaagtatgatgactcctttgacgacgttgaccgcacactggatgaatggaagcgtgttacttacaaagaggtgctcagcttcaagcctccccggcagctgggggccagggtctccaaggagacgcctctgtgaagatctctgggctccggggtggcagtgaggaccaccttcaccttccacctgagaggggactctcgttgccaccttgaccttggctggggcttgcatcccaaggcatccatcagagcagacgcccgggttccatggaccctcctccccacggccatgcctctgctcttgggcgcccatcatggaggagcacctgaactttctggacaagacctctggccgacctggggatggcctctgatccctggagcagtggcccacttgcccggtgctctcagaaacctcagagctggtggggctccagatcaggccttggcctctgagccctgcctgctctgggccatgcagaggaaggacagagggtgggcgcagggcaccaactcagggacatcccctctcctgggcgacgtcagtggaccttcctgcacccccagcctggaatgtaaatcagctgtgtggtgcccgcgtggctggaaggaaatagacccttttgtagctccc

SEQ ID NO: 154830 - DNA, 2052 bp, Homo sapiens
  Payload ID: 10444
  Gene Symbol: MAPK13
  Gene Name: mitogen-activated protein kinase 13
  Uniprot ID: O15264
  ENST ID: ENST00000211287
  CDS Start-End: 263-1360
cgtgcctgggccgcacctgccgcagtggctccgtcgggccgggcggaagcgcgggagcgcagggctggacaggcccgggcgtggcggccccggcgcacctgggcgagccggcaggtgggagcgtagcagcccggggcccccgccctcgcgcgggggaggagcgggcggcgcggggcgggcgcagcgggggtcggggcgctgggagcccgttgggccgcgaacgcagccgccacgctggggccgccgagatcgggtgcccgggatgagcctcatccggaaaaagggcttctacaagcaggacgtcaacaagacagcctgggagctgcccaagacctacgtgtccccgacgcacgtcggcagcggggcctatggctccgtgtgctcggccatcgacaagcggtcaggggagaaggtggccatcaagaagctgagccgaccctttcagtccgagatcttcgccaagcgcgcctaccgggagctgctgctgctgaagcacatgcagcatgagaacgtcattgggctcctggatgtcttcaccccagcctcctccctgcgcaacttctatgacttctacctggtgatgcccttcatgcagacggatctgcagaagatcatggggatggagttcagtgaggagaagatccagtacctggtgtatcagatgctcaaaggccttaagtacatccactctgctggggtcgtgcacagggacctgaagccaggcaacctggctgtgaatgaggactgtgaactgaagattctggattttgggctggcgcgacatgcagacgccgagatgactggctacgtggtgacccgctggtaccgagcccccgaggtgatcctcagctggatgcactacaaccagacagtggacatctggtctgtgggctgtatcatggcagagatgctgacagggaaaactctgttcaaggggaaagattacctggaccagctgacccagatcctgaaagtgaccggggtgcctggcacggagtttgtgcagaagctgaacgacaaagcggccaaatcctacatccagtccctgccacagacccccaggaaggatttcactcagctgttcccacgggccagcccccaggctgcggacctgctggagaagatgctggagctagacgtggacaagcgcctgacggccgcgcaggccctcacccatcccttctttgaacccttccgggaccctgaggaagagacggaggcccagcagccgtttgatgattccttagaacacgagaaactcacagtggatgaatggaagcagcacatctacaaggagattgtgaacttcagccccattgcccggaaggactcacggcgccggagtggcatgaagctgtagggactcatcttgcatggcaccgccggccagacactgcccaaggaccagtatttgtcactaccaaactcagcccttcttggaatacagcctttcaagcagaggacagaagggtccttctccttatgtgggaaatgggcctagtagatgcagaattcaaagatgtcggttgggagaaactagctctgatcctaacaggccacgttaaactgcccatctggagaatcgcctgcaggtggggccctttccttcccgccagagtggggctgagtgggcgctgagccaggccgggggcctatggcagtgatgctgtgttggtttcctagggatgctctaacgaattaccacaaacctggtggattgaaacagcagaacttgattcccttacagttctggaggctggaaatctgggatggaggtgttggcagggctgtggtccctttgaaggctctggggaagaatccttccttggctctttttagcttgtggcggcagtgggcagtccgtggcattccccagcttattgctgcatcactccagtctctgtctcttctgttctctcctcttttaacaacagtcattggatttagggcccaccctaatcctgtgtgatcttatcttgatccttattaattaaacctgcaaatactctagttccaaataaagtcacattctcaggttccaggtggacatga

SEQ ID NO: 154831 - DNA, 1036 bp, Homo sapiens
  Payload ID: 10444
  Gene Symbol: MAPK13
  Gene Name: mitogen-activated protein kinase 13
  ENST ID: ENST00000373759
  CDS Start-End: 155-613
cccgacgcacgtcggcagcggggcctatggctccgtgtgctcggccatcgacaagcggtcaggggagaaggtggccatcaagaagctgagccgaccctttcagtccgagatcttcgccaagcgcgcctaccgggagctgctgctgctgaagcacatgcagcatgagaacgtcattgggctcctggatgtcttcaccccagcctcctccctgcgcaacttctatgacttctacctggtgatgcccttcatgcagacggatctgcagaagatcatggggatggagttcagtgaggagaagatccagtacctggtgtatcagatgctcaaaggccttaagtacatccactctgctggggtcgtgcacagggacctgaagccaggcaacctggctgtgaatgaggactgtgaactgaagattctggattttgggctggcgcgacatgcagacgccgagatgactggctacgtggtgacccgctggtaccgagcccccgaggtgatcctcagctggatgcactacaaccagacaggccaaatcctacatccagtccctgccacagacccccaggaaggatttcactcagctgttcccacgggccagcccccagggtgagtctcagagcccgctccccaggggcctctcagcgtatcccagagggcgggctctcccagcccctggtgtgaggctcttggctctgcccctgcagctgcggacctgctggagaagatgctggagctagacgtggacaagcgcctgacggccgcgcaggccctcacccatcccttctttgaacccttccgggaccctgaggaagagacggaggcccagcagccgtttgatgattccttagaacacgagaaactcacagtggatgaatggaagcgtaagagctggggcctcgggcttcctcgcctccgcctgcagcctctcttccttgcttcctccatctttgtgcctggcctctgccagccctacctgccacctccttcttggtgggcattgtctcctgggtgcttctttctccttgagctgact

SEQ ID NO: 154832 - DNA, 6196 bp, Homo sapiens
  Payload ID: 10444
  Gene Symbol: MAPK13
  Gene Name: mitogen-activated protein kinase 13
  Uniprot ID: O15264
  ENST ID: ENST00000373766
  CDS Start-End: 100-873
ggcggcgcggggcgggcgcagcgggggtcggggcgctgggagcccgttgggccgcgaacgcagccgccacgctggggccgccgagatcgggtgcccgggatgagcctcatccggaaaaagggcttctacaagcaggacgtcaacaagacagcctgggagctgcccaagacctacgtgtccccgacgcacgtcggcagcggggcctatggctccgtgtgctcggccatcgacaagcggtcaggggagaaggtggccatcaagaagctgagccgaccctttcagtccgagatcttcgccaagcgcgcctaccgggagctgctgctgctgaagcacatgcagcatgagaacgtcattgggctcctggatgtcttcaccccagcctcctccctgcgcaacttctatgacttctacctggtgatgcccttcatgcagacggatctgcagaagatcatggggatggagttcagtgaggagaagatccagtacctggtgtatcagatgctcaaaggccttaagtacatccactctgctggggtcgtgcacagggacctgaagccaggcaacctggctgtgaatgaggactgtgaactgaagattctggattttgggctggcgcgacatgcagacgccgagatgactggctacgtggtgacccgctggtaccgagcccccgaggtgatcctcagctggatgcactacaaccagacaggccaaatcctacatccagtccctgccacagacccccaggaaggatttcactcagctgttcccacgggccagcccccaggctgcggacctgctggagaagatgctggagctagacgtggacaagcgcctgacggccgcgcaggccctcacccatcccttctttgaacccttccgggaccctgaggaagagacggaggcccagcagccgtttgatgattccttagaacacgagaaactcacagtggatgaatggaagcagcacatctacaaggagattgtgaacttcagccccattgcccggaaggactcacggcgccggagtggcatgaagctgtagggactcatcttgcatggcaccgccggccagacactgcccaaggaccagtatttgtcactaccaaactcagcccttcttggaatacagcctttcaagcagaggacagaagggtccttctccttatgtgggaaatgggcctagtagatgcagaattcaaagatgtcggttgggagaaactagctctgatcctaacaggccacgttaaactgcccatctggagaatcgcctgcaggtggggccctttccttcccgccagagtggggctgagtgggcgctgagccaggccgggggcctatggcagtgatgctgtgttggtttcctagggatgctctaacgaattaccacaaacctggtggattgaaacagcagaacttgattcccttacagttctggaggctggaaatctgggatggaggtgttggcagggctgtggtccctttgaaggctctggggaagaatccttccttggctctttttagcttgtggcggcagtgggcagtccgtggcattccccagcttattgctgcatcactccagtctctgtctcttctgttctctcctcttttaacaacagtcattggatttagggcccaccctaatcctgtgtgatcttatcttgatccttattaattaaacctgcaaatactctagttccaaataaagtcacattctcaggttccaggtggacatgaattccagggggaaatgattcaactcactacagacagctgggagggaggggccccttcctgggccccgtgctgaggccttgtgctctgtgaaggaacccaatgtgtttggctgctaaattaagggagttgcagagagagctgcagctggtgcgattgcattcaggttattttgggtgagtgataagcaatcaagatatgaaacaacagcaggctcggagactgcgagctgcacaggcagaaatgggctcttgcctggcttgatggcaaaccgttctgctccctttgggagatggcacagctctccagagctttgacctgacagtggctagaacctctctgtttttatctgagaaactttggcagaacaaatttccatgtgcacaagctgtcgggcacagtgggtctcaaatttccttgtgcaccaggggacttgttaaaatgcagattcctgggccccaccccagggcttgtgactcagcaggtctgcagttgagaccttagaatgtgcatttgaatgaggacctctcgccctgacccaagcctagtgattctgatggatatcagaccatagttcgagacatttagtggatttcagtcatacttgatttgttgggaggcctaaatcaaaaacctataggaggagactggggggcttcagatggagtttcacactcatcttacaggtgttaaaactgaggctcagaaagcttttttttgtttgtttgtttgagacagggtctggctctgtcacccgggctggagttcagtggcacaattacatcttactgcaacctcagcctcctgggctcaagccatcctcccacctcagcctcctaagtagctgggactacaggtctgtgccacccaggtgcaccaggactgcaggtggctaattaaaacattttttttcttttttgtataggcggggtttctctatgttgcccaggctgatcttgaacttctggactcaagtgatcctcccactttggcctcccaaagtgctgggattataggcatgagccaccctgcaggcccagacagcatttttaaggccttgaaactcttctgtataatactgtaatggtggatacctattgtgcatttgttaccatctgtaggactggataacacagagtgaaccctcaagtaaactatggacttcagttaataataatgtatcagtattggttcataaattgtaacaattgtgccacactaatgcaagatgttactcatcaagaaaactgaggagagagaaggggaggaagtaggtgggaacctctatactttctaccaacctaaaactgctctaaaaaataaaccacaggccggtcgcagtagctcacgcctgtaatcccagcaccttgggaggctgaggtgggcggatcacttgaggtcaggagttcaagaccagcctggccaacatggtgaaaccccatctctaccaaaaatacaaaaattagctgggcttggtggtgcatgcctgtaatcccaaactactcgggaggctgaggcagaattgcttgaacctgggaggtggaggttgcagtgagctgagatcacaccactgcactccagcctgggtgacagagtgagactccatctcaaaaaaacaaaaaaaacaaataccctgaggacacagagacattgggtcagacacccacagctaggaagtggtggagtcagattggaacccaagtaggcttgagcactgtacccagcttggattcaagggttgcccagccttccctcttcacgccagtctgagacccttactgctgactgtgtccatggtctctgttttctctcccacagaatggccctgctgtcaaggagctggggagtccttgactgggactggctagtcttgccacagccctggcctcgctggttactaaaactgccccaggttccctgagtctacatccctctaagcctcctgagaattctcactgccccaaggaaaaagtctagccttccttcttggcctggcattcaaaaccccttgtgttctctctaatctcatcagctcccactgcctcccctagctagtccttatgtcagtgtgggacaccagtcctgggatccaccgtaaggttcattctgcattcacaggttaaaggtcttgacaagtcctgcagtaaagagatccgttcctcatttaatccagaacttcccagatgtacttaaccgcaggacccattttctcccaacagcatgacacacatagccttttttgcccagtgcagcccagtgcacaggtcccgatattgcctctccccaagtaggcttggccttcttttagtgcccgtgcgtggaaggccctccattctcctctccattctccttggccttcaaggctctaccttaggcctccctccaggcagctgttctccatcatcccccctgggctgcaggccctctgtgggcagcatttagtgtgtggtttggcctccccttcccattgcccactgtgagcaaatacctgtgcgtgaatgaataatgagtgaaagatgtcccaggggcctgtcggtcacttctttgccccgaccaggccaatgtcatatggaaggtggcagagagcccagcaggaagcagaagtgggcggccctgggctgtacctttgagctgctctcctgaaaatctctattatttcagactcccagaccccaccccccgcttcatcctctggtgtcctcctaggccatccccactccggaattaaacctcagcccctcccacagagttttctcaaatctgtgaagtttcttcaaaaggcggtggaggtgctcagcagtgcaaggtggggggtggagggggtggggagtagagggagtgggggttccacgggtttgggtcttgcccagtgggcacatggcctgtgtaataggaaacaagtccattctcctgctgtggggggcagaggagctggcggggcgagggagggggagatgtgggctcaggtattcttggtggatgcgcttcgttctgtggctgatggggtggcttaaaagatcttaacagagagagatcaggaagccagactgcaaggtgggggacatttcctaagagcaagtgtaccctccattccctcttttgaggaacaaagagtatctttgctggggcctgagtcatccatgaaaacagacagcagcggtgtcccagggcagggcttgcctggcgtggattggggtggtgctgcccccagtgaggggcagcacaaggggagacagaaatggaggaatagcccccgtaagggcaagcccagtgtgcaccagtgcccagagctgcctgatggaggaacagctccgtaagggtgaacccagtgtgcacgggtgcccggagctgcctgcgtgaggctgggggctagtttggatgagggcatggctcaactttcacttggcacattgaaatagcttttgctgtctgctagggtgtggaaaactgtttttccatggccccaagcaatgctatagctacagctgaggagggaggaatctctccctgcctctcctcccaactcttggcttttgcttccttaaatttgaacaattccctaagatctaatgctgggaggctccccttccttcattacacagtgaactcatgtgctctatctgcattccccctaaatcctcctgagcttttaggtaagaggccgatgatttcacaatcggcagcagaggcctaaggccattccatcaaactgaagatggcagcaagttgtcctcacttcttcattgagcacccatgggtgtgtactggagcaagggtggtgccagggattctcctgctctggttcctcctgcggggtccctgctcagctgggcagctgccctcactctgggcgggtggcatgtgagtgtcaacagggcccctctcagtcaggggctcttggccattttttgtgccatggatcgcttctcaaaatcatattttcttttcttttcttttgagatggggtctcactccattacccaggctggagtgcagtggtgcaatcacagctcactgtagcctcgacctccctgggttcaggtgatcctcccacctcagcctcccaagtagctgggactataggcatgcaccaccatgcctggctaatttcagaataatattttcatacacataaaatatgtaggattacaaagtaagctagttatatttatatacagttgtcaaaatatttttaaaatgtataacgtgatactatgtgtataggtttctttattaacatattgaataaaaagatcgagggtaggcctattaaacaatggtaaactgaagagagatgagtgtaaacaatattttaagatagatacctgtggcaaactgtaaagggatatgaaaaactctgtaatttctattggcactgctgatacaactgcactttgctacctttgttcataaccaaggaaatagaaatgactgaaaataaagttgtattctattccaatcc

SEQ ID NO: 154833 - DNA, 3779 bp, Homo sapiens
  Payload ID: 10445
  Gene Symbol: MAPK14
  Gene Name: mitogen-activated protein kinase 14
  Uniprot ID: Q16539
  ENST ID: ENST00000229794
  CDS Start-End: 389-1471
cgggaggctcccgtttgctggctcttggaaccgcgaccactggagccttagcgggcgcagcagctggaacgggagtactgcgacgcagcccggagtcggccttgtaggggcgaaggtgcagggagatcgcggcgggcgcagtcttgagcgccggagcgcgtccctgcccttagcggggcttgccccagtcgcaggggcacatccagccgctgcggctgacagcagccgcgcgcgcgggagtctgcggggtcgcggcagccgcacctgcgcgggcgaccagcgcaaggtccccgcccggctgggcgggcagcaagggccggggagagggtgcgggtgcaggcgggggccccacagggccaccttcttgcccggcggctgccgctggaaaatgtctcaggagaggcccacgttctaccggcaggagctgaacaagacaatctgggaggtgcccgagcgttaccagaacctgtctccagtgggctctggcgcctatggctctgtgtgtgctgcttttgacacaaaaacggggttacgtgtggcagtgaagaagctctccagaccatttcagtccatcattcatgcgaaaagaacctacagagaactgcggttacttaaacatatgaaacatgaaaatgtgattggtctgttggacgtttttacacctgcaaggtctctggaggaattcaatgatgtgtatctggtgacccatctcatgggggcagatctgaacaacattgtgaaatgtcagaagcttacagatgaccatgttcagttccttatctaccaaattctccgaggtctaaagtatatacattcagctgacataattcacagggacctaaaacctagtaatctagctgtgaatgaagactgtgagctgaagattctggattttggactggctcggcacacagatgatgaaatgacaggctacgtggccactaggtggtacagggctcctgagatcatgctgaactggatgcattacaaccagacagttgatatttggtcagtgggatgcataatggccgagctgttgactggaagaacattgtttcctggtacagaccatattgatcagttgaagctcattttaagactcgttggaaccccaggggctgagcttttgaagaaaatctcctcagagtctgcaagaaactatattcagtctttgactcagatgccgaagatgaactttgcgaatgtatttattggtgccaatcccctggctgtcgacttgctggagaagatgcttgtattggactcagataagagaattacagcggcccaagcccttgcacatgcctactttgctcagtaccacgatcctgatgatgaaccagtggccgatccttatgatcagtcctttgaaagcagggacctccttatagatgagtggaaaagcctgacctatgatgaagtcatcagctttgtgccaccaccccttgaccaagaagagatggagtcctgagcacctggtttctgttctgttgatcccacttcactgtgaggggaaggccttttcacgggaactctccaaatattattcaagtgcctcttgttgcagagatttcctccatggtggaagggggtgtgcgtgcgtgtgcgtgcgtgttagtgtgtgtgcatgtgtgtgtctgtctttgtgggagggtaagacaatatgaacaaactatgatcacagtgactttacaggaggttgtggatgctccagggcagcctccaccttgctcttctttctgagagttggctcaggcagacaagagctgctgtccttttaggaatatgttcaatgcaaagtaaaaaaatatgaattgtccccaatcccggtcatgcttttgccactttggcttctcctgtgaccccaccttgacggtggggcgtagacttgacaacatcccacagtggcacggagagaaggcccataccttctggttgcttcagacctgacaccgtccctcagtgatacgtacagccaaaaaggaccaactggcttctgtgcactagcctgtgattaacttgcttagtatggttctcagatcttgacagtatatttgaaactgtaaatatgtttgtgccttaaaaggagagaagaaagtgtagatagttaaaagactgcagctgctgaagttctgagccgggcaagtcgagagggctgttggacagctgcttgtgggcccggagtaatcaggcagccttcataggcggtcatgtgtgcatgtgagcacatgcgtatatgtgcgtctctctttctccctcacccccaggtgttgccatttctctgcttacccttcacctttggtgcagaggtttcttgaatatctgccccagtagtcagaagcaggttcttgatgtcatgtacttcctgtgtactctttatttctagcagagtgaggatgtgttttgcacgtcttgctatttgagcatgcacagctgcttgtcctgctctcttcaggaggccctggtgtcaggcaggtttgccagtgaagacttcttgggtagtttagatcccatgtcacctcagctgatattatggcaagtgatatcacctctcttcagcccctagtgctattctgtgttgaacacaattgatacttcaggtgcttttgatgtgaaaatcatgaaaagaggaacaggtggatgtatagcatttttattcatgccatctgttttcaaccaactatttttgaggaattatcatgggaaaagaccagggcttttcccaggaatatcccaaacttcggaaacaagttattctcttcactcccaataactaatgctaagaaatgctgaaaatcaaagtaaaaaattaaagcccataaggccagaaactccttttgctgtctttctctaaatatgattactttaaaataaaaaagtaacaaggtgtcttttccactcctatggaaaagggtcttcttggcagcttaacattgacttcttggtttggggagaaataaattttgtttcagaattttgtatattgtaggaatcctttgagaatgtgattccttttgatggggagaaagggcaaattattttaatattttgtattttcaactttataaagataaaatatcctcaggggtggagaagtgtcgttttcataacttgctgaatttcaggcattttgttctacatgaggactcatatatttaagccttttgtgtaataagaaagtataaagtcacttccagtgttggctgtgtgacagaatcttgtatttgggccaaggtgtttccatttctcaatcagtgcagtgatacatgtactccagagggacagggtggaccccctgagtcaactggagcaagaaggaaggaggcagactgatggcgattccctctcacccgggactctccccctttcaaggaaagtgaacctttaaagtaaaggcctcatctcctttattgcagttcaaatcctcaccatccacagcaagatgaattttatcagccatgtttggttgtaaatgctcgtgtgatttcctacagaaatactgctctgaatattttgtaataaaggtctttgcacatgtgaccacatacgtgttaggaggctgcatgctctggaagcctggactctaagctggagctcttggaagagctcttcggtttctgagcataatgctcccatctcctgatttctctgaacagaaaacaaaagagagaatgagggaaattgctattttatttgtattcatgaacttggctgtaatcagttatgccgtataggatgtcagacaataccactggttaaaataaagcctatttttcaaa

SEQ ID NO: 154834 - DNA, 4319 bp, Homo sapiens
  Payload ID: 10445
  Gene Symbol: MAPK14
  Gene Name: mitogen-activated protein kinase 14
  Uniprot ID: Q16539
  ENST ID: ENST00000229795
  CDS Start-End: 448-1530
atattgggtaaaatctcggctctcggagagtcccgggagctgttctcgcgagagtactgcgggaggctcccgtttgctggctcttggaaccgcgaccactggagccttagcgggcgcagcagctggaacgggagtactgcgacgcagcccggagtcggccttgtaggggcgaaggtgcagggagatcgcggcgggcgcagtcttgagcgccggagcgcgtccctgcccttagcggggcttgccccagtcgcaggggcacatccagccgctgcggctgacagcagccgcgcgcgcgggagtctgcggggtcgcggcagccgcacctgcgcgggcgaccagcgcaaggtccccgcccggctgggcgggcagcaagggccggggagagggtgcgggtgcaggcgggggccccacagggccaccttcttgcccggcggctgccgctggaaaatgtctcaggagaggcccacgttctaccggcaggagctgaacaagacaatctgggaggtgcccgagcgttaccagaacctgtctccagtgggctctggcgcctatggctctgtgtgtgctgcttttgacacaaaaacggggttacgtgtggcagtgaagaagctctccagaccatttcagtccatcattcatgcgaaaagaacctacagagaactgcggttacttaaacatatgaaacatgaaaatgtgattggtctgttggacgtttttacacctgcaaggtctctggaggaattcaatgatgtgtatctggtgacccatctcatgggggcagatctgaacaacattgtgaaatgtcagaagcttacagatgaccatgttcagttccttatctaccaaattctccgaggtctaaagtatatacattcagctgacataattcacagggacctaaaacctagtaatctagctgtgaatgaagactgtgagctgaagattctggattttggactggctcggcacacagatgatgaaatgacaggctacgtggccactaggtggtacagggctcctgagatcatgctgaactggatgcattacaaccagacagttgatatttggtcagtgggatgcataatggccgagctgttgactggaagaacattgtttcctggtacagaccatattaaccagcttcagcagattatgcgtctgacaggaacaccccccgcttatctcattaacaggatgccaagccatgaggcaagaaactatattcagtctttgactcagatgccgaagatgaactttgcgaatgtatttattggtgccaatcccctggctgtcgacttgctggagaagatgcttgtattggactcagataagagaattacagcggcccaagcccttgcacatgcctactttgctcagtaccacgatcctgatgatgaaccagtggccgatccttatgatcagtcctttgaaagcagggacctccttatagatgagtggaaaagcctgacctatgatgaagtcatcagctttgtgccaccaccccttgaccaagaagagatggagtcctgagcacctggtttctgttctgttgatcccacttcactgtgaggggaaggccttttcacgggaactctccaaatattattcaagtgcctcttgttgcagagatttcctccatggtggaagggggtgtgcgtgcgtgtgcgtgcgtgttagtgtgtgtgcatgtgtgtgtctgtctttgtgggagggtaagacaatatgaacaaactatgatcacagtgactttacaggaggttgtggatgctccagggcagcctccaccttgctcttctttctgagagttggctcaggcagacaagagctgctgtccttttaggaatatgttcaatgcaaagtaaaaaaatatgaattgtccccaatcccggtcatgcttttgccactttggcttctcctgtgaccccaccttgacggtggggcgtagacttgacaacatcccacagtggcacggagagaaggcccataccttctggttgcttcagacctgacaccgtccctcagtgatacgtacagccaaaaaggaccaactggcttctgtgcactagcctgtgattaacttgcttagtatggttctcagatcttgacagtatatttgaaactgtaaatatgtttgtgccttaaaaggagagaagaaagtgtagatagttaaaagactgcagctgctgaagttctgagccgggcaagtcgagagggctgttggacagctgcttgtgggcccggagtaatcaggcagccttcataggcggtcatgtgtgcatgtgagcacatgcgtatatgtgcgtctctctttctccctcacccccaggtgttgccatttctctgcttacccttcacctttggtgcagaggtttcttgaatatctgccccagtagtcagaagcaggttcttgatgtcatgtacttcctgtgtactctttatttctagcagagtgaggatgtgttttgcacgtcttgctatttgagcatgcacagctgcttgtcctgctctcttcaggaggccctggtgtcaggcaggtttgccagtgaagacttcttgggtagtttagatcccatgtcacctcagctgatattatggcaagtgatatcacctctcttcagcccctagtgctattctgtgttgaacacaattgatacttcaggtgcttttgatgtgaaaatcatgaaaagaggaacaggtggatgtatagcatttttattcatgccatctgttttcaaccaactatttttgaggaattatcatgggaaaagaccagggcttttcccaggaatatcccaaacttcggaaacaagttattctcttcactcccaataactaatgctaagaaatgctgaaaatcaaagtaaaaaattaaagcccataaggccagaaactccttttgctgtctttctctaaatatgattactttaaaataaaaaagtaacaaggtgtcttttccactcctatggaaaagggtcttcttggcagcttaacattgacttcttggtttggggagaaataaattttgtttcagaattttgtatattgtaggaatcctttgagaatgtgattccttttgatggggagaaagggcaaattattttaatattttgtattttcaactttataaagataaaatatcctcaggggtggagaagtgtcgttttcataacttgctgaatttcaggcattttgttctacatgaggactcatatatttaagccttttgtgtaataagaaagtataaagtcacttccagtgttggctgtgtgacagaatcttgtatttgggccaaggtgtttccatttctcaatcagtgcagtgatacatgtactccagagggacagggtggaccccctgagtcaactggagcaagaaggaaggaggcagactgatggcgattccctctcacccgggactctccccctttcaaggaaagtgaacctttaaagtaaaggcctcatctcctttattgcagttcaaatcctcaccatccacagcaagatgaattttatcagccatgtttggttgtaaatgctcgtgtgatttcctacagaaatactgctctgaatattttgtaataaaggtctttgcacatgtgaccacatacgtgttaggaggctgcatgctctggaagcctggactctaagctggagctcttggaagagctcttcggtttctgagcataatgctcccatctcctgatttctctgaacagaaaacaaaagagagaatgagggaaattgctattttatttgtattcatgaacttggctgtaatcagttatgccgtataggatgtcagacaataccactggttaaaataaagcctatttttcaaatttagtgagtttctcaagtttattatatttttctcttgtttttatttaatgcacaatatggcattatatcaatatcctttaaactgtgacctggcatacttgtctgacagatcttaatactactcctaacatttagaaaatgttgataaagcttcttagttgtacattttttggtgaagagtatccaggtctttgctgtggatgggtaaagcaaagagcaaatgaacgaagtattaagcattggggcctgtcttatctacactcgagtgtaagagtggccgaaatgacagggctcagcagactgtggcctgagggccaaatctggcccaccacctgtttggtgtagcctgctaagaatggcttttacatttttaaatggttgggaaagaaaaaaaaagaagtagtagattttgtagcatgtgatgtaagtaatgtaaaacttaaattccagtatccataaataaagttttatgagaacaga

SEQ ID NO: 154835 - DNA, 1066 bp, Homo sapiens
  Payload ID: 10445
  Gene Symbol: MAPK14
  Gene Name: mitogen-activated protein kinase 14
  Uniprot ID: Q16539
  ENST ID: ENST00000310795
  CDS Start-End: 1-924
atgtctcaggagaggcccacgttctaccggcaggagctgaacaagacaatctgggaggtgcccgagcgttaccagaacctgtctccagtgggctctggcgcctatggctctgtgtgtgctgcttttgacacaaaaacggggttacgtgtggcagtgaagaagctctccagaccatttcagtccatcattcatgcgaaaagaacctacagagaactgcggttacttaaacatatgaaacatgaaaatgtgattggtctgttggacgtttttacacctgcaaggtctctggaggaattcaatgatgtgtatctggtgacccatctcatgggggcagatctgaacaacattgtgaaatgtcagaagcttacagatgaccatgttcagttccttatctaccaaattctccgaggtctaaagtatatacattcagctgacataattcacagggacctaaaacctagtaatctagctgtgaatgaagactgtgagctgaagattctggattttggactggctcggcacacagatgatgaaatgacaggctacgtggccactaggtggtacagggctcctgagatcatgctgaactggatgcattacaaccagacagttgatatttggtcagtgggatgcataatggccgagctgttgactggaagaacattgtttcctggtacagaccatattgatcagttgaagctcattttaagactcgttggaaccccaggggctgagcttttgaagaaaatctcctcagagtctctgtcgacttgctggagaagatgcttgtattggactcagataagagaattacagcggcccaagcccttgcacatgcctactttgctcagtaccacgatcctgatgatgaaccagtggccgatccttatgatcagtcctttgaaagcagggacctccttatagatgagtggaaaagcctgacctatgatgaagtcatcagctttgtgccaccaccccttgaccaagaagagatggagtcctgagcacctggtttctgttctgttgatcccacttcactgtgaggggaaggccttttcacgggaac

SEQ ID NO: 154836 - DNA, 823 bp, Homo sapiens
  Payload ID: 10445
  Gene Symbol: MAPK14
  Gene Name: mitogen-activated protein kinase 14
  ENST ID: ENST00000474429
  CDS Start-End: 1-271
caagacaatctgggaggtgcccgagcgttaccagaacctgtctccagtgggctctggcgcctatggctctgtgtgtgctgcttttgacacaaaaacggggttacgtgtggcagtgaagaagctctccagaccatttcagtccatcattcatgcgaaaagaacctacagagaactgcggttacttaaacatatgaaacatgaaaatgtgattggtctgttggacgtttttacacctgcaaggtctctggaggaattcaatgatgtggcttaaacaaacaagtaaacaacttttctaatggaaaattcaaacacataaaatcacagtatatacattcagctgacataattcacagggacctaaaacctagtaatctagctgtgaatgaagactgtgagctgaagattctggattttggactggctcggcacacagatgatgaaatgacaggctacgtggccactaggtggtacagggctcctgagatcatgctgaactggatgcattacaaccagacagttgatatttggtcagtgggatgcataatggccgagctgttgactggaagaacattgtttcctggtacagaccatattgatcagttgaagctcattttaagactcgttggaaccccaggggctgagcttttgaagaaaatctcctcagagtctgcaagaaactatattcagtctttgactcagatgccgaagatgaactttgcgaatgtatttattggtgccaatcccctggctgtcgacttgctggagaagatgcttgtattggactcagataagagaattacagcggcccaagcccttgcacatg

SEQ ID NO: 154837 - DNA, 2777 bp, Homo sapiens
  Payload ID: 10445
  Gene Symbol: MAPK14
  Gene Name: mitogen-activated protein kinase 14
  ENST ID: ENST00000491957
  CDS Start-End: 1-522
atgtctcaggagaggcccacgttctaccggcaggagctgaacaagacaatctgggaggtgcccgagcgttaccagaacctgtctccagtgggctctggcgcctatggctctgtgtgtgctgcttttgacacaaaaacggggttacgtgtggcagtgaagaagctctccagaccatttcagtccatcattcatgcgaaaagaacctacagagaactgcggttacttaaacatatgaaacatgaaaatgtgattggtctgttggacgtttttacacctgcaaggtctctggaggaattcaatgatgtgtatctggtgacccatctcatgggggcagatctgaacaacattgtgaaatgtcagaagcttacagatgaccatgttcagttccttatctaccaaattctccgaggtctaaagtatatacattcagctgacataattcacagggacctaaaacctagtaatctagctgtgaatgaagactgtgagctgaagtttgtctgttcctcttctgccctttagattctggattttggactggctcggcacacagatgatgaaatgacaggctacgtggccactaggtggtacagggctcctgagatcatgctgaactggatgcattacaaccagacagttgatatttggtcagtgggatgcataatggccgagctgttgactggaagaacattgtttcctggtacagaccatattgatcagttgaagctcattttaagactcgttggaaccccaggggctgagcttttgaagaaaatctcctcagagtctgtgagttgatgctttgtaattatctgccctgttgggagcctctgccacttgccttctaccaatctgtactttgacctgggtgtgtttgtaagcacacatgccctttgtgtgctgacttcccggatgagtgaggtataagacagtgtgagtgtgtgtgtgcgtgcacgcatgtgtgcctgcttgcatgcacaagtgtgttttattctctatctgggtacacactaagatcacgggagcctccattagacaatagtatcccagtaaagcaatgagatttgagattctaattcattccaagagattaatgtaaactttgtgtctctgtcctcaagacctgactttcttctttctcagaagtttcacgtatgctctagagctcttttcactgtttctagtgtttgttctcagagcatgagcttcaccatgtatttagtttaacttaatcactaaaagaataaaatgtacattgtctgcacactgttgccccttcccagaagttattttttattgttttagaatagatactcacatatcctatgtaaaatgtttgttcccaacagagggacctttctacccagtccctagaccccactcagaagaaacagcttcactcctgatacctcagatacacaggaatgtggttataaattttcctcctattgccttgtaattataagttagataacctgagacagagtttggaactagtgctttcttgcttctaagcagggacttagacagaagccatgggaatgtgagtctggcttacttttgctatgatttcctgctcttggtcattttcttgggccagaggcatgagagaagccatgaaagcccagcttttctttttccctcgatctgctgccaggcagttgaacaaaagaaaaaaagagctatggagccaagctccagttatgccttcctggattctcctcccaacatttatgactgaaggggccctttgcctagttgggaagatggctgggtagcttgaggcaagcataagcaggtgagttggaaccgttcatcatcttcctgacaaaataaagaataccgtcatctggtatgtatccggtacatttcttgaaaggatcccaaagcccagtgtatttctgaacctccactctgaatttgtttcatttacttatttaagataaagaagcaaaagcccagaagggcagtgacttttccatgtcatgcactgaatcacgtggcagagctgagtatagatcccagatgttctgataacatgatccaaactataatcccatgtgattacacactattttgaaagtcattgtcagtgttaccacaatgtcaacctaaagaggtatttttttctcctttatgatatgtagaagctgaattagagtgaatcaaagatatcagatgatgcttagaaagagcagtactttttttttaatgtttttgcttagaaacactgtcttacagtaagaggacctaagggcagagggaggagctcaattaataaatagtgctaatgagaccaagcaaattcatttccttcctgagagtgtctcctagcagccctttcttagtcttctcttccatcccaaccatctgccctatagatacgtgctattagtcatttggaattggattaggaattcaaaccaaagtctaggtaaaatagtcaatagtatttatctgtcattaatccatcacttatttttaagaaagaaacaatgagtgcacagcctaataatggaggtctctctgtgaaatgaggcacattatacatttcaacagctctactgaaattgagtaccagaatacagaacttaactcaaataatattatattgagtataagaataagaaaggtttttttttttggtttgtttcctacataattggggtgagtggataaaagtagtttaaacatcctaaggggtagacaagattaatttgatgttcgtgacacggcccaagtacctgtttatcttaaaagcgcatgatgtatgggaa

SEQ ID NO: 154838 - DNA, 585 bp, Homo sapiens
  Payload ID: 10445
  Gene Symbol: MAPK14
  Gene Name: mitogen-activated protein kinase 14
  ENST ID: ENST00000472333
  CDS Start-End: 188-585
tcatttggagcaagaaagattcagatctgtaaggcgccctcaagatcaaaaagttattaacagtgctgggagtgctgcttttgacacaaaaacggggttacgtgtggcagtgaagaagctctccagaccatttcagtccatcattcatgcgaaaagaacctacagagaactgcggttacttaaacatatgaaacatgaaaatgtgattggtctgttggacgtttttacacctgcaaggtctctggaggaattcaatgatgtgtatctggtgacccatctcatgggggcagatctgaacaacattgtgaaatgtcagaagcttacagatgaccatgttcagttccttatctaccaaattctccgaggtctaaagtatatacattcagctgacataattcacagggacctaaaacctagtaatctagctgtgaatgaagactgtgagctgaagattctggattttggactggctcggcacacagatgatgaaatgacaggctacgtggccactaggtggtacagggctcctgagatcatgctgaactggatgcattacaaccagacagttgatatttggtcagtggg

SEQ ID NO: 154839 - DNA, 1376 bp, Homo sapiens
  Payload ID: 10445
  Gene Symbol: MAPK14
  Gene Name: mitogen-activated protein kinase 14
  ENST ID: ENST00000468133
  CDS Start-End: 302-1153
gtttgctggctcttggaaccgcgaccactggagccttagcgggcgcagcagctggaacgggagtactgcgacgcagcccggagtcggccttgtaggggcgaaggagctgaacaagacaatctgggaggtgcccgagcgttaccagaacctgtctccagtgggctctggcgcctatggctctgtgtgtgctgcttttgacacaaaaacggggttacgtgtggcagtgaagaagctctccagaccatttcagtccatcattcatgcgaaaagaacctacagagaactgcggttacttaaacatatgaaacatgaaaatgtgattggtctgttggacgtttttacacctgcaaggtctctggaggaattcaatgatgtgtatctggtgacccatctcatgggggcagatctgaacaacattgtgaaatgtcagaagcttacagatgaccatgttcagttccttatctaccaaattctccgaggtctaaagtatatacattcagctgacataattcacagggacctaaaacctagtaatctagctgtgaatgaagactgtgagctgaagattctggattttggactggctcggcacacagatgatgaaatgacaggctacgtggccactaggtggtacagggctcctgagatcatgctgaactggatgcattacaaccagacagttgatatttggtcagtgggatgcataatggccgagctgttgactggaagaacattgtttcctggtacagaccatattgatcagttgaagctcattttaagactcgttggaaccccaggggctgagcttttgaagaaaatctcctcagagtctgcaagaaactatattcagtctttgactcagatgccgaagatgaactttgcgaatgtatttattggtgccaatcccctggctgtcgacttgctggagaagatgcttgtattggactcagataagagaattacagcggcccaagcccttgcacatgcctactttgctcagtaccacgatcctgatgatgaaccagtggccgatccttatgatcagtcctttgaaagcagggacctccttatagatgagtggaaaagcctgacctatgatgaagtcatcagctttgtgccaccaccccttgaccaagaagagatggagtcctgagcacctggtttctgttctgttgatcccacttcactgtgaggggaaggccttttcacgggaactctccaaatattattcaagtgcctcttgttgcagagatttcctccatggtggaagggggtgtgcgtgcgtgtgcgtgcgtgttagtgtgtgtgcatgtgtgtgtctgtctttgtgggagggtaagacaatatgaacaaactatgatcacagtgactttaca

SEQ ID NO: 154840 - DNA, 1003 bp, Homo sapiens
  Payload ID: 10445
  Gene Symbol: MAPK14
  Gene Name: mitogen-activated protein kinase 14
  ENST ID: ENST00000622903
  CDS Start-End: 482-1003
ttctctcacgaagccccgcccgcggagaggttccatattgggtaaaatctcggctctcggagagtcccgggagctgttctcgcgagagtactgcgggaggctcccgtttgctggctcttggaaccgcgaccactggagccttagcgggcgcagcagctggaacgggagtactgcgacgcagcccggagtcggccttgtaggggcgaaggtgcagggagatcgcggcgggcgcagtcttgagcgccggagcgcgtccctgcccttagcggggcttgccccagtcgcaggggcacatccagccgctgcggctgacagcagccgcgcgcgcgggagtctgcggggtcgcggcagccgcacctgcgcgggcgaccagcgcaaggtccccgcccggctgggcgggcagcaagggccggggagagggtgcgggtgcaggcgggggccccacagggccaccttcttgcccggcggctgccgctggaaaatgtctcaggagaggcccacgttctaccggcaggagctgaacaagacaatctgggaggtgcccgagcgttaccagaacctgtctccagtgggctctggcgcctatggctctgtgtgtgctgcttttgacacaaaaacggggttacgtgtggcagtgaagaagctctccagaccatttcagtccatcattcatgcgaaaagaacctacagagaactgcggttacttaaacatatgaaacatgaaaatgtgattggtctgttggacgtttttacacctgcaaggtctctggaggaattcaatgatgtgtatctggtgacccatctcatgggggcagatctgaacaacattgtgaaatgtcagaagcttacagatgaccatgttcagttccttatctaccaaattctccgaggtctaaagtatatacattcagctgacataattcacagggacctaaaacctagtaatctagctgtgaatgaagactgtgagctgaagtttgtctgttcctcttctgccctttag

SEQ ID NO: 154841 - DNA, 1961 bp, Homo sapiens
  Payload ID: 10446
  Gene Symbol: MAPK15
  Gene Name: mitogen-activated protein kinase 15
  Uniprot ID: Q8TD08
  ENST ID: ENST00000338033
  CDS Start-End: 120-1754
ccggggcctgccgggggcggggggtgttgggaggggcgccccgaggggcggggccgggccgccgtcggttcccacggcaaccgactcaacagtaaggccccgcgggcgtcctggccgccatgtgcaccgtagtggaccctcgcattgtccggagatacctactcaggcggcagctcgggcagggggcctatggcattgtgtggaaggcagtggaccggaggactggtgaggtcgtggccatcaagaaaatctttgatgcttttagggataagacagatgcccagagaacattccgggaaatcacgctcctccaggagtttggggaccatcccaacatcatcagcctccttgacgtgatccgggcagagaacgacagggacatttacctggtgtttgagtttatggacactgacctgaacgcagtcatccggaagggcggcctgctgcaggacgtccacgtgcgctccatcttctaccagctcctgcgggccacccggttcctccactcggggcacgttgtgcaccgggaccagaagccgtccaatgtgctcctggatgccaactgcacagtgaagctgtgtgactttggcctggcccgctccctgggcgacctccccgaggggcctgaggaccaggccgtgacagagtacgtggccacacgctggtaccgagcaccggaggtgctgctctcttcgcaccgatacacccttggggtggacatgtggagtctgggctgtatcctgggggagatgctgcgggggagacccctgttccccggcacgtccaccctccaccagctggagctgatcctggagaccatcccaccgccatctgaggaggacctcctggctctcggctcaggctgccgtgcctctgtgctgcaccagctggggtcccggccacgacagacgctggatgccctcctaccgccagacacctccccagaggccttggacctccttaggcgactcctggtgttcgccccggacaagcggttaagcgcgacccaggcactgcagcacccctacgtgcagaggttccactgccccagcgacgagtgggcacgagaggcagatgtgcggccccgggcacacgaaggggtccagctctctgtgcctgagtaccgcagccgcgtctatcagatgatcctggagtgtggaggcagcagcggcacctcgagagagaagggcccggagggtgtctccccaagccaggcacacctgcacaaacccagagccgaccctcagctgccttctaggacacctgtgcagggtcccagacccaggccccagagcagcccaggccatgaccctgccgagcacgagtccccccgtgcagccaagaacgttcccaggcagaactccgctcccctgctccaaactgctctcctagggaatggggaaaggccccctggggcgaaggaagcgccccccttgacactctcgctggtgaagccaagcgggaggggagctgcgccctccctgacctcccaggctgcggctcaggtggccaaccaggccctgatccggggtgactggaaccggggcggtggggtgagggtggccagcgtacaacaggtccctccccggcttcctccggaggcccggcccggccggaggatgttcagcacctctgccttgcagggtgcccaggggggtgccagggctttgcttggaggctactcccaagcctacgggactgtctgccactcggcactgggccacctgcccctgctggaggggcaccatgtgtgagccgccctactcccttcacctggccctctgttcctgccccagccccttccccagacccctctccagtctcctgcaccccttagccctccctgctttgcctggcccgttgaagttccagggagcttgcccgggtctcctcgggggagcagatgagggccctgcccccgccccactgacttcctccaataaagtcatgtctgcccccaa

SEQ ID NO: 154842 - DNA, 834 bp, Homo sapiens
  Payload ID: 10446
  Gene Symbol: MAPK15
  Gene Name: mitogen-activated protein kinase 15
  Uniprot ID: Q8TD08
  ENST ID: ENST00000395107
  CDS Start-End: 1-834
atgtgcaccgtagtggaccctcgcattgtccggagatacctactcaggcggcagctcgggcagggggcctatggcattgtgtggaaggcagtggaccggaggactggtgaggtcgtggccatcaagaaaatctttgatgcttttagggataagacagatgcccagagaacattccgggaaatcacgctcctccaggagtttggggaccatcccaacatcatcagcctccttgacgtgatccgggcagagaacgacagggacatttacctggtgtttgagtttatgggttgcccccccagccccccacccccgactgcagtgcgcaccctctctgcagacactgacctgaacgcagtcatccggaagggcggcctgctgcaggacgtccacgtgcgctccatcttctaccagctcctgcgggccacccggttcctccactcggggcacgttgtgcaccgggaccagaagccgtccaatgtgctcctggatgccaactgcacagtgaagctgtgtgactttggcctggcccgctccctgggcgacctccccgaggggcctgaggaccaggccgtgacagagtacgtggccacacgctggtaccgagcaccggaggtgctgctctcttcgcaccgatacacccttggggtggacatgtggagtctgggctgtatcctgggggagatgctgcgggggagacccctgttccccggcacgtccaccctccaccagctggagctgatcctggagaccatcccaccgccatctgaggaggacctcctggctctcggctcaggctgccgtgcctctgtgctgcaccagctggggtcccggtga

SEQ ID NO: 154843 - DNA, 765 bp, Homo sapiens
  Payload ID: 10446
  Gene Symbol: MAPK15
  Gene Name: mitogen-activated protein kinase 15
  Uniprot ID: Q8TD08
  ENST ID: ENST00000395108
  CDS Start-End: 1-765
atgtgcaccgtagtggaccctcgcattgtccggagatacctactcaggcggcagctcgggcagggggcctatggcattgtgtggaaggcagtggaccggaggactggtgaggtcgtggccatcaagaaaatctttgatgcttttagggataagacagatgcccagagaacattccgggaaatcacgctcctccaggagtttggggaccatcccaacatcatcagcctccttgacgtgatccgggcagagaacgacagggacatttacctggtgtttgagtttatggacactgacctgaacgcagtcatccggaagggcggcctgctgcaggacgtccacgtgcgctccatcttctaccagctcctgcgggccacccggttcctccactcggggcacgttgtgcaccgggaccagaagccgtccaatgtgctcctggatgccaactgcacagtgaagctgtgtgactttggcctggcccgctccctgggcgacctccccgaggggcctgaggaccaggccgtgacagagtacgtggccacacgctggtaccgagcaccggaggtgctgctctcttcgcaccgatacacccttggggtggacatgtggagtctgggctgtatcctgggggagatgctgcgggggagacccctgttccccggcacgtccaccctccaccagctggagctgatcctggagaccatcccaccgccatctgaggagggggcccagactgcctgcaggtcaggcacaggggcatctacctag

SEQ ID NO: 154844 - DNA, 868 bp, Homo sapiens
  Payload ID: 10446
  Gene Symbol: MAPK15
  Gene Name: mitogen-activated protein kinase 15
  ENST ID: ENST00000620781
  CDS Start-End: 39-868
cgactcaacagtaaggccccgcgggcgtcctggccgccatgtgcaccgtagtggaccctcgcattgtccggagatacctactcaggcggcagctcgggcagggggcctatggcattgtgtggaaggcagtggaccggaggactggtgaggtcgtggccatcaagaaaatctttgatgcttttagggataagacagatgcccagagaacattccgggaaatcacgctcctccaggagtttggggaccatcccaacatcatcagcctccttgacgtgatccgggcagagaacgacagggacatttacctggtgtttgagtttatgggttgcccccccagccccccacccccgactgcagtgcgcaccctctctgcagacactgacctgaacgcagtcatccggaagggcggcctgctgcaggacgtccacgtgcgctccatcttctaccagctcctgcgggccacccggttcctccactcggggcacgttgtgcaccgggaccagaagccgtccaatgtgctcctggatgccaactgcacagtgaagctgtgtgactttggcctggcccgctccctgggcgacctccccgaggggcctgaggaccaggccgtgacagagtacgtggccacacgctggtaccgagcaccggaggtgctgctctcttcgcaccgatacacccttggggtggacatgtggagtctgggctgtatcctgggggagatgctgcgggggagacccctgttccccggcacgtccaccctccaccagctggagctgatcctggagaccatcccaccgccatctgaggaggacctcctggctctcggctcaggctgccgtgcctctgtgctgcaccagctggggtcccg

SEQ ID NO: 154845 - DNA, 1961 bp, Homo sapiens; identical to SEQ ID NO: 154841
  Payload ID: 10446
  Gene Symbol: MAPK15
  Gene Name: mitogen-activated protein kinase 15
  Uniprot ID: Q8TD08
  ENST ID: ENST00000615253
  CDS Start-End: 120-1754

SEQ ID NO: 154846 - DNA, 1861 bp, Homo sapiens
  Payload ID: 10447
  Gene Symbol: MAPK3
  Gene Name: mitogen-activated protein kinase 3
  Uniprot ID: P27361
  ENST ID: ENST00000263025
  CDS Start-End: 86-1225
ctgcgggtgacaggcaggcgggaaggggcggggcctcgggcggggccgccgtggggaggagggcggtgggaggggaggagtggagatggcggcggcggcggctcaggggggcgggggcggggagccccgtagaaccgagggggtcggcccgggggtcccgggggaggtggagatggtgaaggggcagccgttcgacgtgggcccgcgctacacgcagttgcagtacatcggcgagggcgcgtacggcatggtcagctcggcctatgaccacgtgcgcaagactcgcgtggccatcaagaagatcagccccttcgaacatcagacctactgccagcgcacgctccgggagatccagatcctgctgcgcttccgccatgagaatgtcatcggcatccgagacattctgcgggcgtccaccctggaagccatgagagatgtctacattgtgcaggacctgatggagactgacctgtacaagttgctgaaaagccagcagctgagcaatgaccatatctgctacttcctctaccagatcctgcggggcctcaagtacatccactccgccaacgtgctccaccgagatctaaagccctccaacctgctcatcaacaccacctgcgaccttaagatttgtgatttcggcctggcccggattgccgatcctgagcatgaccacaccggcttcctgacggagtatgtggctacgcgctggtaccgggccccagagatcatgctgaactccaagggctataccaagtccatcgacatctggtctgtgggctgcattctggctgagatgctctctaaccggcccatcttccctggcaagcactacctggatcagctcaaccacattctgggcatcctgggctccccatcccaggaggacctgaattgtatcatcaacatgaaggcccgaaactacctacagtctctgccctccaagaccaaggtggcttgggccaagcttttccccaagtcagactccaaagcccttgacctgctggaccggatgttaacctttaaccccaataaacggatcacagtggaggaagcgctggctcacccctacctggagcagtactatgacccgacggatgagccagtggccgaggagcccttcaccttcgccatggagctggatgacctacctaaggagcggctgaaggagctcatcttccaggagacagcacgcttccagcccggagtgctggaggccccctagcccagacagacatctctgcaccctggggcctggacctgcctcctgcctgcccctctcccgccagactgttagaaaatggacactgtgcccagcccggaccttggcagcccaggccggggtggagcatgggcctggccacctctctcctttgctgaggcctccagcttcaggcaggccaaggccttctcctccccacccgccctccccacggggcctcgggacctcaggtggccccagttcaatctcccgctgctgctgctgcgcccttaccttccccagcgtcccagtctctggcagttctggaatggaagggttctggctgccccaacctgctgaagggcagaggtggagggtggggggcgctgagtagggactcagggccatgcctgcccccctcatctcattcaaaccccaccctagtttccctgaaggaacattccttagtctcaagggctagcatccctgaggagccaggccgggccgaatcccctccctgtcaaagctgtcacttcgcgtgccctcgctgcttctgtgtgtggtgagcagaagtggagctggggggcgtggagagcccggcgcccctgccacctccctgacccgtctaatatataaatatagagatgtgtctatggctga

SEQ ID NO: 154847 - DNA, 1743 bp, Homo sapiens
  Payload ID: 10447
  Gene Symbol: MAPK3
  Gene Name: mitogen-activated protein kinase 3
  Uniprot ID: P27361
  ENST ID: ENST00000322266
  CDS Start-End: 101-1108
ctggcgcgcgcggccctgcgggtgacaggcaggcgggaaggggcggggcctcgggcggggccgccgtggggaggagggcggtgggaggggaggagtggagatggcggcggcggcggctcaggggggcgggggcggggagccccgtagaaccgagggggtcggcccgggggtcccgggggaggtggagatggtgaaggggcagccgttcgacgtgggcccgcgctacacgcagttgcagtacatcggcgagggcgcgtacggcatggtcagctcggcctatgaccacgtgcgcaagactcgcgtggccatcaagaagatcagccccttcgaacatcagacctactgccagcgcacgctccgggagatccagatcctgctgcgcttccgccatgagaatgtcatcggcatccgagacattctgcgggcgtccaccctggaagccatgagagatgtctacattgtgcaggacctgatggagactgacctgtacaagttgctgaaaagccagcagctgagcaatgaccatatctgctacttcctctaccagatcctgcggggcctcaagtacatccactccgccaacgtgctccaccgagatctaaagccctccaacctgctcatcaacaccacctgcgaccttaagatttgtgatttcggcctggcccggattgccgatcctgagcatgaccacaccggcttcctgacggagtatgtggctacgcgctggtaccgggccccagagatcatgctgaactccaagggctataccaagtccatcgacatctggtctgtgggctgcattctggctgagatgctctctaaccggcccatcttccctggcaagcactacctggatcagctcaaccacattctggcccttgacctgctggaccggatgttaacctttaaccccaataaacggatcacagtggaggaagcgctggctcacccctacctggagcagtactatgacccgacggatgagccagtggccgaggagcccttcaccttcgccatggagctggatgacctacctaaggagcggctgaaggagctcatcttccaggagacagcacgcttccagcccggagtgctggaggccccctagcccagacagacatctctgcaccctggggcctggacctgcctcctgcctgcccctctcccgccagactgttagaaaatggacactgtgcccagcccggaccttggcagcccaggccggggtggagcatgggcctggccacctctctcctttgctgaggcctccagcttcaggcaggccaaggccttctcctccccacccgccctccccacggggcctcgggacctcaggtggccccagttcaatctcccgctgctgctgctgcgcccttaccttccccagcgtcccagtctctggcagttctggaatggaagggttctggctgccccaacctgctgaagggcagaggtggagggtggggggcgctgagtagggactcagggccatgcctgcccccctcatctcattcaaaccccaccctagtttccctgaaggaacattccttagtctcaagggctagcatccctgaggagccaggccgggccgaatcccctccctgtcaaagctgtcacttcgcgtgccctcgctgcttctgtgtgtggtgagcagaagtggagctggggggcgtggagagcccggcgcccctgccacctccctgacccgtctaatatataaatatagagatgtgtctatggctg

SEQ ID NO: 154848 - DNA, 1074 bp, Homo sapiens
  Payload ID: 10447
  Gene Symbol: MAPK3
  Gene Name: mitogen-activated protein kinase 3
  Uniprot ID: P27361
  ENST ID: ENST00000395199
  CDS Start-End: 1-1074
atggcggcggcggcggctcaggggggcgggggcggggagccccgtagaaccgagggggtcggcccgggggtcccgggggaggtggagatggtgaaggggcagccgttcgacgtgggcccgcgctacacgcagttgcagtacatcggcgagggcgcgtacggcatggtcagctcggcctatgaccacgtgcgcaagactcgcgtggccatcaagaagatcagccccttcgaacatcagacctactgccagcgcacgctccgggagatccagatcctgctgcgcttccgccatgagaatgtcatcggcatccgagacattctgcgggcgtccaccctggaagccatgagagatgtctacattgtgcaggacctgatggagactgacctgtacaagttgctgaaaagccagcagctgagcaatgaccatatctgctacttcctctaccagatcctgcggggcctcaagtacatccactccgccaacgtgctccaccgagatctaaagccctccaacctgctcatcaacaccacctgcgaccttaagatttgtgatttcggcctggcccggattgccgatcctgagcatgaccacaccggcttcctgacggagtatgtggctacgcgctggtaccgggccccagagatcatgctgaactccaagggctataccaagtccatcgacatctggtctgtgggctgcattctggctgagatgctctctaaccggcccatcttccctggcaagcactacctggatcagctcaaccacattctgggcatcctgggctccccatcccaggaggacctgaattgtatcatcaacatgaaggcccgaaactacctacagtctctgccctccaagaccaaggtggcttgggccaagcttttccccaagtcagactccaaagcccttgacctgctggaccggatgttaacctttaaccccaataaacggatcacagtggaggaagcgctggctcacccctacctggagcagtactatgacccgacggatgaggtgggccagtccccagcagcagtggggctgggggcaggggagcaggggggcacgtag

SEQ ID NO: 154849 - DNA, 997 bp, Homo sapiens
  Payload ID: 10447
  Gene Symbol: MAPK3
  Gene Name: mitogen-activated protein kinase 3
  ENST ID: ENST00000395200
  CDS Start-End: 29-964
cggcccgggggtcccgggggaggtggagatggtgaaggggcagccgttcgacgtgggcccgcgctacacgcagttgcagtacatcggcgagggcgcgtacggcatggtcagctcggcctatgaccacgtgcgcaagactcgcgtggccatcaagaagatcagccccttcgaacatcagacctactgccagcgcacgctccgggagatccagatcctgctgcgcttccgccatgagaatgtcatcggcatccgagacattctgcgggcgtccaccctggaagccatgagagatgtctacattgtgcaggacctgatggagactgacctgtacaagttgctgaaaagccagcagctgagcaatgaccatatctgctacttcctctaccagatcctgcggggcctcaagtacatccactccgccaacgtgctccaccgagatctaaagccctccaacctgctcatcaacaccacctgcgaccttaagggctataccaagtccatcgacatctggtctgtgggctgcattctggctgagatgctctctaaccggcccatcttccctggcaagcactacctggatcagctcaaccacattctgggcatcctgggctccccatcccaggaggacctgaattgtatcatcaacatgaaggcccgaaactacctacagtctctgccctccaagaccaaggtggcttgggccaagcttttccccaagtcagactccaaagcccttgacctgctggaccggatgttaacctttaaccccaataaacggatcacagtggaggaagcgctggctcacccctacctggagcagtactatgacccgacggatgagccagtggccgaggagcccttcaccttcgccatggagctggatgacctacctaaggagcggctgaaggagctcatcttccaggagacagcacgcttccagcccggagtgctggaggccccctagcccagacagacatctctgcaccctggggcctgg

SEQ ID NO: 154850 - DNA, 1008 bp, Homo sapiens
  Payload ID: 10447
  Gene Symbol: MAPK3
  Gene Name: mitogen-activated protein kinase 3
  Uniprot ID: P27361
  ENST ID: ENST00000395202
  CDS Start-End: 1-1008
atggcggcggcggcggctcaggggggcgggggcggggagccccgtagaaccgagggggtcggcccgggggtcccgggggaggtggagatggtgaaggggcagccgttcgacgtgggcccgcgctacacgcagttgcagtacatcggcgagggcgcgtacggcatggtcagctcggcctatgaccacgtgcgcaagactcgcgtggccatcaagaagatcagccccttcgaacatcagacctactgccagcgcacgctccgggagatccagatcctgctgcgcttccgccatgagaatgtcatcggcatccgagacattctgcgggcgtccaccctggaagccatgagagatgtctacattgtgcaggacctgatggagactgacctgtacaagttgctgaaaagccagcagctgagcaatgaccatatctgctacttcctctaccagatcctgcggggcctcaagtacatccactccgccaacgtgctccaccgagatctaaagccctccaacctgctcatcaacaccacctgcgaccttaagatttgtgatttcggcctggcccggattgccgatcctgagcatgaccacaccggcttcctgacggagtatgtggctacgcgctggtaccgggccccagagatcatgctgaactccaagggctataccaagtccatcgacatctggtctgtgggctgcattctggctgagatgctctctaaccggcccatcttccctggcaagcactacctggatcagctcaaccacattctggcccttgacctgctggaccggatgttaacctttaaccccaataaacggatcacagtggaggaagcgctggctcacccctacctggagcagtactatgacccgacggatgagccagtggccgaggagcccttcaccttcgccatggagctggatgacctacctaaggagcggctgaaggagctcatcttccaggagacagcacgcttccagcccggagtgctggaggccccctag

SEQ ID NO: 154851 - DNA, 961 bp, Homo sapiens
  Payload ID: 10447
  Gene Symbol: MAPK3
  Gene Name: mitogen-activated protein kinase 3
  ENST ID: ENST00000478356
  CDS Start-End: 554-961
cgggagaggaggaggaggcgccgagcgctttccgggacgtggagacgcggagcgtcccgaggagctcggcctatgaccacgtgcgcaagactcgcgtggccatcaagaagatcagccccttcgaacatcagacctactgccagcgcacgctccgggagatccagatcctgctgcgcttccgccatgagaatgtcatcggcatccgagacattctgcgggcgtccaccctggaagccatgagagatgtctacattgtgcaggacctgatggagactgacctgtacaagttgctgaaaagccagcagctgagcaatgaccatatctgctacttcctctaccagatcctgcggggcctcaagtacatccactccgccaacgtgctccaccgagatctaaagccctccaacctgctcatcaacaccacctgcgaccttaagatttgtgatttcggcctggcccggattgccgatcctgagcatgaccacaccggcttcctgacggaggctataccaagtccatcgacatctggtctgtgggctgcattctggctgagatgctctctaaccggcccatcttccctggcaagcactacctggatcagctcaaccacattctgggcatcctgggctccccatcccaggaggacctgaattgtatcatcaacatgaaggcccgaaactacctacagtctctgccctccaagaccaaggtggcttgggccaagcttttccccaagtcagactccaaagcccttgacctgctggaccggatgttaacctttaaccccaataaacggatcacagtggaggaagcgctggctcacccctacctggagcagtactatgacccgacggatgagccagtggccgaggagcccttcaccttcgccatggagctggatgacctacctaaggagcggctgaaggagctcatcttccaggagacagcacgcttccagccc

SEQ ID NO: 154852 - DNA, 1718 bp, Homo sapiens
  Payload ID: 10447
  Gene Symbol: MAPK3
  Gene Name: mitogen-activated protein kinase 3
  ENST ID: ENST00000490298
  CDS Start-End: 19-1038
gggaggggaggagtggagatggcggcggcggcggctcaggggggcgggggcggggagccccgtagaaccgagggggtcggcccgggggtcccgggggaggtggagatggtgaaggggcagccgttcgacgtgggcccgcgctacacgcagttgcagtacatcggcgagggcgcgtacggcatggtcagctcggcctatgaccacgtgcgcaagactcgcgtggccatcaagaagatcagccccttcgaacatcagacctactgccagcgcacgctccgggagatccagatcctgctgcgcttccgccatgagaatgtcatcggcatccgagacattctgcgggcgtccaccctggaagccatgagagatgtctacattgtgcaggacctgatggagactgacctgtacaagttgctgaaaagccagcagctgagcaatgaccatatctgctacttcctctaccagatcctgcggggcctcaagtacatccactccgccaacgtgctccaccgagatctaaagccctccaacctgctcatcaacaccacctgcgaccttaagatttgtgatttcggcctggcccggattgccgatcctgagcatgaccacaccggcttcctgacggagtatgtggctacgcgctggtaccgggccccagagatcatgctgaactccaagggctataccaagtccatcgacatctggtctgtgggctgcattctggctgagatgctctctaaccggcccatcttccctggcaagcactacctggatcagctcaaccacattctgggcatcctgggctccccatcccaggaggacctgaattgtatcatcaacatgaaggcccgaaactacctacagtctctgccctccaagaccaaggtggcttgggccaagcttttccccaagtcagactccaaagcccttgacctgctggaccggatgttaacctttaaccccaataaacggatcacatggccgaggagcccttcaccttcgccatggagctggatgacctacctaaggagcggctgaaggagctcatcttccaggagacagcacgcttccagcccggagtgctggaggccccctagcccagacagacatctctgcaccctggggcctggacctgcctcctgcctgcccctctcccgccagactgttagaaaatggacactgtgcccagcccggaccttggcagcccaggccggggtggagcatgggcctggccacctctctcctttgctgaggcctccagcttcaggcaggccaaggccttctcctccccacccgccctccccacggggcctcgggacctcaggtggccccagttcaatctcccgctgctgctgctgcgcccttaccttccccagcgtcccagtctctggcagttctggaatggaagggttctggctgccccaacctgctgaagggcagaggtggagggtggggggcgctgagtagggactcagggccatgcctgcccccctcatctcattcaaaccccaccctagtttccctgaaggaacattccttagtctcaagggctagcatccctgaggagccaggccgggccgaatcccctccctgtcaaagctgtcacttcgcgtgccctcgctgcttctgtgtgtggtgagcagaagtggagctggggggcgtggagagcccggcgcccctgccacctccctgacccgtctaatatataaatatagaga

SEQ ID NO: 154853 - DNA, 2567 bp, Homo sapiens
  Payload ID: 10447
  Gene Symbol: MAPK3
  Gene Name: mitogen-activated protein kinase 3
  ENST ID: ENST00000484663
  CDS Start-End: 1135-1932
gagcgctttccgggacgtggagacgcggagcgtcccgaggaggcaggagactcgggatgatcgggagcgtcccagggagggggcccctgagtgctttctgggggagggggcgctgcctacgtcctcaggggagcaggcttggaggctttgagtccacccttctgtaatgatgggaggggcatccgagtgcatgtgggggcccgcggggaccctagtgacacggggcgaggcccagaggatgagtactctcggggaggcgacatccttagtgaagaggcagtggagggcccgttttgggggaaagggtgtcttggattccccctgtgaggcagtgccagggagcctgggggagaagagccgagatcagggtggggcagggctttggccccaccaccccaggggcccagagagagatgaggcggccaggagtgccacctgcatgttttgggaggggtctgtgagtgcccccggccccaccgtgtgctctgggcctctatccctctgggacagccccgctgcccggatccctcaccctgggaccctcccctgccctgtccattctctcctgcccctcccctggctgccaccttcccagtatttgccccatggtgtgtccccagcatctgcacccccggacctgtcttgggttaaggagcctttcctgggaatgggggcgaagggttcagggccagtagaatggaaggggattgaggagaggggaagtcagtgagcggtcagtctcttcctctgtttgtaaagtcaccgaagggccgcctggctggtccccagctttctctctggagatcccaggcctccacagcaggaaggaaccagcattgtttatgatttgaccagagccagctcctgctctctcccctccctgccaaggcctgggtggggccaccaggcccggactccccctttgtaaggccacagcagcagcctctctccggtcccctcagctcggcctatgaccacgtgcgcaagactcgcgtggccatcaagaagatcagccccttcgaacatcagacctactgccagcgcacgctccgggagatccagatcctgctgcgcttccgccatgagaatgtcatcggcatccgagacattctgcgggcgtccaccctggaagccatgagagatgtctacattgtgcaggacctgatggagactgacctgtacaagttgctgaaaagccagcagctgagcaatgaccatatctgctacttcctctaccagatcctgcggggcctcaagtacatccactccgccaacgtgctccaccgagatctaaagccctccaacctgctcatcaacaccacctgcgaccttaagatttgtgatttcggcctggcccggattgccgatcctgagcatgaccacaccggcttcctgacggagtatgtggctacgcgctggtaccgggccccagagatcatgctgaactccaagggctataccaagtccatcgacatctggtctgtgggctgcattctggctgagatgctctctaaccggcccatcttccctggcaagcactacctggatcagctcaaccacattctgggcatcctgggctccccatcccaggaggacctgaattgtatcatcaacatgaaggcccgaaactacctacagtctctgccctccaagaccaaggtggcttgggccaagcttttccccaagtcagactccaaagcccttgacctgctggaccggatgttaacctttaaccccaataaacggatcacagtggaggaagcgctggctcacccctacctggagcagtactatgacccgacggatgagccagtggccgaggagcccttcaccttcgccatggagctggatgacctacctaaggagcggctgaaggagctcatcttccaggagacagcacgcttccagcccggagtgctggaggccccctagcccagacagacatctctgcaccctggggcctggacctgcctcctgcctgcccctctcccgccagactgttagaaaatggacactgtgcccagcccggaccttggcagcccaggccggggtggagcatgggcctggccacctctctcctttgctgaggcctccagcttcaggcaggccaaggccttctcctccccacccgccctccccacggggcctcgggacctcaggtggccccagttcaatctcccgctgctgctgctgcgcccttaccttccccagcgtcccagtctctggcagttctggaatggaagggttctggctgccccaacctgctgaagggcagaggtggagggtggggggcgctgagtagggactcagggccatgcctgcccccctcatctcattcaaaccccaccctagtttccctgaaggaacattccttagtctcaagggctagcatccctgaggagccaggccgggccgaatcccctccctgtcaaagctgtcacttcgcgtgccctcgctgcttctgtgtgtggtgagcagaagtggagctggggggcgtggagagcccggcgcccctgccacctccctgacccgtctaatatataaatatagagatgtgtctatggctg

SEQ ID NO: 154854 - DNA, 465 bp, Homo sapiens
  Payload ID: 10447
  Gene Symbol: MAPK3
  Gene Name: mitogen-activated protein kinase 3
  ENST ID: ENST00000481230
  CDS Start-End: 204-465
acgccctggccgcttcgccatcgaggggaggctcggcctatgaccacgtgcgcaagactcgcgtggccatcaagaagatcagccccttcgaacatcagacctactgccagcgcacgctccgggagatccagatcctgctgcgcttccgccatgagaatgtcatcggcatccgagacattctgcgggcgtccaccctggaagccatgagagatgtctacattgtgcaggacctgatggagactgacctgtacaagttgctgaaaagccagcagctgagcaatgaccatatctgctacttcctctaccagatcctgcggggcctcaagtacatccactccgccaacgtgctccaccgagatctaaagccctccaacctgctcatcaacaccacctgcgaccttaagatttgtgatttcggcctggcccggattgccgatcctgagcatgaccacaccggcttcctga

SEQ ID NO: 154855 - DNA, 1878 bp, Homo sapiens
  Payload ID: 10447
  Gene Symbol: MAPK3
  Gene Name: mitogen-activated protein kinase 3
  ENST ID: ENST00000466521
  CDS Start-End: 86-1036
ctgcgggtgacaggcaggcgggaaggggcggggcctcgggcggggccgccgtggggaggagggcggtgggaggggaggagtggagatggcggcggcggcggctcaggggggcgggggcggggagccccgtagaaccgagggggtcggcccgggggtcccgggggaggtggagatggtgaaggggcagccgttcgacgtgggcccgcgctacacgcagttgcagtacatcggcgagggcgcgtacggcatggtcagctcggcctatgaccacgtgcgcaagactcgcgtggccatcaagaagatcagccccttcgaacatcagacctactgccagcgcacgctccgggagatccagatcctgctgcgcttccgccatgagaatgtcatcggcatccgagacattctgcgggcgtccaccctggaagccatgagagatgtctacattgtgcaggacctgatggagactgacctgtacaagttgctgaaaagccagcagctgagcaatgaccatatctgctacttcctctaccagatcctgcggggcctcaagtacatccactccgccaacgtgctccaccgagatctaaagccctccaacctgctcatcaacaccacctgcgaccttaagatttgtgatttcggcctggcccggattgccgatcctgagcatgaccacaccggcttcctgacggagtatgtggctacgcgctggtaccgggccccagagatcatgctgaactccaagggctataccaagtccatcgacatctggtctgtgggctgcattctggctgagatgctctctaaccggcccatcttccctggcaagcactacctggatcagctcaaccacattctgggcatcctgggctccccatcccaggaggacctgaattgtatcatcaacatgaaggcccgaaactacctacagtctctgccctccaagaccaaggtggcttgggccaagcttttccccaagtcagactccaaaggttcgagagacatgaggcccttgacctgctggaccggatgttaacctttaaccccaataaacggatcacagtggaggaagcgctggctcacccctacctggagcagtactatgacccgacggatgagccagtggccgaggagcccttcaccttcgccatggagctggatgacctacctaaggagcggctgaaggagctcatcttccaggagacagcacgcttccagcccggagtgctggaggccccctagcccagacagacatctctgcaccctggggcctggacctgcctcctgcctgcccctctcccgccagactgttagaaaatggacactgtgcccagcccggaccttggcagcccaggccggggtggagcatgggcctggccacctctctcctttgctgaggcctccagcttcaggcaggccaaggccttctcctccccacccgccctccccacggggcctcgggacctcaggtggccccagttcaatctcccgctgctgctgctgcgcccttaccttccccagcgtcccagtctctggcagttctggaatggaagggttctggctgccccaacctgctgaagggcagaggtggagggtggggggcgctgagtagggactcagggccatgcctgcccccctcatctcattcaaaccccaccctagtttccctgaaggaacattccttagtctcaagggctagcatccctgaggagccaggccgggccgaatcccctccctgtcaaagctgtcacttcgcgtgccctcgctgcttctgtgtgtggtgagcagaagtggagctggggggcgtggagagcccggcgcccctgccacctccctgacccgtctaatatataaatatagagatgtgtctatggctga

SEQ ID NO: 154856 - DNA, 612 bp, Homo sapiens
  Payload ID: 10447
  Gene Symbol: MAPK3
  Gene Name: mitogen-activated protein kinase 3
  ENST ID: ENST00000461737
  CDS Start-End: 1-366
ggcatcctgggctccccatcccaggaggacctgaattgtatcatcaacatgaaggcccgaaactacctacagtctctgccctccaagaccaaggtggcttgggccaagcttttccccaagtcagactccaaagcccttgacctgctggaccggatgttaacctttaaccccaataaacggatcacagtggaggaagcgctggctcacccctacctggagcagtactatgacccgacggatgagccagtggccgaggagcccttcaccttcgccatggagctggatgacctacctaaggagcggctgaaggagctcatcttccaggagacagcacgcttccagcccggagtgctggaggccccctagcccagacagacatctctgcaccctggggcctggaacagaactggcaaagaggcaagaggtcactgagggcctctgtcacccaggacctgcctcctgcctgcccctctcccgccagactgttagaaaatggacactgtgcccagcccggaccttggcagcccaggccggggtggagcatgggcctggccacctctctcctttgctgaggcctccagcttcaggcaggccaaggccttctcctcccca

SEQ ID NO: 154857 - DNA, 4770 bp, Homo sapiens
  Payload ID: 10448
  Gene Symbol: MAPK4
  Gene Name: mitogen-activated protein kinase 4
  Uniprot ID: P31152
  ENST ID: ENST00000400384
  CDS Start-End: 1037-2800
gcgggagccggagcccgagctggagcagcgagccgggctgtcggggcgaccgcgggagctcgccgtgcgccgtggctgggaccggcctggccgagcgcgccggcgccgcggccgcagacaaagggcggctcgcgcccgggccgccacgctctcgggctctgcctcgggaaggagacttggtctgaaagatgccacattcctgcagcctctcttggtgcagtggaatacagtcttgggcgaggtggcgtggatgagctggtgaaagaggatgctgcccacatccaaaggctccagaggatcctggcctggcagctgagctcccctgcatttggaacctcaggcgtaacttggtgtagagctcatgaaaggtgcttgtgtttctccagcttttttcaccagtgcttaccagactggctcaggttttggaatctaaggtgagctggtagaaacaggagaggtagaaagaagcccctggatgcctccagaattcattgatgggatccctgcatactgcttggaacacagaaagaggctgtgacacagctgagctttggagcatcttaaggagctcagctcagcaaacaactcttgcatttcagccagaaagagcctcttgtaacaaagtattcaaaggggagagtttctgcatcttttactttgcagtccactatggtagaaaacttgacattccatagataatgatactgggttttctttccaagatgccagctttaaaagaaatatgagccattctaagctttaagaagggttcaggaaacacaggaattagtagacagccctcccaatgcaggttaagacgacagcctgcgcccccaactagcacagctcagcgagcatgaccatatgccattctcgtctccagagagctggtggcagtgacctcactaggagaaaacacatccctcagccgtgggacttgacagaatgaggtgcgcgagggaggccgctagccgagacttggcctttcctgactgcccctgtgttacctgggcagctccagatcactgagcccacaatggctgagaagggtgactgcatcgccagtgtctatgggtatgacctcggtgggcgctttgttgacttccaacccctgggcttcggtgtcaatggtttggtgctgtcggccgtggacagccgggcctgccggaaggtcgctgtgaagaagattgccctgagcgatgcccgcagcatgaagcacgcgctccgagagatcaagatcattcggcgcctggaccacgacaacatcgtcaaagtgtacgaggtgctcggtcccaagggcactgacctgcagggtgagctgttcaagttcagcgtggcgtacatcgtccaggagtacatggagaccgacctggcacgcctgctggagcagggcacgctggcagaagagcatgccaagctgttcatgtaccagctgctccgcgggctcaagtacatccactccgccaacgtgctgcacagggacctgaagcccgccaacatcttcatcagcacagaggacctcgtgctcaagattggggatttcgggttggcaaggatcgttgatcagcattactcccacaagggttatctgtcagaagggttggtaacaaagtggtaccgttccccacgactgctcctttcccccaataactacaccaaagccatcgacatgtgggccgccggctgcatcctggctgagatgcttacggggagaatgctctttgctggggcccatgagctggagcagatgcaactcatcctggagaccatccctgtaatccgggaggaagacaaggacgagctgctcagggtgatgccttcctttgtcagcagcacctgggaggtgaagaggcctctgcgcaagctgctccctgaagtgaacagtgaagccatcgactttctggagaagatcctgacctttaaccccatggatcgcctaacagctgagatggggctgcaacacccctacatgagcccatactcgtgccctgaggacgagcccacctcacaacaccccttccgcattgaggatgagatcgacgacatcgtgctgatggccgctaaccagagccagctgtccaactgggacacgtgcagttccaggtaccctgtgagcctgtcgtcggacctggagtggcggcctgaccggtgccaggacgccagcgaggtacagcgcgacccgcgcgcgggttcggcgccactggctgaggacgtgcaggtggacccgcgcaaggactcgcacagcagctccgagcgcttcctagagcagtcgcactcgtccatggagcgcgccttcgaggccgactacgggcgctcctgcgactacaaggtggggtcgccgtcctacctggacaagctgctgtggcgcgacaacaagccgcaccactactcggagcccaagctcatcctggacctgtcgcactggaagcaggcggccggcgcgccccccacggccacggggctggcggacacgggggcgcgcgaggacgagccggccagcctcttcctggagatcgcgcagtgggtcaagagcacgcagggcggcccagagcacgccagcccgcccgccgacgaccccgagcgccgcttgtctgcctcgccccccggccgcccggccccggtggacggcggcgccagcccccagttcgacctggacgtgttcatctcccgcgccctgaagctctgcaccaagcccgaggacctgccggacaataaactgggcgacctcaatggtgcgtgcatccccgagcaccctggcgacctcgtgcagaccgaggccttctccaaagaaaggtggtgagggcggaggggccgctccaggccccacagagcaggagacccccagagaaagccggggctggcaggaggcggccgcccttcccgcccctctctgctgccttggggttggcagaacacgtgaaggatccgaggagcgagaggaatgtccatttcttaaactgccttaataactagcctttaacctgtgggagcgggtttgaacaggaccctggcttaggggttgatcactttcctagcaaaggggagaccacatgtggtgcacagggaagaaacggctttagacagcagtctgcgggccccacctgggtggcaggatgccgagaaatcttgcagaggtagctccgaaaccatctggcccaactagcctcaactgacagctgaggaaaggcaattaggcccagagaggcagagacactcgcttaagatcacaggcttagtgtgaggacgagcttgaaatcccagtctcctggcccccaggccagggtctgtccaccatagaatgtcttcctctactggggtcgttctggctttttgttagaaacttggtctgagatgtttcttccctgtccattaccattcgatgttcttttattcagagcaatgtttcttgtattctgaaactggaaactgaaccagtttgtttctcctagtcaccaagcatactttcctggctccccaagtacttaaatgttctcatctgtcgcacccctgtatttgcctcacccctgcatggtcggaaatcttcgtttcaggtcagaacagcctggggtctgtgggtaaaatcagcccttctcccaggcctgtgcacacaccccctcagcactccctatgcactttcctgacacgcaaagacacagccctctttccccactgggcgtcctaccccagtgaggttgaaggcaccaattccaagaatccctccaacctccctgccagcactcccccttcaccccacacccggcccccccacctaaccacagcgcctctccagacctacctcgggacctaatgttctctacatgaactgctcatttggaggacagcagtgaggtcctgccatagagcaaatgtgttaggagagaaggtttcacatgggacccaacatccttcatcaatactttcctgagtttgatcatccatttagccttgacaaacagcagaccctacagagatgtgttggagagcacgtcgtgaccttgggggcaaggaatccagaaaggtaggaagatatgaaaagagaggtgtcaacagcaagggctcttaggggtcaggcaccagcatggagacctcatgacaaaggaagggactcaaagcagcaatgcccctcatagtgtaggctaaggtgagtttggtgcatgcaaacctgtgtgctcacccacagagcatggggtaatggtgtgtagacacaggccctctgcagaagcgtggggtggggacactgacagcccctatctggtccccaggaacattctaccatttctgccactggtgttcagctccttctcttcccccaacactcccaaagatacccacaggaagtccagccagtttccaggtagaggattccaccagttggtcttgggctgcgttcaccctcacatcacagcaccttaaatctaatcagcaaactataatttgtacgttgaaacctgcaacacattagaaacttatatttaaaaacagaattaatcacactgaccaacttttaaatggaaaatatgtaaataggaagtgtttgggttttgttttttctttaagaaaaagaaatgtacaccactcctcatgtgccattttgtcctcagagggcggctttacttttttggtaaaggaacaagctgctggccttgaccaggagttcatatataactgttattacagaggaattgttataactactaatgtttttaaaaaatttattaaacattattaaacttgatcaggtcaggccaaataaagttttattggaacaca

SEQ ID NO: 154858 - DNA, 1576 bp, Homo sapiens
  Payload ID: 10448
  Gene Symbol: MAPK4
  Gene Name: mitogen-activated protein kinase 4
  ENST ID: ENST00000540640
  CDS Start-End: 199-1329
gagctcgccgtgcgccgtggctgggaccggcctggccgagcgcgccggcgccgcggccgcagacaaagggcggctcgcgcccgggccgccacgctctcgggctctgcctcgggttatctgtcagaagggttggtaacaaagtggtaccgttccccacgactgctcctttcccccaataactacaccaaagccatcgacatgtgggccgccggctgcatcctggctgagatgcttacggggagaatgctctttgctggggcccatgagctggagcagatgcaactcatcctggagaccatccctgtaatccgggaggaagacaaggacgagctgctcagggtgatgccttcctttgtcagcagcacctgggaggtgaagaggcctctgcgcaagctgctccctgaagtgaacagtgaagccatcgactttctggagaagatcctgacctttaaccccatggatcgcctaacagctgagatggggctgcaacacccctacatgagcccatactcgtgccctgaggacgagcccacctcacaacaccccttccgcattgaggatgagatcgacgacatcgtgctgatggccgctaaccagagccagctgtccaactgggacacgtgcagttccaggtaccctgtgagcctgtcgtcggacctggagtggcggcctgaccggtgccaggacgccagcgaggtacagcgcgacccgcgcgcgggttcggcgccactggctgaggacgtgcaggtggacccgcgcaaggactcgcacagcagctccgagcgcttcctagagcagtcgcactcgtccatggagcgcgccttcgaggccgactacgggcgctcctgcgactacaaggtggggtcgccgtcctacctggacaagctgctgtggcgcgacaacaagccgcaccactactcggagcccaagctcatcctggacctgtcgcactggaagcaggcggccggcgcgccccccacggccacggggctggcggacacgggggcgcgcgaggacgagccggccagcctcttcctggagatcgcgcagtgggtcaagagcacgcagggcggcccagagcacgccagcccgcccgccgacgaccccgagcgccgcttgtctgcctcgccccccggccgcccggccccggtggacggcggcgccagcccccagttcgacctggacgtgttcatctcccgcgccctgaagctctgcaccaagcccgaggacctgccggacaataaactgggcgacctcaatggtgcgtgcatccccgagcaccctggcgacctcgtgcagaccgaggccttctccaaagaaaggtggtgagggcggaggggccgctccaggccccacagagcaggagacccccagagaaagccggggctggcaggaggcggccgcccttcccgcccctctctgctgccttggggttggcagaacacgtgaaggatccgaggagcgagaggaatgtccatttcttaaactgccttaataactagcctttaacctgtgggagcgggtttgaacaggaccctggcttaggggttgatcactttcctagcaaaggggagac

SEQ ID NO: 154859 - DNA, 3144 bp, Homo sapiens
  Payload ID: 10448
  Gene Symbol: MAPK4
  Gene Name: mitogen-activated protein kinase 4
  ENST ID: ENST00000588540
  CDS Start-End: 989-1834
gagttcagattcggatcgcagtcccgattatcctcccctccagcctctccctttctcgttgaagggttaatacagcgtcctctcccctcgccacccgacagaggcgcctacactggcgggaaggagacttggtctgaaagatgccacattcctgcagcctctcttggtgcagtggaatacagtcttgggcgaggtggcgtggatgagctggtgaaagaggatgctgcccacatccaaaggctccagaggatcctggcctggcagctgagctcccctgcatttggaacctcaggcgtaacttggtgtagagctcatgaaaggtgcttgtgtttctccagcttttttcaccagtgcttaccagactggctcaggttttggaatctaaggtgagctggtagaaacaggagaggtagaaagaagcccctggatgcctccagaattcattgatgggatccctgcatactgcttggaacacagaaagaggctgtgacacagctgagctttggagcatcttaaggagctcagctcagcaaacaactcttgcatttcagccagaaagagcctcttgtaacaaagtattcaaaggggagagtttctgcatcttttactttgcagtccactatggtagaaaacttgacattccatagataatgatactgggttttctttccaagatgccagctttaaaagaaatatgagccattctaagctttaagaagggttcaggaaacacaggaattagtagacagccctcccaatgcaggttaagacgacagcctgcgcccccaactagcacagctcagcgagcatgaccatatgccattctcgtctccagagagctggtggcagtgacctcactaggagaaaacacatccctcagccgtgggacttgacagaatgaggtgcgcgagggaggccgctagccgagacttggcctttcctgactgcccctgtgttacctgggcagctccagatcactgagcccacaatggctgagaagggtgactgcatcgccagtgtctatgggtatgacctcggtgggcgctttgttgacttccaacccctgggcttcggtgtcaatggtttggtgctgtcggccgtggacagccgggcctgccggaaggtcgctgtgaagaagattgccctgagcgatgcccgcagcatgaagcacgcgctccgagagatcaagatcattcggcgcctggaccacgacaacatcgtcaaagtgtacgaggtgctcggtcccaagggcactgacctgcagggtgagctgttcaagttcagcgtggcgtacatcgtccaggagtacatggagaccgacctggcacgcctgctggagcagggcacgctggcagaagagcatgccaagctgttcatgtaccagctgctccgcgggctcaagtacatccactccgccaacgtgctgcacagggacctgaagcccgccaacatcttcatcagcacagaggacctcgtgctcaagattggggatttcgggttggcaaggatcgttgatcagcattactcccacaagtctactgattgcatcacaagcattgtgggtcacattccagagccttctgagaagggagaagtcagggaagttccttttgttcttctgagcgttctctgcaagtcaaactggggagagttccagtcctgtggggtgggagcagctgtgaagaggctggaatcggagggaactttggggcctggaggcctaatggaggactctgtgatgttggactatgttgtgtcgttaccctccctgcctctgcatcctcttctgtggagcagggacaatgacagcagccatcctgggagagcatcatgatgaccaaatggaaggaaacagagggtgaggagcaccccaagcacatggtcagcacctggcaggtggctgttattattacccactcctcaaaagtgcttttggactcacattttctttctttctttttgagggtggaggtgtagagaggtgaaataaagctctgagtctgacctccaggttggtcccaggcaagattagcagcctgaggggtccggcttccacacggtagcatgaatagcatgttcaatagaaaaccggacccataccccacacggcagagggctaggcttgagcacagacactacctttgtcctgagatttctacatggcaatgaaacttcgagctaattttctcctgactggtggtcagttcctgaatttcatgggcatatcaatcattcctttagctcaacgtttttactccattcattcacccgattgtaagtgagcgcctatcttgtacagaggtgcactgcagacagagggaaaacaactggctcttgccttcaggagccctcgctgcctcccctgctatagagttaatgaagttagatgaaggggtccaggaggctgtgtgaacacaaagccttgccagctaagtcagagaggagggtcctgcagtaatatccccaaatgtaaaatgaaaaataaataccttcaacagggttctcaggaggtgagctgagctactgctggcaaaatcccttgtacagagtggatgtcaacaaatattccctcccctccctaatgtgctctcagttatgtacctggatgttaataagggagctgagagaaaagtttgctaggagggcggagaaagtttccaccctcctcgggggaagaggtcggggacagaaaggggaggcctggggctcagagaccaacgtctcatgtcttctaccacatggccacgtggctcgccccttgactcactctggtctctgctcgaatgtccccttacatgagaggcctttctggaccacccaccccatcactctctatctccttaccctgctttatttccattccttgcacttatctccactagacatatcatccatttgtttgttcagctgtctttccatccaaagtgtgcacctcatgattacagggactttgttttgctcactgctgggatcagatctcagctctgccaattattagttaatttgatcttgctcaagttagccccatctctctacctgtttcacagggtcattttgataattaaatgcactattaataaagcagtacttggcacggtgcctggcacatcataatttctcaataaacgatagctattattatga

SEQ ID NO: 154860 - DNA, 4330 bp, Homo sapiens
  Payload ID: 10448
  Gene Symbol: MAPK4
  Gene Name: mitogen-activated protein kinase 4
  ENST ID: ENST00000592595
  CDS Start-End: 973-1674
gtgcgccgtggctgggaccggcctggccgagcgcgccggcgccgcggccgcagacaaagggcggctcgcgcccgggccgccacgctctcgggctctgcctcgggaaggagacttggtctgaaagatgccacattcctgcagcctctcttggtgcagtggaatacagtcttgggcgaggtggcgtggatgagctggtgaaagaggatgctgcccacatccaaaggctccagaggatcctggcctggcagctgagctcccctgcatttggaacctcaggcgtaacttggtgtagagctcatgaaaggtgcttgtgtttctccagcttttttcaccagtgcttaccagactggctcaggttttggaatctaaggtgagctggtagaaacaggagaggtagaaagaagcccctggatgcctccagaattcattgatgggatccctgcatactgcttggaacacagaaagaggctgtgacacagctgagctttggagcatcttaaggagctcagctcagcaaacaactcttgcatttcagccagaaagagcctcttgtaacaaagtattcaaaggggagagtttctgcatcttttactttgcagtccactatggtagaaaacttgacattccatagataatgatactgggttttctttccaagatgccagctttaaaagaaatatgagccattctaagctttaagaagggttcaggaaacacaggaattagtagacagccctcccaatgcaggttaagacgacagcctgcgcccccaactagcacagctcagcgagcatgaccatatgccattctcgtctccagagagctggtggcagtgacctcactaggagaaaacacatccctcagccgtgggacttgacagaatgaggtgcgcgagggaggccgctagccgagacttggcctttcctgactgcccctgtgttacctgggcagctccagatcactgagcccacaatggctgagaagggtgactgcatcgccagtgtctatgggtatgacctcggtgggcgctttgttgacttccaacccctgggcttcggtgtcaatggtttggtgctgtcggccgtggacagccgggcctgccggaaggtcgctgtgaagaagattgccctgagcgatgcccgcagcatgaagcacgcgctccgagagatcaagatcattcggcgcctggaccacgacaacatcgtcaaagtgtacgaggtgctcggtcccaagggcactgacctgcagggtgagctgttcaagttcagcgtggcgtacatcgtccaggagtacatggagaccgacctggcacgcctgctggagcagggcacgctggcagaagagcatgccaagctgttcatgtaccagctgctccgcgggctcaagtacatccactccgccaacgtgctgcacagggacctgaagcccgccaacatcttcatcagcacagaggacctcgtgctcaagattggggatttcgggttggcaaggatcgttgatcagcattactcccacaagggttatctgtcagaagggttggtaacaaagtggtaccgttccccacgactgctcctttcccccaataactacaccaaagccatcgacatgtgggccgccggctgcatcctggctgagatgcttacggggagaatgctctttgctggtaccctgtgagcctgtcgtcggacctggagtggcggcctgaccggtgccaggacgccagcgaggtacagcgcgacccgcgcgcgggttcggcgccactggctgaggacgtgcaggtggacccgcgcaaggactcgcacagcagctccgagcgcttcctagagcagtcgcactcgtccatggagcgcgccttcgaggccgactacgggcgctcctgcgactacaaggtggggtcgccgtcctacctggacaagctgctgtggcgcgacaacaagccgcaccactactcggagcccaagctcatcctggacctgtcgcactggaagcaggcggccggcgcgccccccacggccacggggctggcggacacgggggcgcgcgaggacgagccggccagcctcttcctggagatcgcgcagtgggtcaagagcacgcagggcggcccagagcacgccagcccgcccgccgacgaccccgagcgccgcttgtctgcctcgccccccggccgcccggccccggtggacggcggcgccagcccccagttcgacctggacgtgttcatctcccgcgccctgaagctctgcaccaagcccgaggacctgccggacaataaactgggcgacctcaatggtgcgtgcatccccgagcaccctggcgacctcgtgcagaccgaggccttctccaaagaaaggtggtgagggcggaggggccgctccaggccccacagagcaggagacccccagagaaagccggggctggcaggaggcggccgcccttcccgcccctctctgctgccttggggttggcagaacacgtgaaggatccgaggagcgagaggaatgtccatttcttaaactgccttaataactagcctttaacctgtgggagcgggtttgaacaggaccctggcttaggggttgatcactttcctagcaaaggggagaccacatgtggtgcacagggaagaaacggctttagacagcagtctgcgggccccacctgggtggcaggatgccgagaaatcttgcagaggtagctccgaaaccatctggcccaactagcctcaactgacagctgaggaaaggcaattaggcccagagaggcagagacactcgcttaagatcacaggcttagtgtgaggacgagcttgaaatcccagtctcctggcccccaggccagggtctgtccaccatagaatgtcttcctctactggggtcgttctggctttttgttagaaacttggtctgagatgtttcttccctgtccattaccattcgatgttcttttattcagagcaatgtttcttgtattctgaaactggaaactgaaccagtttgtttctcctagtcaccaagcatactttcctggctccccaagtacttaaatgttctcatctgtcgcacccctgtatttgcctcacccctgcatggtcggaaatcttcgtttcaggtcagaacagcctggggtctgtgggtaaaatcagcccttctcccaggcctgtgcacacaccccctcagcactccctatgcactttcctgacacgcaaagacacagccctctttccccactgggcgtcctaccccagtgaggttgaaggcaccaattccaagaatccctccaacctccctgccagcactcccccttcaccccacacccggcccccccacctaaccacagcgcctctccagacctacctcgggacctaatgttctctacatgaactgctcatttggaggacagcagtgaggtcctgccatagagcaaatgtgttaggagagaaggtttcacatgggacccaacatccttcatcaatactttcctgagtttgatcatccatttagccttgacaaacagcagaccctacagagatgtgttggagagcacgtcgtgaccttgggggcaaggaatccagaaaggtaggaagatatgaaaagagaggtgtcaacagcaagggctcttaggggtcaggcaccagcatggagacctcatgacaaaggaagggactcaaagcagcaatgcccctcatagtgtaggctaaggtgagtttggtgcatgcaaacctgtgtgctcacccacagagcatggggtaatggtgtgtagacacaggccctctgcagaagcgtggggtggggacactgacagcccctatctggtccccaggaacattctaccatttctgccactggtgttcagctccttctcttcccccaacactcccaaagatacccacaggaagtccagccagtttccaggtagaggattccaccagttggtcttgggctgcgttcaccctcacatcacagcaccttaaatctaatcagcaaactataatttgtacgttgaaacctgcaacacattagaaacttatatttaaaaacagaattaatcacactgaccaacttttaaatggaaaatatgtaaataggaagtgtttgggttttgttttttctttaagaaaaagaaatgtacaccactcctcatgtgccattttgtcctcagagggcggctttacttttttggtaaaggaacaagctgctggccttgaccaggagttcatatataactgttattacagaggaattgttataactactaatgtttttaaaaaatttattaaacattattaaacttgatcaggtcaggccaaataaagttttattggaacaca

SEQ ID NO: 154861 - DNA, 5345 bp, Homo sapiens
  Payload ID: 10449
  Gene Symbol: MAPK6
  Gene Name: mitogen-activated protein kinase 6
  Uniprot ID: Q16659
  ENST ID: ENST00000261845
  CDS Start-End: 808-2973
cgcgaagccccgccccctcttcctcgccctctctcgcgggtcggggttacatggcggcgactgcggcaaagcgagagcctcggagacgccgctgccgccagcacagccggagacctgagccgacactgggggcagtccgcgagccccgcactctctcgatgagtcggagaagtcccgttgtatcagagtaagatggacggtagctttgattgtgattgtggtgagctggagccacctgatcactaacaaaagacatcttctgttaaccaacagccgccagggcttcctgttgaaataaatatatagcaacaaaggaaaaaaagaagcaaaacggaaatagtgcttaccagcaccttagaatgatgctgctcaggaccagtccaacactgaatgtatctgcactgtgaggagaatgttcatagaagcctgttgtgtgcatatttattcacatttttgttaaatgttaaatcgtttagcacggtaatctgagtgcacagtatgtcatttcattccgtttgagtttcttgttttcgttaaatgtctgcagagttgctgcccctttcttgaactatgagtactgcaatctttttaattctcaatatgaatagagctttttgagctttaaatctaaggggaactcgacaggcctgtttggcatatgcaatgaacatcaagaaaccatcttgctgtggaagcataattatttttcttctccctttttgaaagatctttccttttgatgccagttttcttccttgtttacacaagttcaatttgaaaggaaaaggcaatagtaagggtttcaaaatggcagagaaatttgaaagtctcatgaacattcatggttttgatctgggttctaggtatatggacttaaaaccattgggttgtggaggcaatggcttggttttttctgctgtagacaatgactgtgacaaaagagtagccatcaagaaaattgtccttactgatccccagagtgtcaaacatgctctacgtgaaatcaaaattattagaagacttgaccatgataacattgtgaaagtgtttgagattcttggtcccagtggaagccaattaacagacgatgtgggctctcttacggaactgaacagtgtttacattgttcaggagtacatggagacagacttggctaatgtgctggagcagggccctttactggaagagcatgccaggcttttcatgtatcagctgctacgggggctcaagtatattcactctgcaaatgtactgcacagagatctcaaaccagctaatcttttcattaatacggaagacttggtgctgaagataggtgactttggtcttgcacggatcatggatcctcattattcccataagggtcatctttctgaaggattggttactaaatggtacagatctccacgtcttttactttctcctaataattatactaaagccattgacatgtgggctgcaggctgcatctttgctgaaatgctgactggtaaaaccctttttgcaggtgcacatgaacttgaacagatgcagctgattttagaatctattcctgttgtacatgaggaagatcgtcaggagcttctcagcgtaattccagtttacattagaaatgacatgactgagccacacaaacctttaactcagctgcttccaggaattagtcgagaagcactggatttcctggaacaaattttgacatttagccccatggatcggttaacagcagaagaagcactctcccatccttacatgagcatatattcttttccaatggatgagccaatttcaagccatccttttcatattgaagatgaagttgatgatattttgcttatggatgaaactcacagtcacatttataactgggaaaggtatcatgattgtcagttttcagagcatgattggcctgtacataacaactttgatattgatgaagttcagcttgatccaagagctctgtccgatgtcactgatgaagaagaagtacaagttgatccccgaaaatatttggatggagatcgggaaaagtatctggaggatcctgcttttgataccaattactctactgagccttgttggcaatactcagatcatcatgaaaacaaatattgtgatctggagtgtagccatacttgtaactacaaaacgaggtcatcatcatatttagataacttagtttggagagagagtgaagttaaccattactatgaacccaagcttattatagatctttccaattggaaagaacaaagcaaagaaaaatctgataagaaaggcaaatcaaaatgtgaaaggaatggattggttaaagcccagatagcgctagaggaagcatcacagcaactggctggaaaagaaagggaaaagaatcagggatttgattttgattcctttattgcaggaactattcagcttagttcccagcatgagcctactgatgttgttgataaattaaatgacttgaatagctcagtgtcccaactagaattgaaaagtttgatatcaaagtcagtaagccaagaaaaacaggaaaaaggaatggcaaatctggctcaattagaagccttgtaccagtcttcttgggacagccagtttgtgagtggtggggaggactgttttttcataaatcagttttgtgaggtaaggaaggatgaacaagttgagaaggaaaacacttacactagttacttggacaagttctttagcaggaaagaagatactgaaatgctagaaactgagccagtagaggatgggaagcttggggagagaggacatgaggaaggatttctgaacaacagtggggagttcctctttaacaagcagctcgagtccataggcatcccacagtttcacagtccagttgggtcaccacttaagtcaatacaggccacattaacaccttctgctatgaaatcttcccctcaaattcctcatcaaacatacagcagcattctgaaacatctgaactaaaacactcagcagacatttatctttgtattcttcatgaaatgtgttttgtctttttttattactagtgtttaagtcattttttacttgaatcagatggtgtcatttagtaaggattttatgagttcttgttttttaaaatccagactttctttttctacatgtgagatagttttcattttaactggcatgtcatttgcacacaaaaataaagactagagcaaaataatgcaacgcaggaggagaaaagaaatgcactaagacaagaacattctctcatagaacattgatctgttttacaggaaacaaaccttgccttgaaatttacacagtgagactgtacataattgcatgaaaatagctatttttttcctaagacatttttcattcatgaatattttcaagtttttcatactgtacacatttcttaaaacacatgataccagcagcaactgaaaatgaatgccgaatttggtacacatgtgttatctacctcaaggtaacaagagtatgtggcaaaacatataccacccatagtgcttcacaaaatgcacttctatttagccagcgtttattgtagtaaactattcttaataaaactcactcactgtttataaatgttctggtatgcattctttatagtgaagtgttaatacatcacatcttatttattttagcaaatcagtatattttctgtatttaattataaaaaattaacttagtttttaaaatttatttgcaaatatactttactttttccatttggcactatggtttgttgcctacctagctgcatctataatgtcagcttatcctaaggctgtccacgtacttaatttacttaagtgttcattttaagtaacgtgctcactgtgtataggaatttgtattttggaggtgcttgatctatctacaaagaaaaattaattaggaattactttattataaaatgctcctagaagtcttaattgtgtttattttttaaaaaaacaaatgttagacttgtgtgcatggaagtaattaaggtacatcattattgtagtttgaaagttgtacatgataagacattttgtttttactgtatgtttttactgaatgatctattccccatcccaaggcaagcatgaataaaattaggttaaacgtagcatgtggcatcgcagtctcttagaatttgtttcatctattttattttattgaatactgtctgtatctttggttatcctgtttgaagaaaaaggacaaataaaacatggccagcaaatacagctcctgtttcactcttgggttaatgaaaattttctgctagaatgaaaattactaccagaatcactttgaattatggccataaattgctagtctgaaaggctgagaaggttcaagtcttttgacttaaaccatcacatattagaatggaataaagctttataatatttcaaaactgttaggtaaaatgtgtagttgaaactttgaactgtgcagtcagaaaacttgagatttgctctgtaatacatctttgcgtaagaacttacccttttacctatccagctacaaaaccatcctcttcacctcacttttctttcatccttgttttgtacaacaccaattctattaatatctgcccacctaccttctcaacaactccatcctcttcacctcacttttctttcatccttgttttgtacaacaccaattctattaatatctgcccacctaccttctcaacaactgacttcatctggattcacaaagccatatatatacacgtgtgtgtgtgtgtgtgtgtgtgtgtgtgtatatatattcatttatttattttctggttgaatactgtcacgttattaatttaaacatactcaaattaccttaagaggacaagctctgaagtgcagtcatgagaattgatttgtggggaaaaaaaaaatgggacacttttagttggagctgggtggggtgacaagtgcagaggctttgagtgtcatgagagcatcagacaggatgtaaaggaagcaacgggcagcagacattggtccctgatcctccattataaccaattttttgcaaacgtatgttgattttgagaataattagctttgactctaaaatgctgtcttccctgaaggagacctaggatttttcttactgggaaacttggctcctggacttaatccacattcgttaaactgtcaccttggcagtttagtggccatctacacaatgatctgacttgttggcattaaaaagtccaaacatagtcatcaaaggaagaagaaagtaaaactgaaaccccttatataaaatatgcttgctttagggtgacccaggctgagtactaagttgtaaagtcaatttccaataaaaattttatgtgccaa

SEQ ID NO: 154862 - DNA, 2715 bp, Homo sapiens
  Payload ID: 10450
  Gene Symbol: MAPK7
  Gene Name: mitogen-activated protein kinase 7
  Uniprot ID: Q13164
  ENST ID: ENST00000299612
  CDS Start-End: 369-2402
cgcgggctccgcagaggagcagaggttgggcggccgcctcggttaactccgctgcagcccaaagcacgggaatcgcgggacagacaaacgagcggagggaagatacctagaagccaggaaaccgcgagctgcagtccaacttggccggaagctgcggagaggctcagccaccggaagtcagtggagggttcggccggacgctctagaatcccggaggaccgggatctctgtggttggccgtgacgggcaccctctaccggggatgacacattcccagagctcctgggaccaagcaaatggcggacacaattccctgggcggaaggggacttcgggagccagtagccaagctacgtggtcctggacctgatggaaagcgacctgcaccagatcatccactcctcacagcccctcacactggaacacgtgcgctacttcctgtaccaactgctgcggggcctgaagtacatgcactcggctcaggtcatccaccgtgacctgaagccctccaacctattggtgaatgagaactgtgagctcaagattggtgactttggtatggctcgtggcctgtgcacctcgcccgctgaacatcagtacttcatgactgagtatgtggccacgcgctggtaccgtgcgcccgagctcatgctctctttgcatgagtatacacaggctattgacctctggtctgtgggctgcatctttggtgagatgctggcccggcgccagctcttcccaggcaaaaactatgtacaccagctacagctcatcatgatggtgctgggtaccccatcaccagccgtgattcaggctgtgggggctgagagggtgcgggcctatatccagagcttgccaccacgccagcctgtgccctgggagacagtgtacccaggtgccgaccgccaggccctatcactgctgggtcgcatgctgcgttttgagcccagcgctcgcatctcagcagctgctgcccttcgccaccctttcctggccaagtaccatgatcctgatgatgagcctgactgtgccccgccctttgactttgcctttgaccgcgaagccctcactcgggagcgcattaaggaggccattgtggctgaaattgaggacttccatgcaaggcgtgagggcatccgccaacagatccgcttccagccttctctacagcctgtggctagtgagcctggctgtccagatgttgaaatgcccagtccctgggctcccagtggggactgtgccatggagtctccaccaccagccccgccaccatgccccggccctgcacctgacaccattgatctgaccctgcagccacctccaccagtcagtgagcctgccccaccaaagaaagatggtgccatctcagacaatactaaggctgcccttaaagctgccctgctcaagtctttgaggagccggctcagagatggccccagcgcacccctggaggctcctgagcctcggaagccggtgacagcccaggagcgccagcgggagcgggaggagaagcggcggaggcggcaagaacgagccaaggagcgggagaaacggcggcaggagcgggagcgaaaggaacggggggctggggcctctgggggcccctccactgaccccttggctggactagtgctcagtgacaatgacagaagcctgttggaacgctggactcgaatggcccggcccgcagccccagccctcacctctgtgccggcccctgccccagcgccaacgccaaccccaaccccagtccaacctaccagtcctcctcctggccctgtagcccagcccactggcccgcaaccacaatctgcgggctctacctctggccctgtaccccagcctgcctgcccaccccctggccctgcaccccaccccactggccctcctgggcccatccctgtccccgcgccaccccagattgccacctccaccagcctcctggctgcccagtcacttgtgccaccccctgggctgcctggctccagcaccccaggagttttgccttacttcccacctggcctgccgcccccagacgccgggggagcccctcagtcttccatgtcagagtcacctgatgtcaaccttgtgacccagcagctatctaagtcacaggtggaggaccccctgccccctgtgttctcaggcacaccaaagggcagtggggctggctacggtgttggctttgacctggaggaattcttaaaccagtctttcgacatgggcgtggctgatgggccacaggatggccaggcagattcagcctctctctcagcctccctgcttgctgactggctcgaaggccatggcatgaaccctgccgatattgagtccctgcagcgtgagatccagatggactccccaatgctgctggctgacctgcctgacctccaggacccctgaggcccccagcctgtgccttgctgccacagtagacctagttccaggatccatgggagcattctcaaaggctttagccctggacccagcaggtgaggctcggcttggattattctgcaggttcatctcagacccacctttcagccttaagcagccacctgagccaccaccgagccatggcaggatcgggagaccccaactccccctgaacaatccttttcagtattatatttttattattattatgttattattacactgtctttttgccatcaaaatgaggcctgtgaaatacaaggttcccttctgcacctga

SEQ ID NO: 154863 - DNA, 3149 bp, Homo sapiens
  Payload ID: 10450
  Gene Symbol: MAPK7
  Gene Name: mitogen-activated protein kinase 7
  Uniprot ID: Q13164
  ENST ID: ENST00000308406
  CDS Start-End: 387-2837
acagctcggttccagcgagggctccgcccacccgcgggctccgcagaggagcagaggttgggcggccgcctcggttaactccgctgcagcccaaagcacgggaatcgcgggacagacaaacgagcggagggaagatacctagaagccaggaaaccgcgagctgcagtccaacttggccggaagctgcggagaggctcagccaccggaagtcagtggagggttcggccggacgctctagaatcccggaggaccgggatctctgtggttggccgtgacgggcaccctctaccggggatgacacattcccagagctcctgggaccaagcaaatggcggacacaattccctgggcggaaggggacttcgggagccagtagccaagacaccatggccgagcctctgaaggaggaagacggcgaggacggctctgcggagccccccgggcccgtgaaggccgaacccgcccacaccgctgcctctgtagcggccaagaacctggccctgcttaaagcccgctccttcgatgtgacctttgacgtgggcgacgagtacgagatcatcgagaccataggcaacggggcctatggagtggtgtcctccgcccgccgccgcctcaccggccagcaggtggccatcaagaagatccctaatgctttcgatgtggtgaccaatgccaagcggaccctcagggagctgaagatcctcaagcactttaaacacgacaacatcatcgccatcaaggacatcctgaggcccaccgtgccctatggcgaattcaaatctgtctacgtggtcctggacctgatggaaagcgacctgcaccagatcatccactcctcacagcccctcacactggaacacgtgcgctacttcctgtaccaactgctgcggggcctgaagtacatgcactcggctcaggtcatccaccgtgacctgaagccctccaacctattggtgaatgagaactgtgagctcaagattggtgactttggtatggctcgtggcctgtgcacctcgcccgctgaacatcagtacttcatgactgagtatgtggccacgcgctggtaccgtgcgcccgagctcatgctctctttgcatgagtatacacaggctattgacctctggtctgtgggctgcatctttggtgagatgctggcccggcgccagctcttcccaggcaaaaactatgtacaccagctacagctcatcatgatggtgctgggtaccccatcaccagccgtgattcaggctgtgggggctgagagggtgcgggcctatatccagagcttgccaccacgccagcctgtgccctgggagacagtgtacccaggtgccgaccgccaggccctatcactgctgggtcgcatgctgcgttttgagcccagcgctcgcatctcagcagctgctgcccttcgccaccctttcctggccaagtaccatgatcctgatgatgagcctgactgtgccccgccctttgactttgcctttgaccgcgaagccctcactcgggagcgcattaaggaggccattgtggctgaaattgaggacttccatgcaaggcgtgagggcatccgccaacagatccgcttccagccttctctacagcctgtggctagtgagcctggctgtccagatgttgaaatgcccagtccctgggctcccagtggggactgtgccatggagtctccaccaccagccccgccaccatgccccggccctgcacctgacaccattgatctgaccctgcagccacctccaccagtcagtgagcctgccccaccaaagaaagatggtgccatctcagacaatactaaggctgcccttaaagctgccctgctcaagtctttgaggagccggctcagagatggccccagcgcacccctggaggctcctgagcctcggaagccggtgacagcccaggagcgccagcgggagcgggaggagaagcggcggaggcggcaagaacgagccaaggagcgggagaaacggcggcaggagcgggagcgaaaggaacggggggctggggcctctgggggcccctccactgaccccttggctggactagtgctcagtgacaatgacagaagcctgttggaacgctggactcgaatggcccggcccgcagccccagccctcacctctgtgccggcccctgccccagcgccaacgccaaccccaaccccagtccaacctaccagtcctcctcctggccctgtagcccagcccactggcccgcaaccacaatctgcgggctctacctctggccctgtaccccagcctgcctgcccaccccctggccctgcaccccaccccactggccctcctgggcccatccctgtccccgcgccaccccagattgccacctccaccagcctcctggctgcccagtcacttgtgccaccccctgggctgcctggctccagcaccccaggagttttgccttacttcccacctggcctgccgcccccagacgccgggggagcccctcagtcttccatgtcagagtcacctgatgtcaaccttgtgacccagcagctatctaagtcacaggtggaggaccccctgccccctgtgttctcaggcacaccaaagggcagtggggctggctacggtgttggctttgacctggaggaattcttaaaccagtctttcgacatgggcgtggctgatgggccacaggatggccaggcagattcagcctctctctcagcctccctgcttgctgactggctcgaaggccatggcatgaaccctgccgatattgagtccctgcagcgtgagatccagatggactccccaatgctgctggctgacctgcctgacctccaggacccctgaggcccccagcctgtgccttgctgccacagtagacctagttccaggatccatgggagcattctcaaaggctttagccctggacccagcaggtgaggctcggcttggattattctgcaggttcatctcagacccacctttcagccttaagcagccacctgagccaccaccgagccatggcaggatcgggagaccccaactccccctgaacaatccttttcagtattatatttttattattattatgttattattacactgtctttttgccatcaaaatgaggcctgtgaaatacaaggttcccttctgcacctg

SEQ ID NO: 154864 - DNA, 3059 bp, Homo sapiens
  Payload ID: 10450
  Gene Symbol: MAPK7
  Gene Name: mitogen-activated protein kinase 7
  Uniprot ID: Q13164
  ENST ID: ENST00000395602
  CDS Start-End: 296-2746
agtgcgcatgcgtttgaaggcggtgcagggcggggagcacacccctgcgaagtgccgggcaccctttgggcggctcccgccggcgagctggacagcggcgcgcgccaggcgtggctttctcggccggtgggctaggattggacgcagtaggtagaaggggcaggaccctccgcagcagtagctcagcgattggccaggagctggagggagcgtggccttgggaggcggggcggagggggacggacagggcagctcaagacgctgaggtggtggctgcggcctttgaacaaacaccatggccgagcctctgaaggaggaagacggcgaggacggctctgcggagccccccgggcccgtgaaggccgaacccgcccacaccgctgcctctgtagcggccaagaacctggccctgcttaaagcccgctccttcgatgtgacctttgacgtgggcgacgagtacgagatcatcgagaccataggcaacggggcctatggagtggtgtcctccgcccgccgccgcctcaccggccagcaggtggccatcaagaagatccctaatgctttcgatgtggtgaccaatgccaagcggaccctcagggagctgaagatcctcaagcactttaaacacgacaacatcatcgccatcaaggacatcctgaggcccaccgtgccctatggcgaattcaaatctgtctacgtggtcctggacctgatggaaagcgacctgcaccagatcatccactcctcacagcccctcacactggaacacgtgcgctacttcctgtaccaactgctgcggggcctgaagtacatgcactcggctcaggtcatccaccgtgacctgaagccctccaacctattggtgaatgagaactgtgagctcaagattggtgactttggtatggctcgtggcctgtgcacctcgcccgctgaacatcagtacttcatgactgagtatgtggccacgcgctggtaccgtgcgcccgagctcatgctctctttgcatgagtatacacaggctattgacctctggtctgtgggctgcatctttggtgagatgctggcccggcgccagctcttcccaggcaaaaactatgtacaccagctacagctcatcatgatggtgctgggtaccccatcaccagccgtgattcaggctgtgggggctgagagggtgcgggcctatatccagagcttgccaccacgccagcctgtgccctgggagacagtgtacccaggtgccgaccgccaggccctatcactgctgggtcgcatgctgcgttttgagcccagcgctcgcatctcagcagctgctgcccttcgccaccctttcctggccaagtaccatgatcctgatgatgagcctgactgtgccccgccctttgactttgcctttgaccgcgaagccctcactcgggagcgcattaaggaggccattgtggctgaaattgaggacttccatgcaaggcgtgagggcatccgccaacagatccgcttccagccttctctacagcctgtggctagtgagcctggctgtccagatgttgaaatgcccagtccctgggctcccagtggggactgtgccatggagtctccaccaccagccccgccaccatgccccggccctgcacctgacaccattgatctgaccctgcagccacctccaccagtcagtgagcctgccccaccaaagaaagatggtgccatctcagacaatactaaggctgcccttaaagctgccctgctcaagtctttgaggagccggctcagagatggccccagcgcacccctggaggctcctgagcctcggaagccggtgacagcccaggagcgccagcgggagcgggaggagaagcggcggaggcggcaagaacgagccaaggagcgggagaaacggcggcaggagcgggagcgaaaggaacggggggctggggcctctgggggcccctccactgaccccttggctggactagtgctcagtgacaatgacagaagcctgttggaacgctggactcgaatggcccggcccgcagccccagccctcacctctgtgccggcccctgccccagcgccaacgccaaccccaaccccagtccaacctaccagtcctcctcctggccctgtagcccagcccactggcccgcaaccacaatctgcgggctctacctctggccctgtaccccagcctgcctgcccaccccctggccctgcaccccaccccactggccctcctgggcccatccctgtccccgcgccaccccagattgccacctccaccagcctcctggctgcccagtcacttgtgccaccccctgggctgcctggctccagcaccccaggagttttgccttacttcccacctggcctgccgcccccagacgccgggggagcccctcagtcttccatgtcagagtcacctgatgtcaaccttgtgacccagcagctatctaagtcacaggtggaggaccccctgccccctgtgttctcaggcacaccaaagggcagtggggctggctacggtgttggctttgacctggaggaattcttaaaccagtctttcgacatgggcgtggctgatgggccacaggatggccaggcagattcagcctctctctcagcctccctgcttgctgactggctcgaaggccatggcatgaaccctgccgatattgagtccctgcagcgtgagatccagatggactccccaatgctgctggctgacctgcctgacctccaggacccctgaggcccccagcctgtgccttgctgccacagtagacctagttccaggatccatgggagcattctcaaaggctttagccctggacccagcaggtgaggctcggcttggattattctgcaggttcatctcagacccacctttcagccttaagcagccacctgagccaccaccgagccatggcaggatcgggagaccccaactccccctgaacaatccttttcagtattatatttttattattattatgttattattacactgtctttttgccatcaaaatgaggcctgtgaaatacaaggttcccttctgcacctga

SEQ ID NO: 154865 - DNA, 3077 bp, Homo sapiens
  Payload ID: 10450
  Gene Symbol: MAPK7
  Gene Name: mitogen-activated protein kinase 7
  Uniprot ID: Q13164
  ENST ID: ENST00000395604
  CDS Start-End: 314-2764
cggctcccgccggcgagctggacagcggcgcgcgccaggcgtggctttctcggccggtgggctaggattggacgcagtaggtagaaggggcaggaccctccgcagcagtagctcagcgattggccaggagctggagggagcgtggccttgggaggcggggcggagggggacggacagggcagctcaagacgctgaggtggtggctgcggcctttgaacaagtaagtgagccaccctcggagacccccgcgctggggacgggaggccggcgagcctcgggacctctgaaagccttgaggaggcgcggggacaccatggccgagcctctgaaggaggaagacggcgaggacggctctgcggagccccccgggcccgtgaaggccgaacccgcccacaccgctgcctctgtagcggccaagaacctggccctgcttaaagcccgctccttcgatgtgacctttgacgtgggcgacgagtacgagatcatcgagaccataggcaacggggcctatggagtggtgtcctccgcccgccgccgcctcaccggccagcaggtggccatcaagaagatccctaatgctttcgatgtggtgaccaatgccaagcggaccctcagggagctgaagatcctcaagcactttaaacacgacaacatcatcgccatcaaggacatcctgaggcccaccgtgccctatggcgaattcaaatctgtctacgtggtcctggacctgatggaaagcgacctgcaccagatcatccactcctcacagcccctcacactggaacacgtgcgctacttcctgtaccaactgctgcggggcctgaagtacatgcactcggctcaggtcatccaccgtgacctgaagccctccaacctattggtgaatgagaactgtgagctcaagattggtgactttggtatggctcgtggcctgtgcacctcgcccgctgaacatcagtacttcatgactgagtatgtggccacgcgctggtaccgtgcgcccgagctcatgctctctttgcatgagtatacacaggctattgacctctggtctgtgggctgcatctttggtgagatgctggcccggcgccagctcttcccaggcaaaaactatgtacaccagctacagctcatcatgatggtgctgggtaccccatcaccagccgtgattcaggctgtgggggctgagagggtgcgggcctatatccagagcttgccaccacgccagcctgtgccctgggagacagtgtacccaggtgccgaccgccaggccctatcactgctgggtcgcatgctgcgttttgagcccagcgctcgcatctcagcagctgctgcccttcgccaccctttcctggccaagtaccatgatcctgatgatgagcctgactgtgccccgccctttgactttgcctttgaccgcgaagccctcactcgggagcgcattaaggaggccattgtggctgaaattgaggacttccatgcaaggcgtgagggcatccgccaacagatccgcttccagccttctctacagcctgtggctagtgagcctggctgtccagatgttgaaatgcccagtccctgggctcccagtggggactgtgccatggagtctccaccaccagccccgccaccatgccccggccctgcacctgacaccattgatctgaccctgcagccacctccaccagtcagtgagcctgccccaccaaagaaagatggtgccatctcagacaatactaaggctgcccttaaagctgccctgctcaagtctttgaggagccggctcagagatggccccagcgcacccctggaggctcctgagcctcggaagccggtgacagcccaggagcgccagcgggagcgggaggagaagcggcggaggcggcaagaacgagccaaggagcgggagaaacggcggcaggagcgggagcgaaaggaacggggggctggggcctctgggggcccctccactgaccccttggctggactagtgctcagtgacaatgacagaagcctgttggaacgctggactcgaatggcccggcccgcagccccagccctcacctctgtgccggcccctgccccagcgccaacgccaaccccaaccccagtccaacctaccagtcctcctcctggccctgtagcccagcccactggcccgcaaccacaatctgcgggctctacctctggccctgtaccccagcctgcctgcccaccccctggccctgcaccccaccccactggccctcctgggcccatccctgtccccgcgccaccccagattgccacctccaccagcctcctggctgcccagtcacttgtgccaccccctgggctgcctggctccagcaccccaggagttttgccttacttcccacctggcctgccgcccccagacgccgggggagcccctcagtcttccatgtcagagtcacctgatgtcaaccttgtgacccagcagctatctaagtcacaggtggaggaccccctgccccctgtgttctcaggcacaccaaagggcagtggggctggctacggtgttggctttgacctggaggaattcttaaaccagtctttcgacatgggcgtggctgatgggccacaggatggccaggcagattcagcctctctctcagcctccctgcttgctgactggctcgaaggccatggcatgaaccctgccgatattgagtccctgcagcgtgagatccagatggactccccaatgctgctggctgacctgcctgacctccaggacccctgaggcccccagcctgtgccttgctgccacagtagacctagttccaggatccatgggagcattctcaaaggctttagccctggacccagcaggtgaggctcggcttggattattctgcaggttcatctcagacccacctttcagccttaagcagccacctgagccaccaccgagccatggcaggatcgggagaccccaactccccctgaacaatccttttcagtattatatttttattattattatgttattattacactgtctttttgccatcaaaatgaggcctgtgaaatacaaggttcccttctgcacctga

SEQ ID NO: 154866 - DNA, 850 bp, Homo sapiens
  Payload ID: 10450
  Gene Symbol: MAPK7
  Gene Name: mitogen-activated protein kinase 7
  ENST ID: ENST00000443215
  CDS Start-End: 127-850
gcggggagcacacccctgcgaagtgccgggcaccctttgggcggctcccgccggcgagctggacagcggcgcgcgccaggcgtggctttctcggccggtgggctaggattggacgcagtagacaccatggccgagcctctgaaggaggaagacggcgaggacggctctgcggagccccccgggcccgtgaaggccgaacccgcccacaccgctgcctctgtagcggccaagaacctggccctgcttaaagcccgctccttcgatgtgacctttgacgtgggcgacgagtacgagatcatcgagaccataggcaacggggcctatggagtggtgtcctccgcccgccgccgcctcaccggccagcaggtggccatcaagaagatccctaatgctttcgatgtggtgaccaatgccaagcggaccctcagggagctgaagatcctcaagcactttaaacacgacaacatcatcgccatcaaggacatcctgaggcccaccgtgccctatggcgaattcaaatctgtctacgtggtcctggacctgatggaaagcgacctgcaccagatcatccactcctcacagcccctcacactggaacacgtgcgctacttcctgtaccaactgctgcggggcctgaagtacatgcactcggctcaggtcatccaccgtgacctgaagccctccaacctattggtgaatgagaactgtgagctcaagattggtgactttggtatggctcgtggcctgtgcacctcgcccgctgaacatcagtacttcatgactgagtatgtggccacgcgctggtaccgtgcgcccgagctcatgctctctttgcatgagtatacacagg

SEQ ID NO: 154867 - DNA, 640 bp, Homo sapiens
  Payload ID: 10450
  Gene Symbol: MAPK7
  Gene Name: mitogen-activated protein kinase 7
  ENST ID: ENST00000482850
  CDS Start-End: 54-640
agacgctgaggtggtggctgcggcctttgaacaactacgtggtcctggacctgatggaaagcgacctgcaccagatcatccactcctcacagcccctcacactggaacacgtgcgctacttcctgtaccaactgctgcggggcctgaagtacatgcactcggctcaggtcatccaccgtgacctgaagccctccaacctattggtgaatgagaactgtgagctcaagattggtgactttggtatggctcgtggcctgtgcacctcgcccgctgaacatcagtacttcatgactgagtatgtggccacgcgctggtaccgtgcgcccgagctcatgctctctttgcatgagtatacacaggctattgacctctggtctgtgggctgcatctttggtgagatgctggcccggcgccagctcttcccaggcaaaaactatgtacaccagctacagctcatcatgatggtgctgggtaccccatcaccagccgtgattcaggctgtgggggctgagagggtgcgggcctatatccagagcttgccaccacgccagcctgtgccctgggagacagtgtacccaggtgccgaccgccaggccctatcactgctgggtcgcatgctgcgttttgagcccagcgctcg

SEQ ID NO: 154868 - DNA, 773 bp, Homo sapiens
  Payload ID: 10450
  Gene Symbol: MAPK7
  Gene Name: mitogen-activated protein kinase 7
  ENST ID: ENST00000581260
  CDS Start-End: 110-352
tgcggcctttgaacaagtaagtgagccaccctcggagacccccgcgctggggacgggaggccggcgagcctcgggacctctgaaagccttgaggaggcgcggggacaccatggccgagcctctgaaggaggaagacggcgaggacggctctgcggagccccccgggcccgtgaaggccgaacccgcccacaccgctgcctctgtagcggccaagaacctggccctgcttaaagcccgctccttcgatgtgacctttgacgtgggcgacgagtacgagatcatcgagaccataggcaacggggcctatggagtggtgtcctccgcccgccgccgcctcaccggggagttgtgaaggccagcaggtggccatcaagaagatccctaatgctttcgatgtggtgaccaatgccaagcggaccctcagggagctgaagatcctcaagcactttaaacacgacaacatcatcgccatcaaggacatcctgaggcccaccgtgccctatggcgaattcaaatctgtctacgtggtcctggacctgatggaaagcgacctgcaccagatcatccactcctcacagcccctcacactggaacacgtgcgctacttcctgtaccaactgctgcggggcctgaagtacatgcactcggctcaggtcatccaccgtgacctgaagccctccaacctattggtgaatgagaactgtgagctcaagattggtgactttggtatggctcgtggcctgtgcacctcgcccgctgaacatcagtacttc

SEQ ID NO: 154869 - DNA, 615 bp, Homo sapiens
  Payload ID: 10450
  Gene Symbol: MAPK7
  Gene Name: mitogen-activated protein kinase 7
  ENST ID: ENST00000579284
  CDS Start-End: 145-615
atgcgtttgaaggcggtgcagggcggggagcacacccctgcgaagtgccgggcaccctttgggcggctcccgccggcgagctggacagcggcgcgcgccaggcgtggctttctcggccggtgggctaggattggacgcaacaccatggccgagcctctgaaggaggaagacggcgaggacggctctgcggagccccccgggcccgtgaaggccgaacccgcccacaccgctgcctctgtagcggccaagaacctggccctgcttaaagcccgctccttcgatgtgacctttgacgtgggcgacgagtacgagatcatcgagaccataggcaacggggcctatggagtggtgtcctccgcccgccgccgcctcaccggccagcaggtggccatcaagaagatccctaatgctttcgatgtggtgaccaatgccaagcggaccctcagggagctgaagatcctcaagcactttaaacacgacaacatcatcgccatcaaggacatcctgaggcccaccgtgccctatggcgaattcaaatctgtctacgtggtcctggacctgatggaaagcgacctgcaccagatcatccactcctcacagcccctcacactggaa

SEQ ID NO: 154870 - DNA, 582 bp, Homo sapiens
  Payload ID: 10450
  Gene Symbol: MAPK7
  Gene Name: mitogen-activated protein kinase 7
  ENST ID: ENST00000603493
  CDS Start-End: 151-582
agctagtctgccacgaaccagccgcgcgcttctgcccttgtcggtttaggaaactgggaagttccctggtcctgctccccagcccgcagaggggacactgaggcccacggtaggtggtcctctcctcacccgagtctccacacagacaccatggccgagcctctgaaggaggaagacggcgaggacggctctgcggagccccccgggcccgtgaaggccgaacccgcccacaccgctgcctctgtagcggccaagaacctggccctgcttaaagcccgctccttcgatgtgacctttgacgtgggcgacgagtacgagatcatcgagaccataggcaacggggcctatggagtggtgtcctccgcccgccgccgcctcaccggccagcaggtggccatcaagaagatccctaatgctttcgatgtggtgaccaatgccaagcggaccctcagggagctgaagatcctcaagcactttaaacacgacaacatcatcgccatcaaggacatcctgaggcccaccgtgccctatggcgaattcaaatctgtcccctatggggtcccaggctacgtggtcctggac

SEQ ID NO: 154871 - DNA, 5438 bp, Homo sapiens
  Payload ID: 10451
  Gene Symbol: MAPK8
  Gene Name: mitogen-activated protein kinase 8
  Uniprot ID: P45983
  ENST ID: ENST00000360332
  CDS Start-End: 50-976
cttcttggtgaatttttggatgaagccattaaattaattgcttgccatcatgagcagaagcaagcgtgacaacaatttttatagtgtagagattggagattctacattcacagtcctgaaacgatatcagaatttaaaacctataggctcaggagctcaaggaatagtatgcgcagcttatgatgccattcttgaaagaaatgttgcaatcaagaagctaagccgaccatttcagaatcagactcatgccaagcgggcctacagagagctagttcttatgaaatgtgttaatcacaaaaatataattggccttttgaatgttttcacaccacagaaatccctagaagaatttcaagatgtttacatagtcatggagctcatggatgcaaatctttgccaagtgattcagatggagctagatcatgaaagaatgtcctaccttctctatcagatgctgtgtggaatcaagcaccttcattctgctggaattattcatcgggacttaaagcccagtaatatagtagtaaaatctgattgcactttgaagattcttgacttcggtctggccaggactgcaggaacgagttttatgatgacgccttatgtagtgactcgctactacagagcacccgaggtcatccttggcatgggctacaaggaaaacgctgactcagaacacaacaaacttaaagccagtcaggcaagggatttgttatccaaaatgctggtaatagatgcatctaaaaggatctctgtagatgaagctctccaacacccgtacatcaatgtctggtatgatccttctgaagcagaagctccaccaccaaagatccctgacaagcagttagatgaaagggaacacacaatagaagagtggaaagaattgatatataaggaagttatggacttggaggagagaaccaagaatggagttatacgggggcagccctctcctttagcacaggtgcagcagtgatcaatggctctcagcatccatcatcatcgtcgtctgtcaatgatgtgtcttcaatgtcaacagatccgactttggcctctgatacagacagcagtctagaagcagcagctgggcctctgggctgctgtagatgactacttgggccatcggggggtgggagggatggggagtcggttagtcattgatagaactactttgaaaacaattcagtggtcttatttttgggtgatttttcaaaaaatgtagaattcattttgtagtaaagtagtttattttttttaatttcaagtgatgtaatttaaaacctaagttgtgtttcaaaacagcaacaaaactgtattgtattttttttgctgtaattaactgtataatgtaaacctaattattttatcatggtttaaattttttgcatatttgctttatcttatgctgctgatttttttaactgaatttgtaagattttgtttatcaaagcaactattatgtggtgacttgcctatatcatgaattatttaagatttttatagttttttttaattagaatttatttcagatgttttgttcatgatactatccttcagggttatgtgcttatcaatgaaataaccccagaggagtgagggaaaataacttgtagccagttatattcaggaataactactgtaaatgatgaacgtgttaggagacctccaatatttgctacttgccaatcctaatttagttacaagaattggtaggcaatcctacttaattttggcaaaagccccgtcatctaaatggcagaataactcagagcatgtctttgaagatgctgggcgtctaccaccaccttatgtccccaccctacccaacaaaaataagtaaaaagaatatggtgtattctacaaatttgtggcatgctcaaagtttatgatcacataaaggcaagaggatacttcatgaataatacatttcaatgcaaataaacagatggttcacttctactagctatgagcctgtttttgtatacactgagttaatctactcaggctgtaggtcccagcaatgttctagagtctggtctttccctttcctgcagcttcgggtccttggacctttcctgtttcctattacttggagtgtctgtcagttgagcaccagttgttctggtgtttcatttgattctacttgtagcataatcatttatacgagctattgggaggttccaaaccctacctagatttgtgtaggtgatgtatcaaatgagcaatataccgttcatctgaaaatagtagcacacagccatatataggatatcattttctaaggactgtttcttcacattgagcagagcaggcataaatggtggttatttagtctaagtcttttatttttttatacctgattttcaacataacacgcaatgtggatgtcgagtagtgttaagaatggtgctgctcctgacaagtgtatgttaactgtttacattttctatctgtagaattatttctctattactgaacttttcctaagtaaaatgtctttgaagtctcgttatttctgaaatacgttgtctgtaatagacccaggcaccttttaaattatctctggaacaagagggatttcatgtaatgaactaggaaatgcatactcacataagcaacaaggttctaggcagaaagccccttggaatttgtgaccaacaggagcaagaacaggtgcggctcaacatgcaatgtctgaaaatttgcttggcattttattcatatatttagtgcaaaattatttttgagtgagatattttacatcactgttaatgtgcaatatttaagattaaaatacattagcttttttatatactttgaagtagcaagtttgttttcgatggcttagagtcatgatttccagcttcccagcctttttatcagtcccttttctaatacaacaaggtgcattaatttgattaggcaaattagagttctaagacacttcttgaattgtagacagaaaatattggattcacaatttcagcagaaatttgagaatgagtgtgtttatattaatttcacaattagctgtattttctgtagcatagattatgtcactgttgcactttcacagcagacatgctttcagaaggttctcatattttatgtttgattgctgataagccatctctattgatacagattttggttaagtaaggaaaaccaggtgtgtgtctgtatcatttattgtaaatgccagctgccacttgccaaccatcatgttcagttcaattcaaagaaaacaaactctcattacttagtgtaaactaaaatacttaacaaattatatcctaaaaacaaggtctctttgttaaatgttgcatgccctaggttttaaattactacatccaaatacagttttcgtcttaaatttgttaagctaaatatatgttggttctttttattttggaatcctttaagcatcttaaacattttttttttgaagagaagttacaaataacatttctatcaggtagtacttgtatgaaaccacctttcttattctataattttgatttttcaattttatatacttaatatactcactgtcttactatcagaaagttattttgaccaagatttttattatcttcatagattcagaaagagatgctaattctgtaccaatgtcttcctggttactattctcttccctctaatatatactggccatttgtaaaaccattgtgttgttgggatcacttagttatactatacgcagatagagcatctcaactctgtcatagtgtttgctgaacagttttcagtgtcatgcacctttggctgctaattgttcctgacgtgcactcttccgagttggtaaaggcacagtgtgttcatgccagacttctaagagaaacaccagcctcttaaatcagaagcctacacacaacccccttaacaatccaaagaagcttgatggtgtgcaaagaagcatcctgccagccttgtcattgttctgttctatgctaatcctgctgtgttgtctaaaagatggagggaagaggacatcagtgtctgatagtgaaatcatcagcaggaaagtgaagctctttccttggttacagataagacttggtttacactattggccagtatctgctaaacatatgaagacttaactattcagtgttgcctaggcattcgcctgcacaacattttgaggttagaacatagaatattttcagaaatactgttgtagtttgtgagtgttgttcattagttacacattagctatagagtggatgcatgaagccccatgacaccagtaaacttctcttaccagtaggtaaaccaaacaccattctgtcattagcagccctcttaaatgttgcctctccgtatcctgttgcatttttgtgtgcattgtgtttctactgatctctcttaggtttttacggaatcaaaggaaactaatttttccttaatagcaagaaagatgaagaggtaaagggcattgaagcagaaatgtatagtttggggtacgattagaaaactcgtaaggaaaacagaagtcctaatttcaaactgactgctcttcgttaagtgctcttaaggagagtctagtaacagtaacactttctggccatttctagtttagattctcttcgttactgaaacttttgagaaatattacctgtggattaattttgcacaatgttctattctcataatgacttacaaattaaactaggtttttattgaactacctcacactaattttctatgctttcccaagtaagctgttgccctgttagatctttactgagtgaattataaatgtgtgttaaatactttctagccaatgttgacacaataccagtaagtatgtaaagtatataccttacatcagtaagagacacgtgtaaaatctttgactgtatgtcttgcaaaattgtgctcgttgacattattactgtttttgtaagtagaaacctgctcgtgatatcggtccatttacattttacaaaaggagtaaatcttagtaaaaattttacgaagaaataaattacttttgtaggcccaatatttggtatatttttgagaagctgttaatcttttagctgaataatgaagttagactgaattacgtgtctccctggactgtgacatctattttctcattacagtttatcctggtcagcagggtgtcacacctggaaacctgagtatgatagctgacatttgcttttctccctctgcgatgtcattcctcctccattcctctccttccctgtgttccgttccctctcctttcctctagacaaaacaaaatggggcactttttagggaatgctgagatcattattgtggtttttcatcattcatgccctagtcattaaacatgcaccactggaatgtaaacaatgttatctagtatgtcaattggttataatattttaaataaaaaagaaaaaagtggtatgaaaattatg

SEQ ID NO: 154872 - DNA, 739 bp, Homo sapiens
  Payload ID: 10451
  Gene Symbol: MAPK8
  Gene Name: mitogen-activated protein kinase 8
  ENST ID: ENST00000374174
  CDS Start-End: 1-657
atgagcagaagcaagcgtgacaacaatttttatagtgtagagattggagattctacattcacagtcctgaaacgatatcagaatttaaaacctataggctcaggagctcaaggaatagtatgcgcagcttatgatgccattcttgaaagaaatgttgcaatcaagaagctaagccgaccatttcagaatcagactcatgccaagcgggcctacagagagctagttcttatgaaatgtgttaatcacaaaaatataattggccttttgaatgttttcacaccacagaaatccctagaagaatttcaagatgtttacatagtcatggagctcatggatgcaaatctttgccaagtgattcagatggagctagatcatgaaagaatgtcctaccttctctatcagatgctgtgtggaatcaagcaccttcattctgctggaattattcatcgggacttaaagcccagtaatatagtagtaaaatctgattgcactttgaagattcttgacttcggtctggccaggactgcaggaacgagttttatgatgacgccttatgtagtgactcgctactacagagcacccgaggtcatccttggcatgggctacaaggaaaacggaggaagaatgggaaaaggcatattcacaaggttacaataaggtgcctgtgagatataaaatttataactgccacatcctttcttaggaatttttaaatttctattttcttgtaatatgaata

SEQ ID NO: 154873 - DNA, 5628 bp, Homo sapiens
  Payload ID: 10451
  Gene Symbol: MAPK8
  Gene Name: mitogen-activated protein kinase 8
  Uniprot ID: P45983
  ENST ID: ENST00000374176
  CDS Start-End: 14-1297
attgcttgccatcatgagcagaagcaagcgtgacaacaatttttatagtgtagagattggagattctacattcacagtcctgaaacgatatcagaatttaaaacctataggctcaggagctcaaggaatagtatgcgcagcttatgatgccattcttgaaagaaatgttgcaatcaagaagctaagccgaccatttcagaatcagactcatgccaagcgggcctacagagagctagttcttatgaaatgtgttaatcacaaaaatataattggccttttgaatgttttcacaccacagaaatccctagaagaatttcaagatgtttacatagtcatggagctcatggatgcaaatctttgccaagtgattcagatggagctagatcatgaaagaatgtcctaccttctctatcagatgctgtgtggaatcaagcaccttcattctgctggaattattcatcgggacttaaagcccagtaatatagtagtaaaatctgattgcactttgaagattcttgacttcggtctggccaggactgcaggaacgagttttatgatgacgccttatgtagtgactcgctactacagagcacccgaggtcatccttggcatgggctacaaggaaaacgttgacatttggtcagttgggtgcatcatgggagaaatgatcaaaggtggtgttttgttcccaggtacagatcatattgatcagtggaataaagttattgaacagcttggaacaccatgtcctgaattcatgaagaaactgcaaccaacagtaaggacttacgttgaaaacagacctaaatatgctggatatagctttgagaaactcttccctgatgtccttttcccagctgactcagaacacaacaaacttaaagccagtcaggcaagggatttgttatccaaaatgctggtaatagatgcatctaaaaggatctctgtagatgaagctctccaacacccgtacatcaatgtctggtatgatccttctgaagcagaagctccaccaccaaagatccctgacaagcagttagatgaaagggaacacacaatagaagagtggaaagaattgatatataaggaagttatggacttggaggagagaaccaagaatggagttatacgggggcagccctctcctttaggtgcagcagtgatcaatggctctcagcatccatcatcatcgtcgtctgtcaatgatgtgtcttcaatgtcaacagatccgactttggcctctgatacagacagcagtctagaagcagcagctgggcctctgggctgctgtagatgactacttgggccatcggggggtgggagggatggggagtcggttagtcattgatagaactactttgaaaacaattcagtggtcttatttttgggtgatttttcaaaaaatgtagaattcattttgtagtaaagtagtttattttttttaatttcaagtgatgtaatttaaaacctaagttgtgtttcaaaacagcaacaaaactgtattgtattttttttgctgtaattaactgtataatgtaaacctaattattttatcatggtttaaattttttgcatatttgctttatcttatgctgctgatttttttaactgaatttgtaagattttgtttatcaaagcaactattatgtggtgacttgcctatatcatgaattatttaagatttttatagttttttttaattagaatttatttcagatgttttgttcatgatactatccttcagggttatgtgcttatcaatgaaataaccccagaggagtgagggaaaataacttgtagccagttatattcaggaataactactgtaaatgatgaacgtgttaggagacctccaatatttgctacttgccaatcctaatttagttacaagaattggtaggcaatcctacttaattttggcaaaagccccgtcatctaaatggcagaataactcagagcatgtctttgaagatgctgggcgtctaccaccaccttatgtccccaccctacccaacaaaaataagtaaaaagaatatggtgtattctacaaatttgtggcatgctcaaagtttatgatcacataaaggcaagaggatacttcatgaataatacatttcaatgcaaataaacagatggttcacttctactagctatgagcctgtttttgtatacactgagttaatctactcaggctgtaggtcccagcaatgttctagagtctggtctttccctttcctgcagcttcgggtccttggacctttcctgtttcctattacttggagtgtctgtcagttgagcaccagttgttctggtgtttcatttgattctacttgtagcataatcatttatacgagctattgggaggttccaaaccctacctagatttgtgtaggtgatgtatcaaatgagcaatataccgttcatctgaaaatagtagcacacagccatatataggatatcattttctaaggactgtttcttcacattgagcagagcaggcataaatggtggttatttagtctaagtcttttatttttttatacctgattttcaacataacacgcaatgtggatgtcgagtagtgttaagaatggtgctgctcctgacaagtgtatgttaactgtttacattttctatctgtagaattatttctctattactgaacttttcctaagtaaaatgtctttgaagtctcgttatttctgaaatacgttgtctgtaatagacccaggcaccttttaaattatctctggaacaagagggatttcatgtaatgaactaggaaatgcatactcacataagcaacaaggttctaggcagaaagccccttggaatttgtgaccaacaggagcaagaacaggtgcggctcaacatgcaatgtctgaaaatttgcttggcattttattcatatatttagtgcaaaattatttttgagtgagatattttacatcactgttaatgtgcaatatttaagattaaaatacattagcttttttatatactttgaagtagcaagtttgttttcgatggcttagagtcatgatttccagcttcccagcctttttatcagtcccttttctaatacaacaaggtgcattaatttgattaggcaaattagagttctaagacacttcttgaattgtagacagaaaatattggattcacaatttcagcagaaatttgagaatgagtgtgtttatattaatttcacaattagctgtattttctgtagcatagattatgtcactgttgcactttcacagcagacatgctttcagaaggttctcatattttatgtttgattgctgataagccatctctattgatacagattttggttaagtaaggaaaaccaggtgtgtgtctgtatcatttattgtaaatgccagctgccacttgccaaccatcatgttcagttcaattcaaagaaaacaaactctcattacttagtgtaaactaaaatacttaacaaattatatcctaaaaacaaggtctctttgttaaatgttgcatgccctaggttttaaattactacatccaaatacagttttcgtcttaaatttgttaagctaaatatatgttggttctttttattttggaatcctttaagcatcttaaacattttttttttgaagagaagttacaaataacatttctatcaggtagtacttgtatgaaaccacctttcttattctataattttgatttttcaattttatatacttaatatactcactgtcttactatcagaaagttattttgaccaagatttttattatcttcatagattcagaaagagatgctaattctgtaccaatgtcttcctggttactattctcttccctctaatatatactggccatttgtaaaaccattgtgttgttgggatcacttagttatactatacgcagatagagcatctcaactctgtcatagtgtttgctgaacagttttcagtgtcatgcacctttggctgctaattgttcctgacgtgcactcttccgagttggtaaaggcacagtgtgttcatgccagacttctaagagaaacaccagcctcttaaatcagaagcctacacacaacccccttaacaatccaaagaagcttgatggtgtgcaaagaagcatcctgccagccttgtcattgttctgttctatgctaatcctgctgtgttgtctaaaagatggagggaagaggacatcagtgtctgatagtgaaatcatcagcaggaaagtgaagctctttccttggttacagataagacttggtttacactattggccagtatctgctaaacatatgaagacttaactattcagtgttgcctaggcattcgcctgcacaacattttgaggttagaacatagaatattttcagaaatactgttgtagtttgtgagtgttgttcattagttacacattagctatagagtggatgcatgaagccccatgacaccagtaaacttctcttaccagtaggtaaaccaaacaccattctgtcattagcagccctcttaaatgttgcctctccgtatcctgttgcatttttgtgtgcattgtgtttctactgatctctcttaggtttttacggaatcaaaggaaactaatttttccttaatagcaagaaagatgaagaggtaaagggcattgaagcagaaatgtatagtttggggtacgattagaaaactcgtaaggaaaacagaagtcctaatttcaaactgactgctcttcgttaagtgctcttaaggagagtctagtaacagtaacactttctggccatttctagtttagattctcttcgttactgaaacttttgagaaatattacctgtggattaattttgcacaatgttctattctcataatgacttacaaattaaactaggtttttattgaactacctcacactaattttctatgctttcccaagtaagctgttgccctgttagatctttactgagtgaattataaatgtgtgttaaatactttctagccaatgttgacacaataccagtaagtatgtaaagtatataccttacatcagtaagagacacgtgtaaaatctttgactgtatgtcttgcaaaattgtgctcgttgacattattactgtttttgtaagtagaaacctgctcgtgatatcggtccatttacattttacaaaaggagtaaatcttagtaaaaattttacgaagaaataaattacttttgtaggcccaatatttggtatatttttgagaagctgttaatcttttagctgaataatgaagttagactgaattacgtgtctccctggactgtgacatctattttctcattacagtttatcctggtcagcagggtgtcacacctggaaacctgagtatgatagctgacatttgcttttctccctctgcgatgtcattcctcctccattcctctccttccctgtgttccgttccctctcctttcctctagacaaaacaaaatggggcactttttagggaatgctgagatcattattgtggtttttcatcattcatgccctagtcattaaacatgcaccactggaatgtaaacaatgttatctagtatgtcaattggttataatattttaaataaaaaagaaaaaagtggtatgaaaattatgaaa

SEQ ID NO: 154874 - DNA, 5637 bp, Homo sapiens
  Payload ID: 10451
  Gene Symbol: MAPK8
  Gene Name: mitogen-activated protein kinase 8
  Uniprot ID: P45983
  ENST ID: ENST00000374179
  CDS Start-End: 18-1172
attaattgcttgccatcatgagcagaagcaagcgtgacaacaatttttatagtgtagagattggagattctacattcacagtcctgaaacgatatcagaatttaaaacctataggctcaggagctcaaggaatagtatgcgcagcttatgatgccattcttgaaagaaatgttgcaatcaagaagctaagccgaccatttcagaatcagactcatgccaagcgggcctacagagagctagttcttatgaaatgtgttaatcacaaaaatataattggccttttgaatgttttcacaccacagaaatccctagaagaatttcaagatgtttacatagtcatggagctcatggatgcaaatctttgccaagtgattcagatggagctagatcatgaaagaatgtcctaccttctctatcagatgctgtgtggaatcaagcaccttcattctgctggaattattcatcgggacttaaagcccagtaatatagtagtaaaatctgattgcactttgaagattcttgacttcggtctggccaggactgcaggaacgagttttatgatgacgccttatgtagtgactcgctactacagagcacccgaggtcatccttggcatgggctacaaggaaaacgttgacatttggtcagttgggtgcatcatgggagaaatgatcaaaggtggtgttttgttcccaggtacagatcatattgatcagtggaataaagttattgaacagcttggaacaccatgtcctgaattcatgaagaaactgcaaccaacagtaaggacttacgttgaaaacagacctaaatatgctggatatagctttgagaaactcttccctgatgtccttttcccagctgactcagaacacaacaaacttaaagccagtcaggcaagggatttgttatccaaaatgctggtaatagatgcatctaaaaggatctctgtagatgaagctctccaacacccgtacatcaatgtctggtatgatccttctgaagcagaagctccaccaccaaagatccctgacaagcagttagatgaaagggaacacacaatagaagagtggaaagaattgatatataaggaagttatggacttggaggagagaaccaagaatggagttatacgggggcagccctctcctttagcacaggtgcagcagtgatcaatggctctcagcatccatcatcatcgtcgtctgtcaatgatgtgtcttcaatgtcaacagatccgactttggcctctgatacagacagcagtctagaagcagcagctgggcctctgggctgctgtagatgactacttgggccatcggggggtgggagggatggggagtcggttagtcattgatagaactactttgaaaacaattcagtggtcttatttttgggtgatttttcaaaaaatgtagaattcattttgtagtaaagtagtttattttttttaatttcaagtgatgtaatttaaaacctaagttgtgtttcaaaacagcaacaaaactgtattgtattttttttgctgtaattaactgtataatgtaaacctaattattttatcatggtttaaattttttgcatatttgctttatcttatgctgctgatttttttaactgaatttgtaagattttgtttatcaaagcaactattatgtggtgacttgcctatatcatgaattatttaagatttttatagttttttttaattagaatttatttcagatgttttgttcatgatactatccttcagggttatgtgcttatcaatgaaataaccccagaggagtgagggaaaataacttgtagccagttatattcaggaataactactgtaaatgatgaacgtgttaggagacctccaatatttgctacttgccaatcctaatttagttacaagaattggtaggcaatcctacttaattttggcaaaagccccgtcatctaaatggcagaataactcagagcatgtctttgaagatgctgggcgtctaccaccaccttatgtccccaccctacccaacaaaaataagtaaaaagaatatggtgtattctacaaatttgtggcatgctcaaagtttatgatcacataaaggcaagaggatacttcatgaataatacatttcaatgcaaataaacagatggttcacttctactagctatgagcctgtttttgtatacactgagttaatctactcaggctgtaggtcccagcaatgttctagagtctggtctttccctttcctgcagcttcgggtccttggacctttcctgtttcctattacttggagtgtctgtcagttgagcaccagttgttctggtgtttcatttgattctacttgtagcataatcatttatacgagctattgggaggttccaaaccctacctagatttgtgtaggtgatgtatcaaatgagcaatataccgttcatctgaaaatagtagcacacagccatatataggatatcattttctaaggactgtttcttcacattgagcagagcaggcataaatggtggttatttagtctaagtcttttatttttttatacctgattttcaacataacacgcaatgtggatgtcgagtagtgttaagaatggtgctgctcctgacaagtgtatgttaactgtttacattttctatctgtagaattatttctctattactgaacttttcctaagtaaaatgtctttgaagtctcgttatttctgaaatacgttgtctgtaatagacccaggcaccttttaaattatctctggaacaagagggatttcatgtaatgaactaggaaatgcatactcacataagcaacaaggttctaggcagaaagccccttggaatttgtgaccaacaggagcaagaacaggtgcggctcaacatgcaatgtctgaaaatttgcttggcattttattcatatatttagtgcaaaattatttttgagtgagatattttacatcactgttaatgtgcaatatttaagattaaaatacattagcttttttatatactttgaagtagcaagtttgttttcgatggcttagagtcatgatttccagcttcccagcctttttatcagtcccttttctaatacaacaaggtgcattaatttgattaggcaaattagagttctaagacacttcttgaattgtagacagaaaatattggattcacaatttcagcagaaatttgagaatgagtgtgtttatattaatttcacaattagctgtattttctgtagcatagattatgtcactgttgcactttcacagcagacatgctttcagaaggttctcatattttatgtttgattgctgataagccatctctattgatacagattttggttaagtaaggaaaaccaggtgtgtgtctgtatcatttattgtaaatgccagctgccacttgccaaccatcatgttcagttcaattcaaagaaaacaaactctcattacttagtgtaaactaaaatacttaacaaattatatcctaaaaacaaggtctctttgttaaatgttgcatgccctaggttttaaattactacatccaaatacagttttcgtcttaaatttgttaagctaaatatatgttggttctttttattttggaatcctttaagcatcttaaacattttttttttgaagagaagttacaaataacatttctatcaggtagtacttgtatgaaaccacctttcttattctataattttgatttttcaattttatatacttaatatactcactgtcttactatcagaaagttattttgaccaagatttttattatcttcatagattcagaaagagatgctaattctgtaccaatgtcttcctggttactattctcttccctctaatatatactggccatttgtaaaaccattgtgttgttgggatcacttagttatactatacgcagatagagcatctcaactctgtcatagtgtttgctgaacagttttcagtgtcatgcacctttggctgctaattgttcctgacgtgcactcttccgagttggtaaaggcacagtgtgttcatgccagacttctaagagaaacaccagcctcttaaatcagaagcctacacacaacccccttaacaatccaaagaagcttgatggtgtgcaaagaagcatcctgccagccttgtcattgttctgttctatgctaatcctgctgtgttgtctaaaagatggagggaagaggacatcagtgtctgatagtgaaatcatcagcaggaaagtgaagctctttccttggttacagataagacttggtttacactattggccagtatctgctaaacatatgaagacttaactattcagtgttgcctaggcattcgcctgcacaacattttgaggttagaacatagaatattttcagaaatactgttgtagtttgtgagtgttgttcattagttacacattagctatagagtggatgcatgaagccccatgacaccagtaaacttctcttaccagtaggtaaaccaaacaccattctgtcattagcagccctcttaaatgttgcctctccgtatcctgttgcatttttgtgtgcattgtgtttctactgatctctcttaggtttttacggaatcaaaggaaactaatttttccttaatagcaagaaagatgaagaggtaaagggcattgaagcagaaatgtatagtttggggtacgattagaaaactcgtaaggaaaacagaagtcctaatttcaaactgactgctcttcgttaagtgctcttaaggagagtctagtaacagtaacactttctggccatttctagtttagattctcttcgttactgaaacttttgagaaatattacctgtggattaattttgcacaatgttctattctcataatgacttacaaattaaactaggtttttattgaactacctcacactaattttctatgctttcccaagtaagctgttgccctgttagatctttactgagtgaattataaatgtgtgttaaatactttctagccaatgttgacacaataccagtaagtatgtaaagtatataccttacatcagtaagagacacgtgtaaaatctttgactgtatgtcttgcaaaattgtgctcgttgacattattactgtttttgtaagtagaaacctgctcgtgatatcggtccatttacattttacaaaaggagtaaatcttagtaaaaattttacgaagaaataaattacttttgtaggcccaatatttggtatatttttgagaagctgttaatcttttagctgaataatgaagttagactgaattacgtgtctccctggactgtgacatctattttctcattacagtttatcctggtcagcagggtgtcacacctggaaacctgagtatgatagctgacatttgcttttctccctctgcgatgtcattcctcctccattcctctccttccctgtgttccgttccctctcctttcctctagacaaaacaaaatggggcactttttagggaatgctgagatcattattgtggtttttcatcattcatgccctagtcattaaacatgcaccactggaatgtaaacaatgttatctagtatgtcaattggttataatattttaaataaaaaagaaaaaagtggtatgaaaattatgaaa

SEQ ID NO: 154875 - DNA, 5638 bp, Homo sapiens
  Payload ID: 10451
  Gene Symbol: MAPK8
  Gene Name: mitogen-activated protein kinase 8
  Uniprot ID: P45983
  ENST ID: ENST00000374182
  CDS Start-End: 19-1173
aattaattgcttgccatcatgagcagaagcaagcgtgacaacaatttttatagtgtagagattggagattctacattcacagtcctgaaacgatatcagaatttaaaacctataggctcaggagctcaaggaatagtatgcgcagcttatgatgccattcttgaaagaaatgttgcaatcaagaagctaagccgaccatttcagaatcagactcatgccaagcgggcctacagagagctagttcttatgaaatgtgttaatcacaaaaatataattggccttttgaatgttttcacaccacagaaatccctagaagaatttcaagatgtttacatagtcatggagctcatggatgcaaatctttgccaagtgattcagatggagctagatcatgaaagaatgtcctaccttctctatcagatgctgtgtggaatcaagcaccttcattctgctggaattattcatcgggacttaaagcccagtaatatagtagtaaaatctgattgcactttgaagattcttgacttcggtctggccaggactgcaggaacgagttttatgatgacgccttatgtagtgactcgctactacagagcacccgaggtcatccttggcatgggctacaaggaaaacgtggatttatggtctgtggggtgcattatgggagaaatggtttgccacaaaatcctctttccaggaagggactatattgatcagtggaataaagttattgaacagcttggaacaccatgtcctgaattcatgaagaaactgcaaccaacagtaaggacttacgttgaaaacagacctaaatatgctggatatagctttgagaaactcttccctgatgtccttttcccagctgactcagaacacaacaaacttaaagccagtcaggcaagggatttgttatccaaaatgctggtaatagatgcatctaaaaggatctctgtagatgaagctctccaacacccgtacatcaatgtctggtatgatccttctgaagcagaagctccaccaccaaagatccctgacaagcagttagatgaaagggaacacacaatagaagagtggaaagaattgatatataaggaagttatggacttggaggagagaaccaagaatggagttatacgggggcagccctctcctttagcacaggtgcagcagtgatcaatggctctcagcatccatcatcatcgtcgtctgtcaatgatgtgtcttcaatgtcaacagatccgactttggcctctgatacagacagcagtctagaagcagcagctgggcctctgggctgctgtagatgactacttgggccatcggggggtgggagggatggggagtcggttagtcattgatagaactactttgaaaacaattcagtggtcttatttttgggtgatttttcaaaaaatgtagaattcattttgtagtaaagtagtttattttttttaatttcaagtgatgtaatttaaaacctaagttgtgtttcaaaacagcaacaaaactgtattgtattttttttgctgtaattaactgtataatgtaaacctaattattttatcatggtttaaattttttgcatatttgctttatcttatgctgctgatttttttaactgaatttgtaagattttgtttatcaaagcaactattatgtggtgacttgcctatatcatgaattatttaagatttttatagttttttttaattagaatttatttcagatgttttgttcatgatactatccttcagggttatgtgcttatcaatgaaataaccccagaggagtgagggaaaataacttgtagccagttatattcaggaataactactgtaaatgatgaacgtgttaggagacctccaatatttgctacttgccaatcctaatttagttacaagaattggtaggcaatcctacttaattttggcaaaagccccgtcatctaaatggcagaataactcagagcatgtctttgaagatgctgggcgtctaccaccaccttatgtccccaccctacccaacaaaaataagtaaaaagaatatggtgtattctacaaatttgtggcatgctcaaagtttatgatcacataaaggcaagaggatacttcatgaataatacatttcaatgcaaataaacagatggttcacttctactagctatgagcctgtttttgtatacactgagttaatctactcaggctgtaggtcccagcaatgttctagagtctggtctttccctttcctgcagcttcgggtccttggacctttcctgtttcctattacttggagtgtctgtcagttgagcaccagttgttctggtgtttcatttgattctacttgtagcataatcatttatacgagctattgggaggttccaaaccctacctagatttgtgtaggtgatgtatcaaatgagcaatataccgttcatctgaaaatagtagcacacagccatatataggatatcattttctaaggactgtttcttcacattgagcagagcaggcataaatggtggttatttagtctaagtcttttatttttttatacctgattttcaacataacacgcaatgtggatgtcgagtagtgttaagaatggtgctgctcctgacaagtgtatgttaactgtttacattttctatctgtagaattatttctctattactgaacttttcctaagtaaaatgtctttgaagtctcgttatttctgaaatacgttgtctgtaatagacccaggcaccttttaaattatctctggaacaagagggatttcatgtaatgaactaggaaatgcatactcacataagcaacaaggttctaggcagaaagccccttggaatttgtgaccaacaggagcaagaacaggtgcggctcaacatgcaatgtctgaaaatttgcttggcattttattcatatatttagtgcaaaattatttttgagtgagatattttacatcactgttaatgtgcaatatttaagattaaaatacattagcttttttatatactttgaagtagcaagtttgttttcgatggcttagagtcatgatttccagcttcccagcctttttatcagtcccttttctaatacaacaaggtgcattaatttgattaggcaaattagagttctaagacacttcttgaattgtagacagaaaatattggattcacaatttcagcagaaatttgagaatgagtgtgtttatattaatttcacaattagctgtattttctgtagcatagattatgtcactgttgcactttcacagcagacatgctttcagaaggttctcatattttatgtttgattgctgataagccatctctattgatacagattttggttaagtaaggaaaaccaggtgtgtgtctgtatcatttattgtaaatgccagctgccacttgccaaccatcatgttcagttcaattcaaagaaaacaaactctcattacttagtgtaaactaaaatacttaacaaattatatcctaaaaacaaggtctctttgttaaatgttgcatgccctaggttttaaattactacatccaaatacagttttcgtcttaaatttgttaagctaaatatatgttggttctttttattttggaatcctttaagcatcttaaacattttttttttgaagagaagttacaaataacatttctatcaggtagtacttgtatgaaaccacctttcttattctataattttgatttttcaattttatatacttaatatactcactgtcttactatcagaaagttattttgaccaagatttttattatcttcatagattcagaaagagatgctaattctgtaccaatgtcttcctggttactattctcttccctctaatatatactggccatttgtaaaaccattgtgttgttgggatcacttagttatactatacgcagatagagcatctcaactctgtcatagtgtttgctgaacagttttcagtgtcatgcacctttggctgctaattgttcctgacgtgcactcttccgagttggtaaaggcacagtgtgttcatgccagacttctaagagaaacaccagcctcttaaatcagaagcctacacacaacccccttaacaatccaaagaagcttgatggtgtgcaaagaagcatcctgccagccttgtcattgttctgttctatgctaatcctgctgtgttgtctaaaagatggagggaagaggacatcagtgtctgatagtgaaatcatcagcaggaaagtgaagctctttccttggttacagataagacttggtttacactattggccagtatctgctaaacatatgaagacttaactattcagtgttgcctaggcattcgcctgcacaacattttgaggttagaacatagaatattttcagaaatactgttgtagtttgtgagtgttgttcattagttacacattagctatagagtggatgcatgaagccccatgacaccagtaaacttctcttaccagtaggtaaaccaaacaccattctgtcattagcagccctcttaaatgttgcctctccgtatcctgttgcatttttgtgtgcattgtgtttctactgatctctcttaggtttttacggaatcaaaggaaactaatttttccttaatagcaagaaagatgaagaggtaaagggcattgaagcagaaatgtatagtttggggtacgattagaaaactcgtaaggaaaacagaagtcctaatttcaaactgactgctcttcgttaagtgctcttaaggagagtctagtaacagtaacactttctggccatttctagtttagattctcttcgttactgaaacttttgagaaatattacctgtggattaattttgcacaatgttctattctcataatgacttacaaattaaactaggtttttattgaactacctcacactaattttctatgctttcccaagtaagctgttgccctgttagatctttactgagtgaattataaatgtgtgttaaatactttctagccaatgttgacacaataccagtaagtatgtaaagtatataccttacatcagtaagagacacgtgtaaaatctttgactgtatgtcttgcaaaattgtgctcgttgacattattactgtttttgtaagtagaaacctgctcgtgatatcggtccatttacattttacaaaaggagtaaatcttagtaaaaattttacgaagaaataaattacttttgtaggcccaatatttggtatatttttgagaagctgttaatcttttagctgaataatgaagttagactgaattacgtgtctccctggactgtgacatctattttctcattacagtttatcctggtcagcagggtgtcacacctggaaacctgagtatgatagctgacatttgcttttctccctctgcgatgtcattcctcctccattcctctccttccctgtgttccgttccctctcctttcctctagacaaaacaaaatggggcactttttagggaatgctgagatcattattgtggtttttcatcattcatgccctagtcattaaacatgcaccactggaatgtaaacaatgttatctagtatgtcaattggttataatattttaaataaaaaagaaaaaagtggtatgaaaattatgaaa

SEQ ID NO: 154876 - DNA, 5796 bp, Homo sapiens
  Payload ID: 10451
  Gene Symbol: MAPK8
  Gene Name: mitogen-activated protein kinase 8
  Uniprot ID: P45983
  ENST ID: ENST00000374189
  CDS Start-End: 182-1465
gcggccgaggccggacgacgcggcttggattgcggagccgcgagcagcgctgggtaacggccgcggcgaccaccccggacggcccctgtccccgctggcgggcttccctgtcgccgttcgctgcgctgccggcttcttggtgaatttttggatgaagccattaaattaattgcttgccatcatgagcagaagcaagcgtgacaacaatttttatagtgtagagattggagattctacattcacagtcctgaaacgatatcagaatttaaaacctataggctcaggagctcaaggaatagtatgcgcagcttatgatgccattcttgaaagaaatgttgcaatcaagaagctaagccgaccatttcagaatcagactcatgccaagcgggcctacagagagctagttcttatgaaatgtgttaatcacaaaaatataattggccttttgaatgttttcacaccacagaaatccctagaagaatttcaagatgtttacatagtcatggagctcatggatgcaaatctttgccaagtgattcagatggagctagatcatgaaagaatgtcctaccttctctatcagatgctgtgtggaatcaagcaccttcattctgctggaattattcatcgggacttaaagcccagtaatatagtagtaaaatctgattgcactttgaagattcttgacttcggtctggccaggactgcaggaacgagttttatgatgacgccttatgtagtgactcgctactacagagcacccgaggtcatccttggcatgggctacaaggaaaacgtggatttatggtctgtggggtgcattatgggagaaatggtttgccacaaaatcctctttccaggaagggactatattgatcagtggaataaagttattgaacagcttggaacaccatgtcctgaattcatgaagaaactgcaaccaacagtaaggacttacgttgaaaacagacctaaatatgctggatatagctttgagaaactcttccctgatgtccttttcccagctgactcagaacacaacaaacttaaagccagtcaggcaagggatttgttatccaaaatgctggtaatagatgcatctaaaaggatctctgtagatgaagctctccaacacccgtacatcaatgtctggtatgatccttctgaagcagaagctccaccaccaaagatccctgacaagcagttagatgaaagggaacacacaatagaagagtggaaagaattgatatataaggaagttatggacttggaggagagaaccaagaatggagttatacgggggcagccctctcctttaggtgcagcagtgatcaatggctctcagcatccatcatcatcgtcgtctgtcaatgatgtgtcttcaatgtcaacagatccgactttggcctctgatacagacagcagtctagaagcagcagctgggcctctgggctgctgtagatgactacttgggccatcggggggtgggagggatggggagtcggttagtcattgatagaactactttgaaaacaattcagtggtcttatttttgggtgatttttcaaaaaatgtagaattcattttgtagtaaagtagtttattttttttaatttcaagtgatgtaatttaaaacctaagttgtgtttcaaaacagcaacaaaactgtattgtattttttttgctgtaattaactgtataatgtaaacctaattattttatcatggtttaaattttttgcatatttgctttatcttatgctgctgatttttttaactgaatttgtaagattttgtttatcaaagcaactattatgtggtgacttgcctatatcatgaattatttaagatttttatagttttttttaattagaatttatttcagatgttttgttcatgatactatccttcagggttatgtgcttatcaatgaaataaccccagaggagtgagggaaaataacttgtagccagttatattcaggaataactactgtaaatgatgaacgtgttaggagacctccaatatttgctacttgccaatcctaatttagttacaagaattggtaggcaatcctacttaattttggcaaaagccccgtcatctaaatggcagaataactcagagcatgtctttgaagatgctgggcgtctaccaccaccttatgtccccaccctacccaacaaaaataagtaaaaagaatatggtgtattctacaaatttgtggcatgctcaaagtttatgatcacataaaggcaagaggatacttcatgaataatacatttcaatgcaaataaacagatggttcacttctactagctatgagcctgtttttgtatacactgagttaatctactcaggctgtaggtcccagcaatgttctagagtctggtctttccctttcctgcagcttcgggtccttggacctttcctgtttcctattacttggagtgtctgtcagttgagcaccagttgttctggtgtttcatttgattctacttgtagcataatcatttatacgagctattgggaggttccaaaccctacctagatttgtgtaggtgatgtatcaaatgagcaatataccgttcatctgaaaatagtagcacacagccatatataggatatcattttctaaggactgtttcttcacattgagcagagcaggcataaatggtggttatttagtctaagtcttttatttttttatacctgattttcaacataacacgcaatgtggatgtcgagtagtgttaagaatggtgctgctcctgacaagtgtatgttaactgtttacattttctatctgtagaattatttctctattactgaacttttcctaagtaaaatgtctttgaagtctcgttatttctgaaatacgttgtctgtaatagacccaggcaccttttaaattatctctggaacaagagggatttcatgtaatgaactaggaaatgcatactcacataagcaacaaggttctaggcagaaagccccttggaatttgtgaccaacaggagcaagaacaggtgcggctcaacatgcaatgtctgaaaatttgcttggcattttattcatatatttagtgcaaaattatttttgagtgagatattttacatcactgttaatgtgcaatatttaagattaaaatacattagcttttttatatactttgaagtagcaagtttgttttcgatggcttagagtcatgatttccagcttcccagcctttttatcagtcccttttctaatacaacaaggtgcattaatttgattaggcaaattagagttctaagacacttcttgaattgtagacagaaaatattggattcacaatttcagcagaaatttgagaatgagtgtgtttatattaatttcacaattagctgtattttctgtagcatagattatgtcactgttgcactttcacagcagacatgctttcagaaggttctcatattttatgtttgattgctgataagccatctctattgatacagattttggttaagtaaggaaaaccaggtgtgtgtctgtatcatttattgtaaatgccagctgccacttgccaaccatcatgttcagttcaattcaaagaaaacaaactctcattacttagtgtaaactaaaatacttaacaaattatatcctaaaaacaaggtctctttgttaaatgttgcatgccctaggttttaaattactacatccaaatacagttttcgtcttaaatttgttaagctaaatatatgttggttctttttattttggaatcctttaagcatcttaaacattttttttttgaagagaagttacaaataacatttctatcaggtagtacttgtatgaaaccacctttcttattctataattttgatttttcaattttatatacttaatatactcactgtcttactatcagaaagttattttgaccaagatttttattatcttcatagattcagaaagagatgctaattctgtaccaatgtcttcctggttactattctcttccctctaatatatactggccatttgtaaaaccattgtgttgttgggatcacttagttatactatacgcagatagagcatctcaactctgtcatagtgtttgctgaacagttttcagtgtcatgcacctttggctgctaattgttcctgacgtgcactcttccgagttggtaaaggcacagtgtgttcatgccagacttctaagagaaacaccagcctcttaaatcagaagcctacacacaacccccttaacaatccaaagaagcttgatggtgtgcaaagaagcatcctgccagccttgtcattgttctgttctatgctaatcctgctgtgttgtctaaaagatggagggaagaggacatcagtgtctgatagtgaaatcatcagcaggaaagtgaagctctttccttggttacagataagacttggtttacactattggccagtatctgctaaacatatgaagacttaactattcagtgttgcctaggcattcgcctgcacaacattttgaggttagaacatagaatattttcagaaatactgttgtagtttgtgagtgttgttcattagttacacattagctatagagtggatgcatgaagccccatgacaccagtaaacttctcttaccagtaggtaaaccaaacaccattctgtcattagcagccctcttaaatgttgcctctccgtatcctgttgcatttttgtgtgcattgtgtttctactgatctctcttaggtttttacggaatcaaaggaaactaatttttccttaatagcaagaaagatgaagaggtaaagggcattgaagcagaaatgtatagtttggggtacgattagaaaactcgtaaggaaaacagaagtcctaatttcaaactgactgctcttcgttaagtgctcttaaggagagtctagtaacagtaacactttctggccatttctagtttagattctcttcgttactgaaacttttgagaaatattacctgtggattaattttgcacaatgttctattctcataatgacttacaaattaaactaggtttttattgaactacctcacactaattttctatgctttcccaagtaagctgttgccctgttagatctttactgagtgaattataaatgtgtgttaaatactttctagccaatgttgacacaataccagtaagtatgtaaagtatataccttacatcagtaagagacacgtgtaaaatctttgactgtatgtcttgcaaaattgtgctcgttgacattattactgtttttgtaagtagaaacctgctcgtgatatcggtccatttacattttacaaaaggagtaaatcttagtaaaaattttacgaagaaataaattacttttgtaggcccaatatttggtatatttttgagaagctgttaatcttttagctgaataatgaagttagactgaattacgtgtctccctggactgtgacatctattttctcattacagtttatcctggtcagcagggtgtcacacctggaaacctgagtatgatagctgacatttgcttttctccctctgcgatgtcattcctcctccattcctctccttccctgtgttccgttccctctcctttcctctagacaaaacaaaatggggcactttttagggaatgctgagatcattattgtggtttttcatcattcatgccctagtcattaaacatgcaccactggaatgtaaacaatgttatctagtatgtcaattggttataatattttaaataaaaaagaaaaaagtggtatgaaaattatgaaa

SEQ ID NO: 154877 - DNA, 5844 bp, Homo sapiens
  Payload ID: 10451
  Gene Symbol: MAPK8
  Gene Name: mitogen-activated protein kinase 8
  Uniprot ID: P45983
  ENST ID: ENST00000395611
  CDS Start-End: 233-1516
gacgtgcgcgggcgtgcgcggtgacggcccgcgtctctgttactcagccgagcggccgaggccggacgacgcggcttggattgcggagccgcgagcagcgctgggtaacggccgcggcgaccaccccggacggcccctgtccccgctggcgggcttccctgtcgccgttcgctgcgctgccggcttcttggtgaatttttggatgaagccattaaattaattgcttgccatcatgagcagaagcaagcgtgacaacaatttttatagtgtagagattggagattctacattcacagtcctgaaacgatatcagaatttaaaacctataggctcaggagctcaaggaatagtatgcgcagcttatgatgccattcttgaaagaaatgttgcaatcaagaagctaagccgaccatttcagaatcagactcatgccaagcgggcctacagagagctagttcttatgaaatgtgttaatcacaaaaatataattggccttttgaatgttttcacaccacagaaatccctagaagaatttcaagatgtttacatagtcatggagctcatggatgcaaatctttgccaagtgattcagatggagctagatcatgaaagaatgtcctaccttctctatcagatgctgtgtggaatcaagcaccttcattctgctggaattattcatcgggacttaaagcccagtaatatagtagtaaaatctgattgcactttgaagattcttgacttcggtctggccaggactgcaggaacgagttttatgatgacgccttatgtagtgactcgctactacagagcacccgaggtcatccttggcatgggctacaaggaaaacgttgacatttggtcagttgggtgcatcatgggagaaatgatcaaaggtggtgttttgttcccaggtacagatcatattgatcagtggaataaagttattgaacagcttggaacaccatgtcctgaattcatgaagaaactgcaaccaacagtaaggacttacgttgaaaacagacctaaatatgctggatatagctttgagaaactcttccctgatgtccttttcccagctgactcagaacacaacaaacttaaagccagtcaggcaagggatttgttatccaaaatgctggtaatagatgcatctaaaaggatctctgtagatgaagctctccaacacccgtacatcaatgtctggtatgatccttctgaagcagaagctccaccaccaaagatccctgacaagcagttagatgaaagggaacacacaatagaagagtggaaagaattgatatataaggaagttatggacttggaggagagaaccaagaatggagttatacgggggcagccctctcctttaggtgcagcagtgatcaatggctctcagcatccatcatcatcgtcgtctgtcaatgatgtgtcttcaatgtcaacagatccgactttggcctctgatacagacagcagtctagaagcagcagctgggcctctgggctgctgtagatgactacttgggccatcggggggtgggagggatggggagtcggttagtcattgatagaactactttgaaaacaattcagtggtcttatttttgggtgatttttcaaaaaatgtagaattcattttgtagtaaagtagtttattttttttaatttcaagtgatgtaatttaaaacctaagttgtgtttcaaaacagcaacaaaactgtattgtattttttttgctgtaattaactgtataatgtaaacctaattattttatcatggtttaaattttttgcatatttgctttatcttatgctgctgatttttttaactgaatttgtaagattttgtttatcaaagcaactattatgtggtgacttgcctatatcatgaattatttaagatttttatagttttttttaattagaatttatttcagatgttttgttcatgatactatccttcagggttatgtgcttatcaatgaaataaccccagaggagtgagggaaaataacttgtagccagttatattcaggaataactactgtaaatgatgaacgtgttaggagacctccaatatttgctacttgccaatcctaatttagttacaagaattggtaggcaatcctacttaattttggcaaaagccccgtcatctaaatggcagaataactcagagcatgtctttgaagatgctgggcgtctaccaccaccttatgtccccaccctacccaacaaaaataagtaaaaagaatatggtgtattctacaaatttgtggcatgctcaaagtttatgatcacataaaggcaagaggatacttcatgaataatacatttcaatgcaaataaacagatggttcacttctactagctatgagcctgtttttgtatacactgagttaatctactcaggctgtaggtcccagcaatgttctagagtctggtctttccctttcctgcagcttcgggtccttggacctttcctgtttcctattacttggagtgtctgtcagttgagcaccagttgttctggtgtttcatttgattctacttgtagcataatcatttatacgagctattgggaggttccaaaccctacctagatttgtgtaggtgatgtatcaaatgagcaatataccgttcatctgaaaatagtagcacacagccatatataggatatcattttctaaggactgtttcttcacattgagcagagcaggcataaatggtggttatttagtctaagtcttttatttttttatacctgattttcaacataacacgcaatgtggatgtcgagtagtgttaagaatggtgctgctcctgacaagtgtatgttaactgtttacattttctatctgtagaattatttctctattactgaacttttcctaagtaaaatgtctttgaagtctcgttatttctgaaatacgttgtctgtaatagacccaggcaccttttaaattatctctggaacaagagggatttcatgtaatgaactaggaaatgcatactcacataagcaacaaggttctaggcagaaagccccttggaatttgtgaccaacaggagcaagaacaggtgcggctcaacatgcaatgtctgaaaatttgcttggcattttattcatatatttagtgcaaaattatttttgagtgagatattttacatcactgttaatgtgcaatatttaagattaaaatacattagcttttttatatactttgaagtagcaagtttgttttcgatggcttagagtcatgatttccagcttcccagcctttttatcagtcccttttctaatacaacaaggtgcattaatttgattaggcaaattagagttctaagacacttcttgaattgtagacagaaaatattggattcacaatttcagcagaaatttgagaatgagtgtgtttatattaatttcacaattagctgtattttctgtagcatagattatgtcactgttgcactttcacagcagacatgctttcagaaggttctcatattttatgtttgattgctgataagccatctctattgatacagattttggttaagtaaggaaaaccaggtgtgtgtctgtatcatttattgtaaatgccagctgccacttgccaaccatcatgttcagttcaattcaaagaaaacaaactctcattacttagtgtaaactaaaatacttaacaaattatatcctaaaaacaaggtctctttgttaaatgttgcatgccctaggttttaaattactacatccaaatacagttttcgtcttaaatttgttaagctaaatatatgttggttctttttattttggaatcctttaagcatcttaaacattttttttttgaagagaagttacaaataacatttctatcaggtagtacttgtatgaaaccacctttcttattctataattttgatttttcaattttatatacttaatatactcactgtcttactatcagaaagttattttgaccaagatttttattatcttcatagattcagaaagagatgctaattctgtaccaatgtcttcctggttactattctcttccctctaatatatactggccatttgtaaaaccattgtgttgttgggatcacttagttatactatacgcagatagagcatctcaactctgtcatagtgtttgctgaacagttttcagtgtcatgcacctttggctgctaattgttcctgacgtgcactcttccgagttggtaaaggcacagtgtgttcatgccagacttctaagagaaacaccagcctcttaaatcagaagcctacacacaacccccttaacaatccaaagaagcttgatggtgtgcaaagaagcatcctgccagccttgtcattgttctgttctatgctaatcctgctgtgttgtctaaaagatggagggaagaggacatcagtgtctgatagtgaaatcatcagcaggaaagtgaagctctttccttggttacagataagacttggtttacactattggccagtatctgctaaacatatgaagacttaactattcagtgttgcctaggcattcgcctgcacaacattttgaggttagaacatagaatattttcagaaatactgttgtagtttgtgagtgttgttcattagttacacattagctatagagtggatgcatgaagccccatgacaccagtaaacttctcttaccagtaggtaaaccaaacaccattctgtcattagcagccctcttaaatgttgcctctccgtatcctgttgcatttttgtgtgcattgtgtttctactgatctctcttaggtttttacggaatcaaaggaaactaatttttccttaatagcaagaaagatgaagaggtaaagggcattgaagcagaaatgtatagtttggggtacgattagaaaactcgtaaggaaaacagaagtcctaatttcaaactgactgctcttcgttaagtgctcttaaggagagtctagtaacagtaacactttctggccatttctagtttagattctcttcgttactgaaacttttgagaaatattacctgtggattaattttgcacaatgttctattctcataatgacttacaaattaaactaggtttttattgaactacctcacactaattttctatgctttcccaagtaagctgttgccctgttagatctttactgagtgaattataaatgtgtgttaaatactttctagccaatgttgacacaataccagtaagtatgtaaagtatataccttacatcagtaagagacacgtgtaaaatctttgactgtatgtcttgcaaaattgtgctcgttgacattattactgtttttgtaagtagaaacctgctcgtgatatcggtccatttacattttacaaaaggagtaaatcttagtaaaaattttacgaagaaataaattacttttgtaggcccaatatttggtatatttttgagaagctgttaatcttttagctgaataatgaagttagactgaattacgtgtctccctggactgtgacatctattttctcattacagtttatcctggtcagcagggtgtcacacctggaaacctgagtatgatagctgacatttgcttttctccctctgcgatgtcattcctcctccattcctctccttccctgtgttccgttccctctcctttcctctagacaaaacaaaatggggcactttttagggaatgctgagatcattattgtggtttttcatcattcatgccctagtcattaaacatgcaccactggaatgtaaacaatgttatctagtatgtcaattggttataatattttaaataaaaaagaaaaaagtggtatgaaaattatg

SEQ ID NO: 154878 - DNA, 907 bp, Homo sapiens
  Payload ID: 10451
  Gene Symbol: MAPK8
  Gene Name: mitogen-activated protein kinase 8
  ENST ID: ENST00000432379
  CDS Start-End: 480-907
cgcggtgacggcccgcgtctctgttactcagccgagcggccgaggccggacgacgcggcttggattgcggagccgcgagcagcgctgggtaacggccgcggcgaccaccccggacggcccctgtccccgctggcgggcttccctgtcgccgttcgctgcgctgccggtcttgcagccttacagtcatttgtaatggttacctcagattcccctgctgtggttaacgttaaacctaggaggtcagatgctctaagtgaacatgtttagtgctgtgcctgacaaaagcaagcaatcaaaatgggacttccttgagggcaggcctgtcttgcatctgtttctccaccacctagcctggaatataactggccttatgggtttctagaaggaaaatcacagaggtaaagcatcatttcatcacatcctgtcaaggcttcttggtgaatttttggatgaagccattaaattaattgcttgccatcatgagcagaagcaagcgtgacaacaatttttatagtgtagagattggagattctacattcacagtcctgaaacgatatcagaatttaaaacctataggctcaggagctcaaggaatagtatgcgcagcttatgatgccattcttgaaagaaatgttgcaatcaagaagctaagccgaccatttcagaatcagactcatgccaagcgggcctacagagagctagttcttatgaaatgtgttaatcacaaaaatataattggccttttgaatgttttcacaccacagaaatccctagaagaatttcaagatgtttacatagtcatggagctcatggatgcaaatctttgccaagtgattcagatggagctagatcatgaaagaatgtcctaccttctctatcagatgctgtgtggaatcaagcaccttca

SEQ ID NO: 154879 - DNA, 603 bp, Homo sapiens
  Payload ID: 10451
  Gene Symbol: MAPK8
  Gene Name: mitogen-activated protein kinase 8
  ENST ID: ENST00000429041
  CDS Start-End: 311-603
actcagccgagcggccgaggccggacgacgcggcttggattgcggagccgcgagcagcgctgggtaacggccgcggcgaccaccccggacggcccctgtccccgctggcgggcttccctgtcgccgttcgctgcgctgccggcttcttggtgaatttttggatgaagccattaaattaattgcttgccatcatgagcagaagcaagcgtgacaacaatttttatagtgtagagattggagattctacattcacagtcctgaaacgatatcagaatttaaaacctataggctcaggagctcaaggaatagtatgataattggccttttgaatgttttcacaccacagaaatccctagaagaatttcaagatgtttacatagtcatggagctcatggatgcaaatctttgccaagtgattcagatggagctagatcatgaaagaatgtcctaccttctctatcagatgctgtgtggaatcaagcaccttcattctgctggaattattcatcgggacttaaagcccagtaatatagtagtaaaatctgattgcactttgaagattcttgacttcggtctggccaggactgcaggaacgagttttat

SEQ ID NO: 154880 - DNA, 860 bp, Homo sapiens
  Payload ID: 10451
  Gene Symbol: MAPK8
  Gene Name: mitogen-activated protein kinase 8
  ENST ID: ENST00000426557
  CDS Start-End: 435-860
acctgggtgcgctccgctgcccgccagcccgcctgccgccgcgagccccgcccgcctgtcctctcgcgtcctcttcgcgtgggtcctgcctccgcggcgggagaagaaaatggagcggggggtcttgcagccttacagtcatttgtaatggttacctcagattcccctgctgtggttaacgttaaacctaggaggtcagatgctctaagtgaacatgtttagtgctgtgcctgacaaaagcaagcaatcaaaatgggacttccttgagggcaggcctgtcttgcatctgtttctccaccacctagcctggaatataactggccttatgggtttctagaaggaaaatcacagaggtaaagcatcatttcatcacatcctgtcaaggcttcttggtgaatttttggatgaagccattaaattaattgcttgccatcatgagcagaagcaagcgtgacaacaatttttatagtgtagagattggagattctacattcacagtcctgaaacgatatcagaatttaaaacctataggctcaggagctcaaggaatagtatgcgcagcttatgatgccattcttgaaagaaatgttgcaatcaagaagctaagccgaccatttcagaatcagactcatgccaagcgggcctacagagagctagttcttatgaaatgtgttaatcacaaaaatataattggccttttgaatgttttcacaccacagaaatccctagaagaatttcaagatgtttacatagtcatggagctcatggatgcaaatctttgccaagtgattcagatggagctagatcatgaaagaatgtcctaccttctctatcagatgctgtgtggaatcaagcacctt

SEQ ID NO: 154881 - DNA, 3050 bp, Homo sapiens
  Payload ID: 10452
  Gene Symbol: MAPK8IP1
  Gene Name: mitogen-activated protein kinase 8 interacting protein 1
  Uniprot ID: Q9UQF2
  ENST ID: ENST00000241014
  CDS Start-End: 171-2306
agtcccgcgggccgtgcgcggtgctgtgccgcgccctgccagacacaggtgcgcccgcctagcccgaactccgcggcggcggctgccctctcgccgcgcctccgcctccttcgcagccgccgcctcctccgcgccgcgctccgcccggatggccagggctgtgcccgagaatggcggagcgagaaagcggcggcctgggagggggggccgcgtccccgcccgccgcctccccgttcctggggctgcacatcgcttcgcctcccaatttcaggctcacccatgacatcagcctggaggagtttgaggatgaagacctctcggagatcactgatgagtgtggcatcagcttacagtgcaaagacaccctgtccttacggcccccgcgcgccgggctgctctctgcgggcggcggcggcgcggggagccggttgcaggccgagatgctgcagatggacctgatcgacgcgacgggggacactcccggggccgaggacgacgaggaggacgacgacgaggagcgcgcggcccggcggccgggagcggggccgcccaaggccgagtccggccaggagccggcgtcccgcggccagggccagagccaaggccagagccagggcccgggcagcggggacacgtaccggcccaagcggcccaccacgctcaacctctttccgcaggtgccgcggtctcaggacacactgaataataattctctgggcaaaaagcacagttggcaggatcgggtgtctcgatcatcctcacccctgaagacaggggagcagacaccaccgcatgaacacatctgcctgagcgatgagctgcccccccagagcggccccgcccccaccacagatcgaggcacctccaccgacagcccttgccgccgcagcacagccacccagatggcacctccgggtggtccccctgctgccccgcctgggggtcggggccactcgcatcgagaccgaatccactaccaggccgatgtgcgactagaggccactgaggagatctacctgaccccagtgcagaggcccccagacgctgcagagcccacctccgccttcctgccgcccactgagagccggatgtcagtcagctccgatccagaccctgccgcctacccctccacggcagggcggccgcacccctccatcagtgaagaggaagagggcttcgactgcctgtcgtccccagagcgggctgagcccccaggcggagggtggcgggggagcctgggggagccgccgccacctccacgggcctctctgagctcggacaccagcgccctgtcctatgactctgtcaagtacacgctggtggtagatgagcatgcacagctggagctggtgagcctgcggccgtgcttcggagactacagtgacgagagtgactctgccaccgtctatgacaactgtgcctccgtctcctcgccctatgagtcggccatcggagaggaatatgaggaggccccgcggccccagccccctgcctgcctctccgaggactccacgcctgatgaacccgacgtccatttctccaagaaattcctgaacgtcttcatgagtggccgctcccgctcctccagtgctgagtccttcgggctgttctcctgcatcatcaacggggaggagcaggagcagacccaccgggccatattcaggtttgtgcctcgacacgaagacgaacttgagctggaagtggatgaccctctgctagtggagctccaggctgaagactactggtacgaggcctacaacatgcgcactggtgcccggggtgtctttcctgcctattacgccatcgaggtcaccaaggagcccgagcacatggcagccctggccaaaaacagtgactgggtggaccagttccgggtgaagttcctgggctcagtccaggttccctatcacaagggcaatgacgtcctctgtgctgctatgcaaaagattgccaccacccgccggctcaccgtgcactttaacccgccctccagctgtgtcctggagatcagcgtgcggggtgtgaagataggcgtcaaggccgatgactcccaggaggccaaggggaataaatgtagccactttttccagttaaaaaacatctctttctgcggatatcatccaaagaacaacaagtactttgggttcatcaccaagcaccccgccgaccaccggtttgcctgccacgtctttgtgtctgaagactccaccaaagccctggcagagtccgtggggagagcattccagcagttctacaagcagtttgtggagtacacctgccccacagaagatatctacctggagtagctgtgcagccccgccctctgcgtcccccagccctcaggccagtgccaggacagctggctgctgacaggatgtggcactgcttgaggaggggcacctgccaccgccagaggacaaggaagtgggggccgctggcccagggtaggggagggtggggcaatggggagaggcaaatgcagtttattgtaatatatgggattagattcatctatggagggcagagtgggctgcctggggattgggagggacagggcttggggagcaggtctctggcagagaaggatgtccgttccaggagcacacggccctgccccatcctgggccttacctcccctgccagggctcgggcgctgtggctcctgccttgatgaagcccgtgtcctgccttgatgaagcctgtgccacctgcaagtgcccgccctgcccctgccccaacccccaccgaagagccctgagctcaggctgagcccagccacctcccaaggactttccagtgaggaaatggcaacacgtggaggtgaagtccctgttctcagctccgtcatctgcggggcttctgggtggctcctgccactgacctcaccggcatgctggcctgtggcaggcctaggacctcaggcggggaggaggagctgccgcaaggccctgtcccagcagaagagggaggcttcctgactgacacaggccagccccatcttggtcctgtcaccctggccccaactattaaagtgccatttcctgtctgga

SEQ ID NO: 154882 - DNA, 3180 bp, Homo sapiens
  Payload ID: 10452
  Gene Symbol: MAPK8IP1
  Gene Name: mitogen-activated protein kinase 8 interacting protein 1
  ENST ID: ENST00000395629
  CDS Start-End: 331-2436
gattgcagtaacctgatcccgtgagggaggcggccacagcggcagcagcgcaagggccaggccagccgggaggaaggtgcctgcagctgagggctgcgctgggaagagctggggctgggacccgggtcggcagctgcagcctcctctcctggcctgtctatttttaatgagctccccaggcttctgcagcaggcaggacgcagaaagacaggcccaagcggtggaggccagaggcccccagccctgccttgagccctggcccccccacccttccgggcatgagagggcagccctggggccccgcagccccccggccgggcagggctctccatgcagctggtgctgaagatggattcgagcccagacaatgacagctggttggaggatcaatgggagcgctggctcacccatgacatcagcctggaggagtttgaggatgaagacctctcggagatcactgatgagtgtggcatcagcttacagtgcaaagacaccctgtccttacggcccccgcgcgccgggctgctctctgcgggcggcggcggcgcggggagccggttgcaggccgagatgctgcagatggacctgatcgacgcgacgggggacactcccggggccgaggacgacgaggaggacgacgacgaggagcgcgcggcccggcggccgggagcggggccgcccaaggccgagtccggccaggagccggcgtcccgcggccagggccagagccaaggccagagccagggcccgggcagcggggacacgtaccggcccaagcggcccaccacgctcaacctctttccgcaggtgccgcggtctcaggacacactgaataataattctctgggcaaaaagcacagttggcaggatcgggtgtctcgatcatcctcacccctgaagacaggggagcagacaccaccgcatgaacacatctgcctgagcgatgagctgcccccccagagcggccccgcccccaccacagatcgaggcacctccaccgacagcccttgccgccgcagcacagccacccagatggcacctccgggtggtccccctgctgccccgcctgggggtcggggccactcgcatcgagaccgaatccactaccaggccgatgtgcgactagaggccactgaggagatctacctgaccccagtgcagaggcccccagacgctgcagagcccacctccgccttcctgccgcccactgagagccggatgtcagtcagctccgatccagaccctgccgcctacccctccacggcagggcggccgcacccctccatcagtgaagaggaagagggcttcgactgcctgtcgtccccagagcgggctgagcccccaggcggagggtggcgggggagcctgggggagccgccgccacctccacgggcctctctgagctcggacaccagcgccctgtcctatgactctgtcaagtacacgctggtggtagatgagcatgcacagctggagctggtgagcctgcggccgtgcttcggagactacagtgacgagagtgactctgccaccgtctatgacaactgtgcctccgtctcctcgccctatgagtcggccatcggagaggaatatgaggaggccccgcggccccagccccctgcctgcctctccgaggactccacgcctgatgaacccgacgtccatttctccaagaaattcctgaacgtcttcatgagtggccgctcccgctcctccagtgctgagtccttcgggctgttctcctgcatcatcaacggggaggagcaggagcagacccaccgggccatattcaggtttgtgcctcgacacgaagacgaacttgagctggaagtggatgaccctctgctagtggagctccaggctgaagactactggtacgaggcctacaacatgcgcactggtgcccggggtgtctttcctgcctattacgccatcgaggtcaccaaggagcccgagcacatggcagccctggccaaaaacagtgactgggtggaccagttccgggtgaagttcctgggctcagtccaggttccctatcacaagggcaatgacgtcctctgtgctgctatgcaaaagattgccaccacccgccggctcaccgtgcactttaacccgccctccagctgtgtcctggagatcagcgtgcggggtgtgaagataggcgtcaaggccgatgactcccaggaggccaaggggaataaatgtagccactttttccagttaaaaaacatctctttctgcggatatcatccaaagaacaacaagtactttgggttcatcaccaagcaccccgccgaccaccggtttgcctgccacgtctttgtgtctgaagactccaccaaagccctggcagagtccgtggggagagcattccagcagttctacaagcagtttgtggagtacacctgccccacagaagatatctacctggagtagctgtgcagccccgccctctgcgtcccccagccctcaggccagtgccaggacagctggctgctgacaggatgtggcactgcttgaggaggggcacctgccaccgccagaggacaaggaagtgggggccgctggcccagggtaggggagggtggggcaatggggagaggcaaatgcagtttattgtaatatatgggattagattcatctatggagggcagagtgggctgcctggggattgggagggacagggcttggggagcaggtctctggcagagaaggatgtccgttccaggagcacacggccctgccccatcctgggccttacctcccctgccagggctcgggcgctgtggctcctgccttgatgaagcccgtgtcctgccttgatgaagcctgtgccacctgcaagtgcccgccctgcccctgccccaacccccaccgaagagccctgagctcaggctgagcccagccacctcccaaggactttccagtgaggaaatggcaacacgtggaggtgaagtccctgttctcagctccgtcatctgcggggcttctgggtggctcctgccactgacctcaccggcatgctggcctgtggcaggcctaggacctcaggcggggaggaggagctgccgcaaggccctgtcccagcagaagagggaggcttcctgactgacacaggccagccccatcttggtcctgtcaccctggccccaactattaaagtgccatttcctgtctgga

SEQ ID NO: 154883 - DNA, 3381 bp, Homo sapiens
  Payload ID: 10453
  Gene Symbol: MAPK8IP2
  Gene Name: mitogen-activated protein kinase 8 interacting protein 2
  Uniprot ID: Q13387
  ENST ID: ENST00000329492
  CDS Start-End: 135-2609
ggagtccgggcgaggtgcgcggggcggacgccgcagggcgtgtcacgaggtgagcggggcgggccgagcgccggcgcggggcgcggcgaggctcccgcaccccccgccgcagtcgcgggcctctcccggagaagatggcggatcgcgcggagatgttttctctctccaccttccactcgctgtcgccgccgggctgcaggcctccccaggacataagcctggaagaatttgacgacgaagatctgtctgagatcactgatgactgtggcctgggcctcagctacgactcagaccactgtgagaaggacagcctctccctggggcgctcggagcagccgcaccccatctgctccttccaggatgacttccaggagtttgagatgatcgatgacaatgaagaggaggacgatgaggacgaggaagaggaggaggaggaggaggagggagatggggaaggccaggagggaggagaccctggctcagaggcacctgcccccgggccccttatcccctccccttccgtggaggagccccacaagcaccggcccaccaccctccgtctgaccacactgggggcccaggactccctaaacaacaacggaggctttgacctggtgcgtccggcctcctggcaggagacagcgctatgctcacccgccccggaggccctcagagagctcccgggccccctccctgccacggacaccgggcccggcggggcgcagtcgccagtgcgcccgggttgcgactgcgaagggaaccggcctgcggaaccccctgcgccaggggggacttcgccctcctcagatcccggcatcgaggctgacctgagaagccgctcgagcggcggccgcgggggacgtcgcagcagccaggagctgtcctcgcccggctccgactcggaggacgcgggcggcgcgcgcctggggcgcatgatctcgtccatctcggagacggagctggagctgagcagcgatggcggaagcagcagcagcggccgctcctcgcacctcaccaactccatcgaggaggcctcgtcgcccgcctcggagccggagcccccgcgcgaacccccgcgccgccccgccttcctgcccgtgggccccgacgacaccaacagcgagtacgagtcggggtcggagtcggagccggacctcagcgaggacgcggactcgccctggctgctcagcaacctggtgagccgcatgatctccgagggctcctcgcccatccgctgccccggccagtgcctgtctcctgcgccgcgcccgcccggggagcccgtgtcgccggccggcggggccgcccaggactcccaggaccccgaggcggccgcggggcccggcggcgtggagctggtggacatggagacgctgtgcgcgccgccgccgcccgcgcccgccgcgcctcgacccggccccgcgcagcccgggccctgcctattcctcagcaaccccacgcgtgacaccatcacgccgctgtgggccgcgcccggccgcgccgcccgcccgggacgagcctgctccgccgcctgctccgaggaggaggacgaagaggacgacgaggaagaggaggatgccgaggacagtgcggggtcccccgggggcaggggcacgggcccctcggcgccgcgggacgcgtcgctggtgtacgacgcggtcaagtacacgctggtggtggatgagcacacgcagctggagctggtgagcctgcggcgctgtgctgggctgggccacgacagcgaagaggacagcggcggggaggccagcgaggaggaggcgggcgcggcgctgctaggcggcggtcaggtctcgggggacacctcgccggacagccctgacctcactttctccaagaagttcctcaatgtcttcgtcaacagcacatctcggtcctccagcaccgagtcctttggccttttctcctgtctggtcaacggcgaggagcgagagcagactcaccgggctgtgttcaggttcatcccgcggcatccagacgagctggagctggatgtggatgaccctgtgttggtggaggccgaggaggacgacttctggttccgtggcttcaacatgcgcacgggggagcgcggtgtgtttcctgccttctacgcccatgcggtgcccggccctgccaaggacctgctggggagtaagcggagcccctgctgggtggagcgctttgacgtgcagttcctgggctccgtggaggtgccctgccaccagggcaacggcatcctgtgtgcagccatgcagaagattgccactgcccggaaactgaccgtccacctgcgccctcctgcctcctgtgacctcgagatctctcttcggggggtcaagctgagtctgagcggaggagggcccgagttccagcgctgcagccatttcttccagatgaagaacatctccttctgcggctgccatccccgcaacagctgctatttcggcttcatcaccaaacaccccctgctgagccgcttcgcctgccacgtctttgtctcccaggagtccatgaggccggtggcgcagagtgtgggccgcgccttcctggagtactaccaagagcacctggcgtacgcctgccccacggaggacatctacctggagtagcctgcccaccgctctgtctcctggccgtctgctccaggcgcagctggggctgaggatgtctcaagaggccaccatggctttggcaaggactggattggggggacatgggaccttacgcttgtgggggtctgcgggctgggaactctcgtcctcggtccccagggcgcagctgttggggctgcgggggagtggagcccccgtgcccctgcttttcctcagatccgttctttctctgtgttgtcctcctccttcccttcccagtctcccttttctctctcctggtgtctctgcccctctctgtgcctgcaaaccttatcctctattcttcactttggggtcagaacttcgggggtgtggaggaggtgcggctctagggacaggtaatgtcggcttccaagtgatgccctcctgccactcccctgcgatttataagggaattttaatttttatagtgaatctcaagggatcatcccatccttgaccacagggacaagaggggccccctcgccccagccccaccccacatggagctcagggggaagcagggaggggttcccaaaagagccctgcggaggctaggagtggttcttgatgctcacctgaagcccctagacgctgctaggagggggggccctcctgggcccccaatacccctccgcttgccgctgctagcgcacccctgcagtccagcgtgcatccaccccacgcacgccccgtgctgtgttcctgggccctgcccatggcctcaataaactctctgcttggtgtgaca

SEQ ID NO: 154884 - DNA, 5661 bp, Homo sapiens
  Payload ID: 10454
  Gene Symbol: MAPK8IP3
  Gene Name: mitogen-activated protein kinase 8 interacting protein 3
  Uniprot ID: Q9UPT6
  ENST ID: ENST00000250894
  CDS Start-End: 158-4168
agtgacgggcgcagcctcggcagcggcggcggcggagccctgaggcgacagcagctgcgggaggcgacgggctgcggcctgcggaacctgaggcagctggggagggccgggcgcgccggccggatagcgagccgcgctggcggcggcggtggccgcgatgatggagatccagatggacgagggcggcggcgtggtggtgtaccaggacgactactgctccggctcggtgatgtcggagcgggtgtcgggcctggcgggctccatctaccgcgagttcgagcgcctcatccactgctacgacgaggaggtggtcaaggagctcatgccgctggtggtgaacgtgctggagaacctagactcggtgctcagcgagaaccaggagcacgaggtggagctggagctgctgcgcgaggacaacgagcagctgctcacccagtacgagcgtgagaaggcgctgcgcaggcaggcggaggagaaattcattgagtttgaagatgctctggaacaagagaagaaagagctgcaaatccaggtggagcactacgagttccagacgcgccagctggagctgaaggccaagaactatgccgatcagatttcccggttggaggagcgggagtcggagatgaagaaggagtacaatgccctgcaccagcggcacacagagatgatacagacctacgtggagcacattgagaggtccaagatgcagcaggtcggaggaaacagccagaccgagagcagcctgccggggcggaggaaggagcgccccacctccctgaacgtgttccccctggctgacggcacggtacgtgcacagatcgggggcaagctcgtgcctgcgggggaccactggcacctgagtgacctcggccagctgcagtccagctccagctaccagtgtccacaggatgaaatgtccgagtcaggccagtcctcggcggccgccacacccagcaccacaggcaccaagtccaacacgcccacatcctccgtgccctcggccgccgtcacacccctcaacgagagcctgcagcccctgggggactatggcgtgggctccaagaacagcaagcgtgcccgggagaagcgcgacagccgcaacatggaagtacaggtcacccaggagatgcgcaacgtcagtataggcatgggcagcagtgacgagtggtctgatgttcaagacattattgactccacgccagagctggacatgtgtccagagacccgcctggaccgcacaggaagcagcccaacccagggcatcgtgaacaaagctttcggcatcaacaccgactccctgtaccatgagctgtcgacggcagggtctgaggtcatcggggatgtggacgaaggggccgacctcctaggggagttctcagtgcgcgatgatttctttggaatgggcaaagaagtggggaatctgctactggaaaactcacagcttctggaaaccaaaaacgccttgaatgtggtgaagaatgacctgattgccaaggtcgaccagctgtccggggagcaggaggtgctgaggggcgagttggaggctgctaagcaggccaaagtcaagctggaaaaccgtatcaaggagctggaagaggaactgaaaagagtgaagtccgaggccatcatcgcccgccgtgaacccaaagaagaggcggaggatgtaagcagctatctctgtacagaatcggacaaaatccccatggcccagcgccgccgcttcacgcgggtggagatggcccgtgtgctcatggagcggaaccagtacaaggagcggctgatggagctgcaggaggctgtgcggtggactgagatgatcagagcgtcccgagagcacccatccgtccaggagaagaagaagtcgaccatctggcagttcttcagccgcctcttcagctcttcctccagcccccctccggccaagcgcccctatccctcggtgaacatccactacaagtcacccaccactgccggcttcagccagcgccgcaaccatgccatgtgcccgatctcggcaggcagccggcccctggaattcttccctgacgacgactgcacgtcctccgcccgtcgagagcagaagcgcgagcagtaccgccaggtgcgtgagcacgtgcgtaacgacgacggccgtctgcaggcctgcggctggagcctgcccgccaagtacaagcagctgagtcccaacgggggccaggaggacacgcggatgaagaacgtgccggtgccggtgtactgccgccctctggtggagaaggaccccaccatgaagctgtggtgtgccgcgggcgtcaacctgagcgggtggaggcccaatgaggacgacgctgggaatggagtcaagccagcgccaggccgcgatcccctgacctgcgaccgcgaaggagacggcgagcccaagagcgcccacacgtctcccgagaagaagaaggccaaggagctccctgaaatggacgccacctccagccgggtgtggatcctgaccagcaccctgaccaccagcaaggtggtgatcatcgacgccaaccagccgggcacggtggtggaccagttcaccgtctgcaacgcgcacgtgctgtgcatctccagcatccccgcggccagcgacagcgactaccctcccggggagatgttcctggacagcgacgtgaacccagaggacccgggcgcagatggcgtgctggccggtatcaccctggtgggctgtgccacccgctgcaacgtgccgcggagcaactgctcctcccgaggggacaccccagtgctagacaaggggcagggggaggtggccaccatcgccaacgggaaggtcaacccgtcccagtccacagaggaggccacagaggccacggaggtgccagaccctgggcccagcgagccagagacagccacattgcggcccgggcctctcacagagcacgtcttcactgacccagccccgaccccgtcctctggcccccagcctggcagcgagaacgggccagagcctgacagcagcagcacacggccagagccagagcccagcggggaccccacgggagcaggcagcagtgctgcacccaccatgtggctgggagcccagaacggctggctctatgtgcactcggctgtggccaactggaagaagtgcctgcactccatcaagctgaaggattctgtgctgagcctggtgcatgtcaaaggccgtgtgctggtggctctggcggacgggaccctggccatcttccaccgtggtgaagatggccagtgggatctgagcaactatcacctaatggacctgggccacccgcaccactccatccgctgcatggctgttgtgtacgaccgcgtgtggtgtggctacaagaacaaggtgcacgtcatccagcccaagaccatgcagatagagaagtcatttgacgcccacccgcggcgggagagccaggtgcggcagctggcgtggatcggcgatggcgtatgggtgtccatccgcctggactccaccctgaggctctaccatgcacacacgcaccagcatctacaggacgtggacattgagccctacgtcagcaagatgctaggcactggcaagctgggtttctccttcgtacgcatcacggccctgcttgtcgcgggcagccggctctgggtgggcaccggcaacggagtggtcatctccatccccctgacagagactgtggtcctgcaccgaggccagctcctggggctccgagccaataagacatcccccacctctggggagggcgcccgtcccgggggcatcatccacgtgtatggcgatgacagcagtgacagggcggccagcagcttcatcccctactgctccatggcccaggcccagctatgcttccatgggcaccgcgatgccgtgaagttctttgtctcggtgccagggaacgtgctggccaccctgaatgggagtgtgctggacagcccagccgagggccctgggccagctgcccctgcctcggaggtcgagggccagaagctgcggaacgtgctggtgctgagcggcggggagggctacatcgacttccgcattggagacggagaggacgacgagacggaggagggcgcaggggacatgagccaggtgaagcccgtgctgtccaaggcagagcgcagtcacatcatcgtgtggcaggtgtcctacacccccgagtgaagctgctgccctgcctggcccgacctgtacataggacccccgaccacctgacccccgcccggcccgcggggtagccagccaggcgccgccgcccctcttctaacctctcaacctgcagctttcacctgagtctggcccctccagcgggcagggagtgcggggatgcggatcagctgggaggaggaggggaggggaacttccacccgaggggaagatgctctcgggacagtttcccgggcagctcctggccagcttccagcccagagtcctcaagtccagggcaccttgggcccagcgcaggcagaatccgaggtggtcctggctctaccctgggcctcctactccccagcacccctggaggaggcaggggctccccgccgccgaggctgcctgccctgggcccacctctgcatgctgctcatggggccaccctgcctcctgggccctcactctgcctaggggagctgggccaggcactagcctttgcccagggaggtgggcctcaggctgcccaggtgcctgcaccccagccggccttctctggggcctccccgtcgtcaagcctctatcctgtctgtccccaccccagctgtcccctgcccagggagctggcataaaagcacgaggcccggctccctggggcagctgcttgagaacagagactgctaccccatcctgcccatgcaggcaggctcttgccagccccgttctgacccgtgtccccccaggctctgcctgggcagaagactcaccttggaggagtgggccctggagtcctgtccctcccagaagcccccagggtgggatttctcaggctgccagggcaggcccaggcctcaggaagaaggggaggcccctggcctctccgggatcagtcctaggacacaggctcagcctcaggttgatgggggatgatgtgctcccggggcctgcctcctgcacggggctccacggagcccagctcccagacacgctactaagtgcctagggttgcccgctgtggcctgcttccagggagcaacagagaggccaccaagcagaggcccgtggggctgaggatggagccgcccccagccgactccaagcccgcagagggcagacgccaccctggactgctctccctgcccagctgggcctctctggcctattcctaccttccaggcccactgcactcctgtctgggaggcccttatgagggcagcccagcccccgcacccacccccaaccagagaagcacagatcttggggagctgccccacaagccccgctggccaccgagggctgcagccgctgcgctgccggcttctccccaccaccctgccacctccactgtgatgtatgtccgctccctcgtctgttcccccaggatctcgaagtgactccgggctgagcagtggggcggctgggggaggggtgacgattctcctcaggctttggccctgcaagcaaacccacatatctgctctgtatgtaataaatgtcttaacgtcgta

SEQ ID NO: 154885 - DNA, 4456 bp, Homo sapiens
  Payload ID: 10454
  Gene Symbol: MAPK8IP3
  Gene Name: mitogen-activated protein kinase 8 interacting protein 3
  ENST ID: ENST00000356010
  CDS Start-End: 148-4140
gcagcctcggcagcggcggcggcggagccctgaggcgacagcagctgcgggaggcgacgggctgcggcctgcggaacctgaggcagctggggagggccgggcgcgccggccggatagcgagccgcgctggcggcggcggtggccgcgatgatggagatccagatggacgagggcggcggcgtggtggtgtaccaggacgactactgctccggctcggtgatgtcggagcgggtgtcgggcctggcgggctccatctaccgcgagttcgagcgcctcatccactgctacgacgaggaggtggtcaaggagctcatgccgctggtggtgaacgtgctggagaacctagactcggtgctcagcgagaaccaggagcacgaggtggagctggagctgctgcgcgaggacaacgagcagctgctcacccagtacgagcgtgagaaggcgctgcgcaggcaggcggaggagaaattcattgagtttgaagatgctctggaacaagagaagaaagagctgcaaatccaggtggagcactacgagttccagacgcgccagctggagctgaaggccaagaactatgccgatcagatttcccggttggaggagcgggagtcggagatgaagaaggagtacaatgccctgcaccagcggcacacagagatgatacagacctacgtggagcacattgagaggtccaagatgcagcaggtcggaggaaacagccagaccgagagcagcctgccggggcggaggaaggagcgccccacctccctgaacgtgttccccctggctgacggcacggtacgtgcacagatcgggggcaagctcgtgcctgcgggggaccactggcacctgagtgacctcggccagctgcagtccagctccagctaccagtgtccacaggatgaaatgtccgagtcaggccagtcctcggcggccgccacacccagcaccacaggcaccaagtccaacacgcccacatcctccgtgccctcggccgccgtcacacccctcaacgagagcctgcagcccctgggggactatggcgtgggctccaagaacagcaagcgtgcccgggagaagcgcgacagccgcaacatggaagtacaggtcacccaggagatgcgcaacgtcagtataggcatgggcagcagtgacgagtggtctgatgttcaagacattattgactccacgccagagctggacatgtgtccagagacccgcctggaccgcacaggaagcagcccaacccagggcatcgtgaacaaagctttcggcatcaacaccgactccctgtaccatgagctgtcgacggcagggtctgaggtcatcggggatgtggacgaaggggccgacctcctaggggagttctcaggaatgggcaaagaagtggggaatctgctactggaaaactcacagcttctggaaaccaaaaacgccttgaatgtggtgaagaatgacctgattgccaaggtcgaccagctgtccggggagcaggaggtgctgaggggcgagttggaggctgctaagcaggccaaagtcaagctggaaaaccgtatcaaggagctggaagaggaactgaaaagagtgaagtccgaggccatcatcgcccgccgtgaacccaaagaagaggcggaggatgtaagcagctatctctgtacagaatcggacaaaatccccatggcccagcgccgccgcttcacgcgggtggagatggcccgtgtgctcatggagcggaaccagtacaaggagcggctgatggagctgcaggaggctgtgcggtggactgagatgatcagagcgtcccgagagcacccatccgtccaggagaagaagaagtcgaccatctggcagttcttcagccgcctcttcagctcttcctccagcccccctccggccaagcgcccctatccctcggtgaacatccactacaagtcacccaccactgccggcttcagccagcgccgcaaccatgccatgtgcccgatctcggcaggcagccggcccctggaattcttccctgacgacgactgcacgtcctccgcccgtcgagagcagaagcgcgagcagtaccgccaggtgcgtgagcacgtgcgtaacgacgacggccgtctgcaggcctgcggctggagcctgcccgccaagtacaagcagctgagtcccaacgggggccaggaggacacgcggatgaagaacgtgccggtgccggtgtactgccgccctctggtggagaaggaccccaccatgaagctgtggtgtgccgcgggcgtcaacctgagcgggtggaggcccaatgaggacgacgctgggaatggagtcaagccagcgccaggccgcgatcccctgacctgcgaccgcgaaggagacggcgagcccaagagcgcccacacgtctcccgagaagaagaaggccaaggagctccctgaaatggacgccacctccagccgggtgtggatcctgaccagcaccctgaccaccagcaaggtggtgatcatcgacgccaaccagccgggcacggtggtggaccagttcaccgtctgcaacgcgcacgtgctgtgcatctccagcatccccgcggccagcgacagcgactaccctcccggggagatgttcctggacagcgacgtgaacccagaggacccgggcgcagatggcgtgctggccggtatcaccctggtgggctgtgccacccgctgcaacgtgccgcggagcaactgctcctcccgaggggacaccccagtgctagacaaggggcagggggaggtggccaccatcgccaacgggaaggtcaacccgtcccagtccacagaggaggccacagaggccacggaggtgccagaccctgggcccagcgagccagagacagccacattgcggcccgggcctctcacagagcacgtcttcactgacccagccccgaccccgtcctctggcccccagcctggcagcgagaacgggccagagcctgacagcagcagcacacggccagagccagagcccagcggggaccccacgggagcaggcagcagtgctgcacccaccatgtggctgggagcccagaacggctggctctatgtgcactcggctgtggccaactggaagaagtgcctgcactccatcaagctgaaggattctgtgctgagcctggtgcatgtcaaaggccgtgtgctggtggctctggcggacgggaccctggccatcttccaccgtggtgaagatggccagtgggatctgagcaactatcacctaatggacctgggccacccgcaccactccatccgctgcatggctgttgtgtacgaccgcgtgtggtgtggctacaagaacaaggtgcacgtcatccagcccaagaccatgcagatagagaagtcatttgacgcccacccgcggcgggagagccaggtgcggcagctggcgtggatcggcgatggcgtatgggtgtccatccgcctggactccaccctgaggctctaccatgcacacacgcaccagcatctacaggacgtggacattgagccctacgtcagcaagatgctaggcactggcaagctgggtttctccttcgtacgcatcacggccctgcttgtcgcgggcagccggctctgggtgggcaccggcaacggagtggtcatctccatccccctgacagagactgtggtcctgcaccgaggccagctcctggggctccgagccaataagacatcccccacctctggggagggcgcccgtcccgggggcatcatccacgtgtatggcgatgacagcagtgacagggcggccagcagcttcatcccctactgctccatggcccaggcccagctatgcttccatgggcaccgcgatgccgtgaagttctttgtctcggtgccagggaacgtgctggccaccctgaatgggagtgtgctggacagcccagccgagggccctgggccagctgcccctgcctcggaggtcgagggccagaagctgcggaacgtgctggtgctgagcggcggggagggctacatcgacttccgcattggagacggagaggacgacgagacggaggagggcgcaggggacatgagccaggtgaagcccgtgctgtccaaggcagagcgcagtcacatcatcgtgtggcaggtgtcctacacccccgagtgaagctgctgccctgcctggcccgacctgtacataggacccccgaccacctgacccccgcccggcccgcggggtagccagccaggcgccgccgcccctcttctaacctctcaacctgcagctttcacctgagtctggcccctccagcgggcagggagtgcggggatgcggatcagctgggaggaggaggggaggggaacttccacccgaggggaagatgctctcgggacagtttcccgggcagctcctggccagcttccagcccagagtcctcaagtccagggcaccttgggcccagcgcaggcagaatccgaggtgg

SEQ ID NO: 154886 - DNA, 551 bp, Homo sapiens
  Payload ID: 10454
  Gene Symbol: MAPK8IP3
  Gene Name: mitogen-activated protein kinase 8 interacting protein 3
  ENST ID: ENST00000567849
  CDS Start-End: 1-208
gcggccgccacacccagcaccacaggcaccaagtccaacacgcccacatcctccgtgccctcggccgccgtcacacccctcaacgagagcctgcagcccctgggggactatggcgtgggctccaagaacagcaagcgtgcccgggagaagcgcgacagccgcaacatggaagtacaggtcacccaggagatgcgcaacgtcagtataggcatgggcagcagtgacgagtggtctgatgttcaagacattattgactccacgccagagctggacatgtgtccagagacccgcctggaccgcacaggaagcagcccaacccagggcatcgtgaacaaagctttcggcatcaacaccgactccctgtaccatgagctgtcgacggcagggtctgaggtcatcggggatgtggacgaaggggccgacctcctaggggagttctcaggaatgggcaaagaagtggggaatctgctactggaaaactcacagcttctggaaaccaaggcggaagtgcaggcgcccctggcaaggccccttcacgtacctgtatgccg

SEQ ID NO: 154887 - DNA, 5626 bp, Homo sapiens
  Payload ID: 10454
  Gene Symbol: MAPK8IP3
  Gene Name: mitogen-activated protein kinase 8 interacting protein 3
  ENST ID: ENST00000610761
  CDS Start-End: 121-4134
ccctgaggcgacagcagctgcgggaggcgacgggctgcggcctgcggaacctgaggcagctggggagggccgggcgcgccggccggatagcgagccgcgctggcggcggcggtggccgcgatgatggagatccagatggacgagggcggcggcgtggtggtgtaccaggacgactactgctccggctcggtgatgtcggagcgggtgtcgggcctggcgggctccatctaccgcgagttcgagcgcctcatccactgctacgacgaggaggtggtcaaggagctcatgccgctggtggtgaacgtgctggagaacctagactcggtgctcagcgagaaccaggagcacgaggtggagctggagctgctgcgcgaggacaacgagcagctgctcacccagtacgagcgtgagaaggcgctgcgcaggcaggcggaggagaaattcattgagtttgaagatgctctggaacaagagaagaaagagctgcaaatccaggtggagcactacgagttccagacgcgccagctggagctgaaggccaagaactatgccgatcagatttcccggttggaggagcgggagtcggagatgaagaaggagtacaatgccctgcaccagcggcacacagagatgatacagacctacgtggagcacattgagaggtccaagatgcagcaggtcggaggaaacagccagaccgagagcagcctgccggggcggagcaggaaggagcgccccacctccctgaacgtgttccccctggctgacggcacggtacgtgcacagatcgggggcaagctcgtgcctgcgggggaccactggcacctgagtgacctcggccagctgcagtccagctccagctaccagtgtccacaggatgaaatgtccgagtcaggccagtcctcggcggccgccacacccagcaccacaggcaccaagtccaacacgcccacatcctccgtgccctcggccgccgtcacacccctcaacgagagcctgcagcccctgggggactatggcgtgggctccaagaacagcaagcgtgcccgggagaagcgcgacagccgcaacatggaagtacaggtcacccaggagatgcgcaacgtcagtataggcatgggcagcagtgacgagtggtctgatgttcaagacattattgactccacgccagagctggacatgtgtccagagacccgcctggaccgcacaggaagcagcccaacccagggcatcgtgaacaaagctttcggcatcaacaccgactccctgtaccatgagctgtcgacggcagggtctgaggtcatcggggatgtggacgaaggggccgacctcctaggggagttctcagtgcgcgatgatttctttggaatgggcaaagaagtggggaatctgctactggaaaactcacagcttctggaaaccaaaaacgccttgaatgtggtgaagaatgacctgattgccaaggtcgaccagctgtccggggagcaggaggtgctgaggggcgagttggaggctgctaagcaggccaaagtcaagctggaaaaccgtatcaaggagctggaagaggaactgaaaagagtgaagtccgaggccatcatcgcccgccgtgaacccaaagaagaggcggaggatgtaagcagctatctctgtacagaatcggacaaaatccccatggcccagcgccgccgcttcacgcgggtggagatggcccgtgtgctcatggagcggaaccagtacaaggagcggctgatggagctgcaggaggctgtgcggtggactgagatgatcagagcgtcccgagagcacccatccgtccaggagaagaagaagtcgaccatctggcagttcttcagccgcctcttcagctcttcctccagcccccctccggccaagcgcccctatccctcggtgaacatccactacaagtcacccaccactgccggcttcagccagcgccgcaaccatgccatgtgcccgatctcggcaggcagccggcccctggaattcttccctgacgacgactgcacgtcctccgcccgtcgagagcagaagcgcgagcagtaccgccaggtgcgtgagcacgtgcgtaacgacgacggccgtctgcaggcctgcggctggagcctgcccgccaagtacaagcagctgagtcccaacgggggccaggaggacacgcggatgaagaacgtgccggtgccggtgtactgccgccctctggtggagaaggaccccaccatgaagctgtggtgtgccgcgggcgtcaacctgagcgggtggaggcccaatgaggacgacgctgggaatggagtcaagccagcgccaggccgcgatcccctgacctgcgaccgcgaaggagacggcgagcccaagagcgcccacacgtctcccgagaagaagaaggccaaggagctccctgaaatggacgccacctccagccgggtgtggatcctgaccagcaccctgaccaccagcaaggtggtgatcatcgacgccaaccagccgggcacggtggtggaccagttcaccgtctgcaacgcgcacgtgctgtgcatctccagcatccccgcggccagcgacagcgactaccctcccggggagatgttcctggacagcgacgtgaacccagaggacccgggcgcagatggcgtgctggccggtatcaccctggtgggctgtgccacccgctgcaacgtgccgcggagcaactgctcctcccgaggggacaccccagtgctagacaaggggcagggggaggtggccaccatcgccaacgggaaggtcaacccgtcccagtccacagaggaggccacagaggccacggaggtgccagaccctgggcccagcgagccagagacagccacattgcggcccgggcctctcacagagcacgtcttcactgacccagccccgaccccgtcctctggcccccagcctggcagcgagaacgggccagagcctgacagcagcagcacacggccagagccagagcccagcggggaccccacgggagcaggcagcagtgctgcacccaccatgtggctgggagcccagaacggctggctctatgtgcactcggctgtggccaactggaagaagtgcctgcactccatcaagctgaaggattctgtgctgagcctggtgcatgtcaaaggccgtgtgctggtggctctggcggacgggaccctggccatcttccaccgtggtgaagatggccagtgggatctgagcaactatcacctaatggacctgggccacccgcaccactccatccgctgcatggctgttgtgtacgaccgcgtgtggtgtggctacaagaacaaggtgcacgtcatccagcccaagaccatgcagatagagaagtcatttgacgcccacccgcggcgggagagccaggtgcggcagctggcgtggatcggcgatggcgtatgggtgtccatccgcctggactccaccctgaggctctaccatgcacacacgcaccagcatctacaggacgtggacattgagccctacgtcagcaagatgctaggcactggcaagctgggtttctccttcgtacgcatcacggccctgcttgtcgcgggcagccggctctgggtgggcaccggcaacggagtggtcatctccatccccctgacagagactgtggtcctgcaccgaggccagctcctggggctccgagccaataagacatcccccacctctggggagggcgcccgtcccgggggcatcatccacgtgtatggcgatgacagcagtgacagggcggccagcagcttcatcccctactgctccatggcccaggcccagctatgcttccatgggcaccgcgatgccgtgaagttctttgtctcggtgccagggaacgtgctggccaccctgaatgggagtgtgctggacagcccagccgagggccctgggccagctgcccctgcctcggaggtcgagggccagaagctgcggaacgtgctggtgctgagcggcggggagggctacatcgacttccgcattggagacggagaggacgacgagacggaggagggcgcaggggacatgagccaggtgaagcccgtgctgtccaaggcagagcgcagtcacatcatcgtgtggcaggtgtcctacacccccgagtgaagctgctgccctgcctggcccgacctgtacataggacccccgaccacctgacccccgcccggcccgcggggtagccagccaggcgccgccgcccctcttctaacctctcaacctgcagctttcacctgagtctggcccctccagcgggcagggagtgcggggatgcggatcagctgggaggaggaggggaggggaacttccacccgaggggaagatgctctcgggacagtttcccgggcagctcctggccagcttccagcccagagtcctcaagtccagggcaccttgggcccagcgcaggcagaatccgaggtggtcctggctctaccctgggcctcctactccccagcacccctggaggaggcaggggctccccgccgccgaggctgcctgccctgggcccacctctgcatgctgctcatggggccaccctgcctcctgggccctcactctgcctaggggagctgggccaggcactagcctttgcccagggaggtgggcctcaggctgcccaggtgcctgcaccccagccggccttctctggggcctccccgtcgtcaagcctctatcctgtctgtccccaccccagctgtcccctgcccagggagctggcataaaagcacgaggcccggctccctggggcagctgcttgagaacagagactgctaccccatcctgcccatgcaggcaggctcttgccagccccgttctgacccgtgtccccccaggctctgcctgggcagaagactcaccttggaggagtgggccctggagtcctgtccctcccagaagcccccagggtgggatttctcaggctgccagggcaggcccaggcctcaggaagaaggggaggcccctggcctctccgggatcagtcctaggacacaggctcagcctcaggttgatgggggatgatgtgctcccggggcctgcctcctgcacggggctccacggagcccagctcccagacacgctactaagtgcctagggttgcccgctgtggcctgcttccagggagcaacagagaggccaccaagcagaggcccgtggggctgaggatggagccgcccccagccgactccaagcccgcagagggcagacgccaccctggactgctctccctgcccagctgggcctctctggcctattcctaccttccaggcccactgcactcctgtctgggaggcccttatgagggcagcccagcccccgcacccacccccaaccagagaagcacagatcttggggagctgccccacaagccccgctggccaccgagggctgcagccgctgcgctgccggcttctccccaccaccctgccacctccactgtgatgtatgtccgctccctcgtctgttcccccaggatctcgaagtgactccgggctgagcagtggggcggctgggggaggggtgacgattctcctcaggctttggccctgcaagcaaacccacatatctgctctgtatgtaataaatgtcttaacgtcgt

SEQ ID NO: 154888 - DNA, 1509 bp, Homo sapiens
  Payload ID: 10455
  Gene Symbol: MAPK9
  Gene Name: mitogen-activated protein kinase 9
  ENST ID: ENST00000347470
  CDS Start-End: 293-1312
gggtctgtcagaccgggcgccgcggcggcggcagcggcggagaagggagcgggaccggaagggtcgcagcgccccggcgcccctcacacccactgcggcggcggcggcggcggcggcggcggggcggagcggagcggggcgggccggcggcggagccggggccgcggagccaggagtgactagcacgcagcgccgccagtccgcccgcccgccctctccccgtggcgcggcggcggggaggcgagggatctgaaacttgcccacccttcgggatattgcaggacgctgcatcatgagcgacagtaaatgtgacagtcagttttatagtgtgcaagtggcagactcaaccttcactgtcctaaaacgttaccagcagctgaaaccaattggctctggggcccaagggattgtttgtgctgcatttgatacagttcttgggataaatgttgcagtcaagaaactaagccgtccttttcagaaccaaactcatgcaaagagagcttatcgtgaacttgtcctcttaaaatgtgtcaatcataaaaatataattagtttgttaaatgtgtttacaccacaaaaaactctagaagaatttcaagatgtgtatttggttatggaattaatggatgctaacttatgtcaggttattcacatggagctggatcatgaaagaatgtcctaccttctttaccagatgctttgtggtattaaacatctgcattcagctggtataattcatagagatttgaagcctagcaacattgttgtgaaatcagactgcaccctgaagatccttgactttggcctggcccggacagcgtgcactaacttcatgatgaccccttacgtggtgacacggtactaccgggcgcccgaagtcatcctgggtatgggctacaaagagaacgcaagtcaagccagagatctgttatcaaaaatgttagtgattgatcctgacaagcggatctctgtagacgaagctctgcgtcacccatacatcactgtttggtatgaccccgccgaagcagaagccccaccacctcaaatttatgatgcccagttggaagaaagagaacatgcaattgaagaatggaaagagctaatttacaaagaagtcatggattgggaagaaagaagcaagaatggtgttgtaaaagatcagccttcagatgcagcagtaagtagcaacgccactccttctcagtcttcatcgatcaatgacatttcatccatgtccactgagcagacgctggcctcagacacagacagcagtcttgatgcctcgacgggaccccttgaaggctgtcgatgataggttagaaatagcaaacctgtcagcattgaaggaactctcacctccgtgggcctgaaatgcttgggagttgatggaaccaaatagaaaaactccatgttctgcatgtaagaaacacaatgccttgccctactcagacctgataggattgcctgcttagatgataaaatgaggcagaatatgtctgaagaaaaaaa

SEQ ID NO: 154889 - DNA, 4369 bp, Homo sapiens
  Payload ID: 10455
  Gene Symbol: MAPK9
  Gene Name: mitogen-activated protein kinase 9
  Uniprot ID: P45984
  ENST ID: ENST00000343111
  CDS Start-End: 300-1448
ggcgcgagggtctgtcagaccgggcgccgcggcggcggcagcggcggagaagggagcgggaccggaagggtcgcagcgccccggcgcccctcacacccactgcggcggcggcggcggcggcggcggcggggcggagcggagcggggcgggccggcggcggagccggggccgcggagccaggagtgactagcacgcagcgccgccagtccgcccgcccgccctctccccgtggcgcggcggcggggaggcgagggatctgaaacttgcccacccttcgggatattgcaggacgctgcatcatgagcgacagtaaatgtgacagtcagttttatagtgtgcaagtggcagactcaaccttcactgtcctaaaacgttaccagcagctgaaaccaattggctctggggcccaagggattgtttgtgctgcatttgatacagttcttgggataaatgttgcagtcaagaaactaagccgtccttttcagaaccaaactcatgcaaagagagcttatcgtgaacttgtcctcttaaaatgtgtcaatcataaaaatataattagtttgttaaatgtgtttacaccacaaaaaactctagaagaatttcaagatgtgtatttggttatggaattaatggatgctaacttatgtcaggttattcacatggagctggatcatgaaagaatgtcctaccttctttaccagatgctttgtggtattaaacatctgcattcagctggtataattcatagagatttgaagcctagcaacattgttgtgaaatcagactgcaccctgaagatccttgactttggcctggcccggacagcgtgcactaacttcatgatgaccccttacgtggtgacacggtactaccgggcgcccgaagtcatcctgggtatgggctacaaagagaacgtggacatctggtctgtcgggtgcatcatggcagaaatggtcctccataaagtcctgttcccgggaagagactatattgatcagtggaataaagttattgagcagctgggaacaccatcagcagagttcatgaagaaacttcagccaactgtgaggaattatgtcgaaaacagaccaaagtatcctggaatcaaatttgaagaactctttccagattggatattcccatcagaatctgagcgagacaaaataaaaacaagtcaagccagagatctgttatcaaaaatgttagtgattgatcctgacaagcggatctctgtagacgaagctctgcgtcacccatacatcactgtttggtatgaccccgccgaagcagaagccccaccacctcaaatttatgatgcccagttggaagaaagagaacatgcaattgaagaatggaaagagctaatttacaaagaagtcatggattgggaagaaagaagcaagaatggtgttgtaaaagatcagccttcagcacagatgcagcagtaagtagcaacgccactccttctcagtcttcatcgatcaatgacatttcatccatgtccactgagcagacgctggcctcagacacagacagcagtcttgatgcctcgacgggaccccttgaaggctgtcgatgataggttagaaatagcaaacctgtcagcattgaaggaactctcacctccgtgggcctgaaatgcttgggagttgatggaaccaaatagaaaaactccatgttctgcatgtaagaaacacaatgccttgccctactcagacctgataggattgcctgcttagatgataaaatgaggcagaatatgtctgaagaaaaaaattgcaagccacacttctagagattttgttcaagatcatttcaggtgagcagttagagtaggtgaatttgtttcaaattgtactagtgacagtttctcatcatctgtaactgttgagatgtatgtgcatgtgaccacaaatgcttgcttggacttgcccatctagcactttggaaatcagtatttaaatgccaaataatcttccaggtagtgctgcttctgaagttatctcttaatcctcttaagtaatttggtgtctgtccagaaaaagtcgatttatgtgtattaattggccatcatgatgttatcatatcttattcccttttatgctatgatttattctatcttttgtatttcagaagacatataattaaatctatttaataaataaaaatatatagcttttcttagatttgtgatgtttggggctgagaattatcacggctaaaaccaagacacttatgtggacatcttgttttctttaaactgtcttgtctgggatgattgtacattcagctttactgcacgatacaattttaagttttgcttagtgctgcttgaaatcctagctaccttatctcttttcttcttggtcttctagacttcttatgaatttaaaatgctacctagaacttcaccttctttattaggtgcgtaacactccatcttaattaaatatgatggcagataggttcctgcatccatggcctaacgttggagtggaattttacaaaatgctcactagagatcactgcagtcatttcctaagtgcttcctttgccacagactggcctgggtcctttatttaccttccctcattcactttccctcggccaataccacgttcttgattttctttcttcactggaagaaagcagataaactcctctttggtctgttttcagaggccaggctgattcagatgcctgttgctattgttgctctccattgttgggaggcattccttttcacaagaatgttctgggaaactcttcagaggacgtgaaggaaataccctgaagagtcatgattaactattgactattttctgatttaaaactgctcacctgaaattgatacttttagactttacgatcagtaaattattcagaattcatgaagatgctgagtatgttaagtgtcactgcaggaacggagctgtggtgatcacgttttgcctgcctgtgcccatgtctcttcccttgagcttattctgttgctgattcatatcttgtgttcaattattttggaagcttttcagtcgacattctgtagagtgtgttctgaggaggaactgtgataagaaagtttattataaatattatgtaaaatatatggctctctctgcaccagttatatcttattggttggtcatatcactggaaactggaacctttgattagcaaaattaatattgaaataagaaatagttcttttatattgtgtcatttggacactttcaagtacaaaatggtaataataacttggattgaggcggaaacacctattttatggctatctatctaaacatcttaaaatggccttctctgtaatacactttcttttaaaagacttcactaaatctatctttaaaaggaaaaacaaaagggagaggttgaaaatgcgcgagctgccctgcactgtgtgatgctccctccccgggagacgtggacgggggacgaggcacccgcagacgcccttctgctcactcgctcctctgtgcattcagcgagccacttgccacagatggagcccgtgacggtgtggagggtttcctggaaaggccatcttccaccaggtagaggcgagcgtgcctaggacaggccacagggctccacagaaatacctcaccccagcttcagggttctctctcctgagcctagatttgccagggtcttggtgccacgcaaatggtttcaaactgatctctatggataaatgctgatgttggttaaagaactgaaaaatgtgctcaactgtttcatcttttctattttatttttgtaatttatattgtacacaacccaggaagtaactattttggacatgtatttttataaaccaggtaatttactattatcctggaatttagactaggtttgtttcatttgttgacttagtttccagccaagaaggaaacgactgtctcccccatgtccaggtctcagtttcaagggcagagtccagagagcagacagagttctgtgagagcaggagagcagtctggaaaccctggctgtgcataccgtgtcagccgtgggcctggagatgggagcaggtgagacgcagagccccagtactgagaggaggaagccctcttacagggccccttgcccaccccaagtccgtgtctgaaacacggagcgggtgctgcttcaacccgcatttaatgctgtgtaagtagcgataaccacgtacgagtctgtctggttgatttctaatgtgactcctctggtatttcctcctggtaataaatacaagtgtgacctttcagattgcatatctcaaaagtaacattgctaatgttttataataaaatatattatgtgtgttttggttggtgaaaataatacagactacattttaaaagataaa

SEQ ID NO: 154890 - DNA, 4326 bp, Homo sapiens
  Payload ID: 10455
  Gene Symbol: MAPK9
  Gene Name: mitogen-activated protein kinase 9
  Uniprot ID: P45984
  ENST ID: ENST00000393360
  CDS Start-End: 257-1405
gcggagaagggagcgggaccggaagggtcgcagcgccccggcgcccctcacacccactgcggcggcggcggcggcggcggcggcggggcggagcggagcggggcgggccggcggcggagccggggccgcggagccaggagtgactagcacgcagcgccgccagtccgcccgcccgccctctccccgtggcgcggcggcggggaggcgagggatctgaaacttgcccacccttcgggatattgcaggacgctgcatcatgagcgacagtaaatgtgacagtcagttttatagtgtgcaagtggcagactcaaccttcactgtcctaaaacgttaccagcagctgaaaccaattggctctggggcccaagggattgtttgtgctgcatttgatacagttcttgggataaatgttgcagtcaagaaactaagccgtccttttcagaaccaaactcatgcaaagagagcttatcgtgaacttgtcctcttaaaatgtgtcaatcataaaaatataattagtttgttaaatgtgtttacaccacaaaaaactctagaagaatttcaagatgtgtatttggttatggaattaatggatgctaacttatgtcaggttattcacatggagctggatcatgaaagaatgtcctaccttctttaccagatgctttgtggtattaaacatctgcattcagctggtataattcatagagatttgaagcctagcaacattgttgtgaaatcagactgcaccctgaagatccttgactttggcctggcccggacagcgtgcactaacttcatgatgaccccttacgtggtgacacggtactaccgggcgcccgaagtcatcctgggtatgggctacaaagagaacgttgatatctggtcagtgggttgcatcatgggagagctggtgaaaggttgtgtgatattccaaggcactgaccatattgatcagtggaataaagttattgagcagctgggaacaccatcagcagagttcatgaagaaacttcagccaactgtgaggaattatgtcgaaaacagaccaaagtatcctggaatcaaatttgaagaactctttccagattggatattcccatcagaatctgagcgagacaaaataaaaacaagtcaagccagagatctgttatcaaaaatgttagtgattgatcctgacaagcggatctctgtagacgaagctctgcgtcacccatacatcactgtttggtatgaccccgccgaagcagaagccccaccacctcaaatttatgatgcccagttggaagaaagagaacatgcaattgaagaatggaaagagctaatttacaaagaagtcatggattgggaagaaagaagcaagaatggtgttgtaaaagatcagccttcagcacagatgcagcagtaagtagcaacgccactccttctcagtcttcatcgatcaatgacatttcatccatgtccactgagcagacgctggcctcagacacagacagcagtcttgatgcctcgacgggaccccttgaaggctgtcgatgataggttagaaatagcaaacctgtcagcattgaaggaactctcacctccgtgggcctgaaatgcttgggagttgatggaaccaaatagaaaaactccatgttctgcatgtaagaaacacaatgccttgccctactcagacctgataggattgcctgcttagatgataaaatgaggcagaatatgtctgaagaaaaaaattgcaagccacacttctagagattttgttcaagatcatttcaggtgagcagttagagtaggtgaatttgtttcaaattgtactagtgacagtttctcatcatctgtaactgttgagatgtatgtgcatgtgaccacaaatgcttgcttggacttgcccatctagcactttggaaatcagtatttaaatgccaaataatcttccaggtagtgctgcttctgaagttatctcttaatcctcttaagtaatttggtgtctgtccagaaaaagtcgatttatgtgtattaattggccatcatgatgttatcatatcttattcccttttatgctatgatttattctatcttttgtatttcagaagacatataattaaatctatttaataaataaaaatatatagcttttcttagatttgtgatgtttggggctgagaattatcacggctaaaaccaagacacttatgtggacatcttgttttctttaaactgtcttgtctgggatgattgtacattcagctttactgcacgatacaattttaagttttgcttagtgctgcttgaaatcctagctaccttatctcttttcttcttggtcttctagacttcttatgaatttaaaatgctacctagaacttcaccttctttattaggtgcgtaacactccatcttaattaaatatgatggcagataggttcctgcatccatggcctaacgttggagtggaattttacaaaatgctcactagagatcactgcagtcatttcctaagtgcttcctttgccacagactggcctgggtcctttatttaccttccctcattcactttccctcggccaataccacgttcttgattttctttcttcactggaagaaagcagataaactcctctttggtctgttttcagaggccaggctgattcagatgcctgttgctattgttgctctccattgttgggaggcattccttttcacaagaatgttctgggaaactcttcagaggacgtgaaggaaataccctgaagagtcatgattaactattgactattttctgatttaaaactgctcacctgaaattgatacttttagactttacgatcagtaaattattcagaattcatgaagatgctgagtatgttaagtgtcactgcaggaacggagctgtggtgatcacgttttgcctgcctgtgcccatgtctcttcccttgagcttattctgttgctgattcatatcttgtgttcaattattttggaagcttttcagtcgacattctgtagagtgtgttctgaggaggaactgtgataagaaagtttattataaatattatgtaaaatatatggctctctctgcaccagttatatcttattggttggtcatatcactggaaactggaacctttgattagcaaaattaatattgaaataagaaatagttcttttatattgtgtcatttggacactttcaagtacaaaatggtaataataacttggattgaggcggaaacacctattttatggctatctatctaaacatcttaaaatggccttctctgtaatacactttcttttaaaagacttcactaaatctatctttaaaaggaaaaacaaaagggagaggttgaaaatgcgcgagctgccctgcactgtgtgatgctccctccccgggagacgtggacgggggacgaggcacccgcagacgcccttctgctcactcgctcctctgtgcattcagcgagccacttgccacagatggagcccgtgacggtgtggagggtttcctggaaaggccatcttccaccaggtagaggcgagcgtgcctaggacaggccacagggctccacagaaatacctcaccccagcttcagggttctctctcctgagcctagatttgccagggtcttggtgccacgcaaatggtttcaaactgatctctatggataaatgctgatgttggttaaagaactgaaaaatgtgctcaactgtttcatcttttctattttatttttgtaatttatattgtacacaacccaggaagtaactattttggacatgtatttttataaaccaggtaatttactattatcctggaatttagactaggtttgtttcatttgttgacttagtttccagccaagaaggaaacgactgtctcccccatgtccaggtctcagtttcaagggcagagtccagagagcagacagagttctgtgagagcaggagagcagtctggaaaccctggctgtgcataccgtgtcagccgtgggcctggagatgggagcaggtgagacgcagagccccagtactgagaggaggaagccctcttacagggccccttgcccaccccaagtccgtgtctgaaacacggagcgggtgctgcttcaacccgcatttaatgctgtgtaagtagcgataaccacgtacgagtctgtctggttgatttctaatgtgactcctctggtatttcctcctggtaataaatacaagtgtgacctttcagattgcatatctcaaaagtaacattgctaatgttttataataaaatatattatgtgtgttttggttggtgaaaataatacagactacattttaaaagataaa

SEQ ID NO: 154891 - DNA, 1344 bp, Homo sapiens
  Payload ID: 10455
  Gene Symbol: MAPK9
  Gene Name: mitogen-activated protein kinase 9
  ENST ID: ENST00000393362
  CDS Start-End: 238-612
cggaagggtcgcagcgccccggcgcccctcacacccactgcggcggcggcggcggcggcggcggcggggcggagcggagcggggcgggccggcggcggagccggggccgcggagccaggagtgactagcacgcagcgccgccagtccgcccgcccgccctctccccgtggcgcggcggcggggaggcgagggatctgaaacttgcccacccttcgggatattgcaggacgctgcatcatgagcgacagtaaatgtgacagtcagttttatagtgtgcaagtggcagactcaaccttcactgtcctaaaacgttaccagcagctgaaaccaattggctctggggcccaagggattgtttggcgccatcattgcagtgccttgccattcattggcaggatgaggccagtcagtgtcattgtcactccatggattaaccaggaagggatgctgtgtgaggggttgggctggccatctcttccttggtgtctcacttcaactgtgtgtccagcccagaacgtcagaatcgttagtctgaccctgaacgttagtctcttgcatggtaagacggtcagccgccgcagcatcacgggccagctcaagtgctgcatttgatacagttcttgggataaatgttgcagtcaagaaactaagccgtccttttcagaaccaaactcatgcaaagagagcttatcgtgaacttgtcctcttaaaatgtgtcaatcataaaaatataattagtttgttaaatgtgtttacaccacaaaaaactctagaagaatttcaagatgtgtatttggttatggaattaatggatgctaacttatgtcaggttattcacatggagctggatcatgaaagaatgtcctaccttctttaccagatgctttgtggtattaaacatctgcattcagctggtataattcatagagatttgaagcctagcaacattgttgtgaaatcagactgcaccctgaagatccttgactttggcctggcccggacagcgtgcactaacttcatgatgaccccttacgtggtgacacggtactaccgggcgcccgaagtcatcctgggtatgggctacaaagagaacgttgatatctggtcagtgggttgcatcatgggagagctggtgaaaggttgtgtgatattccaaggcactgaccatattgatcagtggaataaagttattgagcagctgggaacaccatcagcagagttcatgaagaaacttcagccaactgtgaggaattatgtcgaaaacagaccaaagtatcctggaatcaaatttgaagaactctttccagattggatattcccatcagaatctgagcgagacaaaat

SEQ ID NO: 154892 - DNA, 1416 bp, Homo sapiens
  Payload ID: 10455
  Gene Symbol: MAPK9
  Gene Name: mitogen-activated protein kinase 9
  ENST ID: ENST00000397072
  CDS Start-End: 21-395
atattgcaggacgctgcatcatgagcgacagtaaatgtgacagtcagttttatagtgtgcaagtggcagactcaaccttcactgtcctaaaacgttaccagcagctgaaaccaattggctctggggcccaagggattgtttggcgccatcattgcagtgccttgccattcattggcaggatgaggccagtcagtgtcattgtcactccatggattaaccaggaagggatgctgtgtgaggggttgggctggccatctcttccttggtgtctcacttcaactgtgtgtccagcccagaacgtcagaatcgttagtctgaccctgaacgttagtctcttgcatggtaagacggtcagccgccgcagcatcacgggccagctcaagtgctgcatttgatacagttcttgggataaatgttgcagtcaagaaactaagccgtccttttcagaaccaaactcatgcaaagagagcttatcgtgaacttgtcctcttaaaatgtgtcaatcataaaaatataattagtttgttaaatgtgtttacaccacaaaaaactctagaagaatttcaagatgtgtatttggttatggaattaatggatgctaacttatgtcaggttattcacatggagctggatcatgaaagaatgtcctaccttctttaccagatgctttgtggtattaaacatctgcattcagctggtataattcatagagatttgaagcctagcaacattgttgtgaaatcagactgcaccctgaagatccttgactttggcctggcccggacagcgtgcactaacttcatgatgaccccttacgtggtgacacggtactaccgggcgcccgaagtcatcctgggtatgggctacaaagagaacgttgatatctggtcagtgggttgcatcatgggagagctggtgaaaggttgtgtgatattccaaggcactgaccatattgatcagtggaataaagttattgagcagctgggaacaccatcagcagagttcatgaagaaacttcagccaactgtgaggaattatgtcgaaaacagaccaaagtatcctggaatcaaatttgaagaactctttccagattggatattcccatcagaatctgagcgagacaaaataaaaacaagtcaagccagagatctgttatcaaaaatgttagtgattgatcctgacaagcggatctctgtagacgaagctctgcgtcacccatacatcactgtttggtatgaccccgccgaagcagaagccccaccacctcaaatttatgatgcccagttggaagaaagagaacatgcaattgaagaatggaaagagctaatttacaaagaagtcatggattgggaagaaagaagcaagaatggtgttgtaaaagatcagccttcaggttagtgattgctttaattgatt

SEQ ID NO: 154893 - DNA, 4336 bp, Homo sapiens
  Payload ID: 10455
  Gene Symbol: MAPK9
  Gene Name: mitogen-activated protein kinase 9
  Uniprot ID: P45984
  ENST ID: ENST00000455781
  CDS Start-End: 272-1546
gcggcggcggcagcggcggagaagggagcgggaccggaagggtcgcagcgccccggcgcccctcacacccactgcggcggcggcggcggcggcggcggcggggcggagcggagcggggcgggccggcggcggagccggggccgcggagccaggagtgactagcacgcagcgccgccagtccgcccgcccgccctctccccgtggcgcggcggcggggaggcgagggatctgaaacttgcccacccttcgggatattgcaggacgctgcatcatgagcgacagtaaatgtgacagtcagttttatagtgtgcaagtggcagactcaaccttcactgtcctaaaacgttaccagcagctgaaaccaattggctctggggcccaagggattgtttgtgctgcatttgatacagttcttgggataaatgttgcagtcaagaaactaagccgtccttttcagaaccaaactcatgcaaagagagcttatcgtgaacttgtcctcttaaaatgtgtcaatcataaaaatataattagtttgttaaatgtgtttacaccacaaaaaactctagaagaatttcaagatgtgtatttggttatggaattaatggatgctaacttatgtcaggttattcacatggagctggatcatgaaagaatgtcctaccttctttaccagatgctttgtggtattaaacatctgcattcagctggtataattcatagagatttgaagcctagcaacattgttgtgaaatcagactgcaccctgaagatccttgactttggcctggcccggacagcgtgcactaacttcatgatgaccccttacgtggtgacacggtactaccgggcgcccgaagtcatcctgggtatgggctacaaagagaacgtggacatctggtctgtcgggtgcatcatggcagaaatggtcctccataaagtcctgttcccgggaagagactatattgatcagtggaataaagttattgagcagctgggaacaccatcagcagagttcatgaagaaacttcagccaactgtgaggaattatgtcgaaaacagaccaaagtatcctggaatcaaatttgaagaactctttccagattggatattcccatcagaatctgagcgagacaaaataaaaacaagtcaagccagagatctgttatcaaaaatgttagtgattgatcctgacaagcggatctctgtagacgaagctctgcgtcacccatacatcactgtttggtatgaccccgccgaagcagaagccccaccacctcaaatttatgatgcccagttggaagaaagagaacatgcaattgaagaatggaaagagctaatttacaaagaagtcatggattgggaagaaagaagcaagaatggtgttgtaaaagatcagccttcagatgcagcagtaagtagcaacgccactccttctcagtcttcatcgatcaatgacatttcatccatgtccactgagcagacgctggcctcagacacagacagcagtcttgatgcctcgacgggaccccttgaaggctgtcgatgataggttagaaatagcaaacctgtcagcattgaaggaactctcacctccgtgggcctgaaatgcttgggagttgatggaaccaaatagaaaaactccatgttctgcatgtaagaaacacaatgccttgccctactcagacctgataggattgcctgcttagatgataaaatgaggcagaatatgtctgaagaaaaaaattgcaagccacacttctagagattttgttcaagatcatttcaggtgagcagttagagtaggtgaatttgtttcaaattgtactagtgacagtttctcatcatctgtaactgttgagatgtatgtgcatgtgaccacaaatgcttgcttggacttgcccatctagcactttggaaatcagtatttaaatgccaaataatcttccaggtagtgctgcttctgaagttatctcttaatcctcttaagtaatttggtgtctgtccagaaaaagtcgatttatgtgtattaattggccatcatgatgttatcatatcttattcccttttatgctatgatttattctatcttttgtatttcagaagacatataattaaatctatttaataaataaaaatatatagcttttcttagatttgtgatgtttggggctgagaattatcacggctaaaaccaagacacttatgtggacatcttgttttctttaaactgtcttgtctgggatgattgtacattcagctttactgcacgatacaattttaagttttgcttagtgctgcttgaaatcctagctaccttatctcttttcttcttggtcttctagacttcttatgaatttaaaatgctacctagaacttcaccttctttattaggtgcgtaacactccatcttaattaaatatgatggcagataggttcctgcatccatggcctaacgttggagtggaattttacaaaatgctcactagagatcactgcagtcatttcctaagtgcttcctttgccacagactggcctgggtcctttatttaccttccctcattcactttccctcggccaataccacgttcttgattttctttcttcactggaagaaagcagataaactcctctttggtctgttttcagaggccaggctgattcagatgcctgttgctattgttgctctccattgttgggaggcattccttttcacaagaatgttctgggaaactcttcagaggacgtgaaggaaataccctgaagagtcatgattaactattgactattttctgatttaaaactgctcacctgaaattgatacttttagactttacgatcagtaaattattcagaattcatgaagatgctgagtatgttaagtgtcactgcaggaacggagctgtggtgatcacgttttgcctgcctgtgcccatgtctcttcccttgagcttattctgttgctgattcatatcttgtgttcaattattttggaagcttttcagtcgacattctgtagagtgtgttctgaggaggaactgtgataagaaagtttattataaatattatgtaaaatatatggctctctctgcaccagttatatcttattggttggtcatatcactggaaactggaacctttgattagcaaaattaatattgaaataagaaatagttcttttatattgtgtcatttggacactttcaagtacaaaatggtaataataacttggattgaggcggaaacacctattttatggctatctatctaaacatcttaaaatggccttctctgtaatacactttcttttaaaagacttcactaaatctatctttaaaaggaaaaacaaaagggagaggttgaaaatgcgcgagctgccctgcactgtgtgatgctccctccccgggagacgtggacgggggacgaggcacccgcagacgcccttctgctcactcgctcctctgtgcattcagcgagccacttgccacagatggagcccgtgacggtgtggagggtttcctggaaaggccatcttccaccaggtagaggcgagcgtgcctaggacaggccacagggctccacagaaatacctcaccccagcttcagggttctctctcctgagcctagatttgccagggtcttggtgccacgcaaatggtttcaaactgatctctatggataaatgctgatgttggttaaagaactgaaaaatgtgctcaactgtttcatcttttctattttatttttgtaatttatattgtacacaacccaggaagtaactattttggacatgtatttttataaaccaggtaatttactattatcctggaatttagactaggtttgtttcatttgttgacttagtttccagccaagaaggaaacgactgtctcccccatgtccaggtctcagtttcaagggcagagtccagagagcagacagagttctgtgagagcaggagagcagtctggaaaccctggctgtgcataccgtgtcagccgtgggcctggagatgggagcaggtgagacgcagagccccagtactgagaggaggaagccctcttacagggccccttgcccaccccaagtccgtgtctgaaacacggagcgggtgctgcttcaacccgcatttaatgctgtgtaagtagcgataaccacgtacgagtctgtctggttgatttctaatgtgactcctctggtatttcctcctggtaataaatacaagtgtgacctttcagattgcatatctcaaaagtaacattgctaatgttttataataaaatatattatgtgtgttttggttggtgaaaataatacagactacattttaaaagataaa

SEQ ID NO: 154894 - DNA, 4815 bp, Homo sapiens
  Payload ID: 10455
  Gene Symbol: MAPK9
  Gene Name: mitogen-activated protein kinase 9
  Uniprot ID: P45984
  ENST ID: ENST00000452135
  CDS Start-End: 300-1574
ggcgcgagggtctgtcagaccgggcgccgcggcggcggcagcggcggagaagggagcgggaccggaagggtcgcagcgccccggcgcccctcacacccactgcggcggcggcggcggcggcggcggcggggcggagcggagcggggcgggccggcggcggagccggggccgcggagccaggagtgactagcacgcagcgccgccagtccgcccgcccgccctctccccgtggcgcggcggcggggaggcgagggatctgaaacttgcccacccttcgggatattgcaggacgctgcatcatgagcgacagtaaatgtgacagtcagttttatagtgtgcaagtggcagactcaaccttcactgtcctaaaacgttaccagcagctgaaaccaattggctctggggcccaagggattgtttgtgctgcatttgatacagttcttgggataaatgttgcagtcaagaaactaagccgtccttttcagaaccaaactcatgcaaagagagcttatcgtgaacttgtcctcttaaaatgtgtcaatcataaaaatataattagtttgttaaatgtgtttacaccacaaaaaactctagaagaatttcaagatgtgtatttggttatggaattaatggatgctaacttatgtcaggttattcacatggagctggatcatgaaagaatgtcctaccttctttaccagatgctttgtggtattaaacatctgcattcagctggtataattcatagagatttgaagcctagcaacattgttgtgaaatcagactgcaccctgaagatccttgactttggcctggcccggacagcgtgcactaacttcatgatgaccccttacgtggtgacacggtactaccgggcgcccgaagtcatcctgggtatgggctacaaagagaacgttgatatctggtcagtgggttgcatcatgggagagctggtgaaaggttgtgtgatattccaaggcactgaccatattgatcagtggaataaagttattgagcagctgggaacaccatcagcagagttcatgaagaaacttcagccaactgtgaggaattatgtcgaaaacagaccaaagtatcctggaatcaaatttgaagaactctttccagattggatattcccatcagaatctgagcgagacaaaataaaaacaagtcaagccagagatctgttatcaaaaatgttagtgattgatcctgacaagcggatctctgtagacgaagctctgcgtcacccatacatcactgtttggtatgaccccgccgaagcagaagccccaccacctcaaatttatgatgcccagttggaagaaagagaacatgcaattgaagaatggaaagagctaatttacaaagaagtcatggattgggaagaaagaagcaagaatggtgttgtaaaagatcagccttcagatgcagcagtaagtagcaacgccactccttctcagtcttcatcgatcaatgacatttcatccatgtccactgagcagacgctggcctcagacacagacagcagtcttgatgcctcgacgggaccccttgaaggctgtcgatgataggttagaaatagcaaacctgtcagcattgaaggaactctcacctccgtgggcctgaaatgcttgggagttgatggaaccaaatagaaaaactccatgttctgcatgtaagaaacacaatgccttgccctactcagacctgataggattgcctgcttagatgataaaatgaggcagaatatgtctgaagaaaaaaattgcaagccacacttctagagattttgttcaagatcatttcaggtgagcagttagagtaggtgaatttgtttcaaattgtactagtgacagtttctcatcatctgtaactgttgagatgtatgtgcatgtgaccacaaatgcttgcttggacttgcccatctagcactttggaaatcagtatttaaatgccaaataatcttccaggtagtgctgcttctgaagttatctcttaatcctcttaagtaatttggtgtctgtccagaaaaagtcgatttatgtgtattaattggccatcatgatgttatcatatcttattcccttttatgctatgatttattctatcttttgtatttcagaagacatataattaaatctatttaataaataaaaatatatagcttttcttagatttgtgatgtttggggctgagaattatcacggctaaaaccaagacacttatgtggacatcttgttttctttaaactgtcttgtctgggatgattgtacattcagctttactgcacgatacaattttaagttttgcttagtgctgcttgaaatcctagctaccttatctcttttcttcttggtcttctagacttcttatgaatttaaaatgctacctagaacttcaccttctttattaggtgcgtaacactccatcttaattaaatatgatggcagataggttcctgcatccatggcctaacgttggagtggaattttacaaaatgctcactagagatcactgcagtcatttcctaagtgcttcctttgccacagactggcctgggtcctttatttaccttccctcattcactttccctcggccaataccacgttcttgattttctttcttcactggaagaaagcagataaactcctctttggtctgttttcagaggccaggctgattcagatgcctgttgctattgttgctctccattgttgggaggcattccttttcacaagaatgttctgggaaactcttcagaggacgtgaaggaaataccctgaagagtcatgattaactattgactattttctgatttaaaactgctcacctgaaattgatacttttagactttacgatcagtaaattattcagaattcatgaagatgctgagtatgttaagtgtcactgcaggaacggagctgtggtgatcacgttttgcctgcctgtgcccatgtctcttcccttgagcttattctgttgctgattcatatcttgtgttcaattattttggaagcttttcagtcgacattctgtagagtgtgttctgaggaggaactgtgataagaaagtttattataaatattatgtaaaatatatggctctctctgcaccagttatatcttattggttggtcatatcactggaaactggaacctttgattagcaaaattaatattgaaataagaaatagttcttttatattgtgtcatttggacactttcaagtacaaaatggtaataataacttggattgaggcggaaacacctattttatggctatctatctaaacatcttaaaatggccttctctgtaatacactttcttttaaaagacttcactaaatctatctttaaaaggaaaaacaaaagggagaggttgaaaatgcgcgagctgccctgcactgtgtgatgctccctccccgggagacgtggacgggggacgaggcacccgcagacgcccttctgctcactcgctcctctgtgcattcagcgagccacttgccacagatggagcccgtgacggtgtggagggtttcctggaaaggccatcttccaccaggtagaggcgagcgtgcctaggacaggccacagggctccacagaaatacctcaccccagcttcagggttctctctcctgagcctagatttgccagggtcttggtgccacgcaaatggtttcaaactgatctctatggataaatgctgatgttggttaaagaactgaaaaatgtgctcaactgtttcatcttttctattttatttttgtaatttatattgtacacaacccaggaagtaactattttggacatgtatttttataaaccaggtaatttactattatcctggaatttagactaggtttgtttcatttgttgacttagtttccagccaagaaggaaacgactgtctcccccatgtccaggtctcagtttcaagggcagagtccagagagcagacagagttctgtgagagcaggagagcagtctggaaaccctggctgtgcataccgtgtcagccgtgggcctggagatgggagcaggtgagacgcagagccccagtactgagaggaggaagccctcttacagggccccttgcccaccccaagtccgtgtctgaaacacggagcgggtgctgcttcaacccgcatttaatgctgtgtaagtagcgataaccacgtacgagtctgtctggttgatttctaatgtgactcctctggtatttcctcctggtaataaatacaagtgtgacctttcagattgcatatctcaaaagtaacattgctaatgttttataataaaatatattatgtgtgttttggttggtgaaaataatacagactacattttaaaagataaatgtatagcatgtccaatttttgtgtgtttttacatggcaattagatatttctccatcaccatctctgatgacagatttaacatgaacacagatagatgataaagtgtcatgcttttgatcaatattagcaagaggtttcacactgagaggcagaaacattgctgtttgttctcttattgaaaatattctgcaaattcctaaatctgtgttttcaaaactaatggcagtaagttttgacttcaccaatatgcaggtccaattcagagtattggtgtaattgttttctcatgaggcgtggccaggagaattcaccagtcagccttagtcatgttacttaacgtcattcatggtgcttgtggctttgtgcctgggatgagccaagttcatctgacgtctgtgtttgaagcacttcaggctgtttagtacttaataccacaggagtggaaggaca

SEQ ID NO: 154895 - DNA, 2266 bp, Homo sapiens
  Payload ID: 10455
  Gene Symbol: MAPK9
  Gene Name: mitogen-activated protein kinase 9
  Uniprot ID: P45984
  ENST ID: ENST00000425491
  CDS Start-End: 168-896
ggagcggagcggggcgggccggcggcggagccggggccgcggagccaggagtgactagcacgcagcgccgccagtccgcccgcccgccctctccccgtggcgcggcggcggggaggcgagggatctgaaacttgcccacccttcgggatattgcaggacgctgcatcatgagcgacagtaaatgtgacagtcagttttatagtgtgcaagtggcagactcaaccttcactgtcctaaaacgttaccagcagctgaaaccaattggctctggggcccaagggattgtttgtgctgcatttgatacagttcttgggataaatgttgcagtcaagaaactaagccgtccttttcagaaccaaactcatgcaaagagagcttatcgtgaacttgtcctcttaaaatgtgtcaatcataaaaatataattagtttgttaaatgtgtttacaccacaaaaaactctagaagaatttcaagatgtgtatttggttatggaattaatggatgctaacttatgtcaggttattcacatggagctggatcatgaaagaatgtcctaccttctttaccagatgctttgtggtattaaacatctgcattcagctggtataattcatagagatttgaagcctagcaacattgttgtgaaatcagactgcaccctgaagatccttgactttggcctggcccggacagcgtgcactaacttcatgatgaccccttacgtggtgacacggtactaccgggcgcccgaagtcatcctgggtatgggctacaaagagaacgttgatatctggtcagtgggttgcatcatgggagagctggtgaaaggttgtgtgatattccaaggcactgaccgtatccttccccgcgaccttggccccgccatgctttcttaatgcctcaggcagcatgaccacctgcttacacgagcgctcacgaggacaaagtcgtaaaatccactccagactgtgttctaaggggggctttactgtatttgttaattagtgtcacaagccaagtggttcaatttcattctttatttttaacttgactacctgtgatgactttgagacttagagttcagttaaaccgattatattagctcttaattttgccaaaaatagctggacacatagaagaaattatttactctttgataagtatattctgatatttaaatgaaaatactgtattatttagtttattccgttaatttaactaggaaagatgctatctaaatttaataggctagtgtgcttgtgtgctttaattaagtactattttgttagttactggtatgcattgaaatattttcccccaaagtaagaactgaagcacattacaaaggacctaagtgaaagagattaaaatgaaaattttgtgaggaacaatatgttaaactttcttgtttgttactgtgctgacattttgtagaattttttttaaaaatctgtctagtgggttattttgtgacacactggggaagtcaaaataaatgtaaaatgaaagagataaactcatactgtagtcagcaagtcatgttagagatacagcagaaaggagaataactactctaattgttacaatagccttctttcctcatttgccattcttccatcctcagtattttttaccctaacatggttcttcacatcttccctttttcatttgtgttttaaccacttagtttttcattagtctttgactttgttttcgttatgaaagtttaaattggtctccatccttgggcagattgatggttgcttttaaggaaatcaagctccatagtcagtgttttgtatgtatcttaggaaaataatttcagattttaataattttatcaaagtggtctccttataaattcttcacagtgcaaacttaaagtgaaaatatttttatttctctcattttatttacctttctttacattttctatatcatagattatataatatgtcaagttattttatttgttctactaaattttctagcagtttccatagcctcatctcagattcacttgttgcaacctataaataaggacgtctttattttgcaagtaaacttaattaaaaagggaaaagttgaaaaattaaaagactaataatttagaaatatctacttaatgttcagtttgtctcaattcttactcattttgtgccattccttgttttattacaaaatgttttcttcaaaaagtacaaaaatgaaaaatgtgagtactttttggtgcattttagtaagtaaaattaaaattcctgctata

SEQ ID NO: 154896 - DNA, 657 bp, Homo sapiens
  Payload ID: 10455
  Gene Symbol: MAPK9
  Gene Name: mitogen-activated protein kinase 9
  ENST ID: ENST00000523583
  CDS Start-End: 347-657
gagaagggagcgggaccggaagggtcgcagcgccccggcgcccctcacacccactgcggcggcggcggcggcggcggcggcggggcggagcggagcggggcgggccggcggcggagccggggccgcggagccaggagtgactagcacgcagcgccgccagtccgcccgcccgccctctccccgtggcgcggcggcggggaggcgaggaatgttatatgcatggagttatacaggatgtgactttttgagattggcttttttcgttgactatcctgcccctgagatccacccaagttgtgggatctgaaacttgcccacccttcgggatattgcaggacgctgcatcatgagcgacagtaaatgtgacagtcagttttatagtgtgcaagtggcagactcaaccttcactgtcctaaaacgttaccagcagctgaaaccaattggctctggggcccaagggattgtttgtgctgcatttgatacagttcttgggataaatgttgcagtcaagaaactaagccgtccttttcagaaccaaactcatgcaaagagagcttatcgtgaacttgtcctcttaaaatgtgtcaatcataaaaatataattagtttgttaaatgtgtttacaccacaaaaaactctagaagaatttcaagatgt

SEQ ID NO: 154897 - DNA, 1668 bp, Homo sapiens
  Payload ID: 10455
  Gene Symbol: MAPK9
  Gene Name: mitogen-activated protein kinase 9
  ENST ID: ENST00000539014
  CDS Start-End: 21-665
atattgcaggacgctgcatcatgagcgacagtaaatgtgacagtcagttttatagtgtgcaagtggcagactcaaccttcactgtcctaaaacgttaccagcagctgaaaccaattggctctggggcccaagggattgtttgtgctgcatttgatacagttcttgggataaatgttgcagtcaagaaactaagccgtccttttcagaaccaaactcatgcaaagagagcttatcgtgaacttgtcctcttaaaatgtgtcaatcataaaaatataattagtttgttaaatgtgtttacaccacaaaaaactctagaagaatttcaagatgtgtatttggttatggaattaatggatgctaacttatgtcaggttattcacatggagctggatcatgaaagaatgtcctaccttctttaccagatgctttgtggtattaaacatctgcattcagctggtataattcatagagatttgaagcctagcaacattgttgtgaaatcagactgcaccctgaagatccttgactttggcctggcccggacagcgtgcactaacttcatgatgaccccttacgtggtgacacggtactaccgggcgcccgaagtcatcctgggtatgggctacaaagagaacgctataaagtattggactctttggcactaaaaccccagattgctacaaaccgaaggctaaaatagagttgatatctggtcagtgggttgcatcatgggagagctggtgaaaggttgtgtgatattccaaggcactgaccgtatccttccccgcgaccttggccccgccatgctttcttaatgcctcaggcagcatgaccacctgcttacacgagcgctcacgaggacaaagtcgtaaaatccactccagactgtgttctaaggggggctttactgtatttgttaattagtgtcacaagccaagtggttcaatttcattctttatttttaacttgactacctgtgatgactttgagacttagagttcagttaaaccgattatattagctcttaattttgccaaaaatagctggacacatagaagaaattatttactctttgataagtatattctgatatttaaatgaaaatactgtattatttagtttattccgttaatttaactaggaaagatgctatctaaatttaataggctagtgtgcttgtgtgctttaattaagtactattttgttagttactggtatgcattgaaatattttcccccaaagtaagaactgaagcacattacaaaggacctaagtgaaagagattaaaatgaaaattttgtgaggaacaatatgttaaactttcttgtttgttactgtgctgacattttgtagaattttttttaaaaatctgtctagtgggttattttgtgacacactggggaagtcaaaataaatgtaaaatgaaagagataaactcatactgtagtcagcaagtcatgttagagatacagcagaaaggagaataactactctaattgttacaatagccttctttcctcatttgccattcttccatcctcagtattttttaccctaacatggttcttcacatcttccctttttcatttgtgttttaaccacttagtttttcattagtctttgactttgttttcgttatgaaagtttaaattggtctccatccttggg

SEQ ID NO: 154898 - DNA, 3395 bp, Homo sapiens
  Payload ID: 10456
  Gene Symbol: MAPKAP1
  Gene Name: mitogen-activated protein kinase associated protein 1
  Uniprot ID: Q9BPZ7
  ENST ID: ENST00000265960
  CDS Start-End: 334-1902
tccggaacgccggggtgtggttccgggtcgtgtgcggctcggggtaatagggctgctgctcggccggccggcggcggcgagcagcaggggcatgagggctaacccgggaagcggcagctgagcgggccgggaggagcgccggtccccgtggatcccgagagtgcagagctcggggcaggggccgggaggcgtgggggagccgggccctcccctcaggaacgtgtcccggggccgacccggcccgtagtgtggaagcagcttcaggtaggtgagctcgtgaaacaatatgaagaggagaaaatagccttttaaggaaattggcccacagaaaggatggccttcttggacaatccaactatcattctagctcatattcgacagtcacatgtgaccagtgatgacacgggaatgtgtgagatggttctcattgatcatgatgttgacctagagaagattcatcctccttcaatgcctggagacagtgggtcagaaattcagggaagcaatggtgagactcagggctatgtatatgcccagtcagtcgatattacctcaagttgggactttggtattagaagacgctcaaacacagctcaaagattagaacgactccgaaaagagagacaaaaccagatcaaatgcaaaaatattcagtggaaagaaagaaattctaagcaatcagcccaggagttaaagtcactgtttgaaaaaaaatctctcaaagagaagcctccaatttctgggaagcagtcgatattatctgtacgcctagaacagtgccctctgcagctgaataacccttttaacgagtattccaaatttgatggcaagggtcatgtaggtacaacagcaaccaagaagatcgatgtctacctccctctgcactcgagccaggacagactgctgccaatgaccgtggtgacaatggccagcgccagggtgcaggacctgatcgggctcatctgctggcagtatacaagcgaaggacgggagccgaagctcaatgacaatgtcagtgcctactgcctgcatattgctgaggatgatggggaggtggacaccgatttccccccgctggattccaatgagcccattcataagtttggcttcagtactttggccctggttgaaaagtactcatctcctggtctgacatccaaagagtcactctttgttcgaataaatgctgctcatggattctcccttattcaggtggacaacacaaaggttaccatgaaggaaatcttactgaaggcagtgaagcgaagaaaaggatcccagaaagtttcaggccctcagtaccgcctggagaagcagagcgagcccaatgtcgccgttgacctggacagcactttggagagccagagcgcatgggagttctgcctggtccgcgagaacagttcaagggcagacggggtttttgaggaggattcgcaaattgacatagccacagtacaggatatgcttagcagccaccattacaagtcattcaaagtcagcatgatccacagactgcgattcacaaccgacgtacagctaggtatctctggagacaaagtagagatagaccctgttacgaatcagaaagccagcactaagttttggattaagcagaaacccatctcaatcgattccgacctgctctgtgcctgtgaccttgctgaagagaaaagccccagtcacgcaatatttaaactcacgtatctaagcaatcacgactataaacacctctactttgaatcggacgctgctaccgtcaatgaaattgtgctcaaggttaactacatcctggaatcgcgagctagcactgcccgggctgactactttgctcaaaaacaaagaaaactgaacagacgtacgagcttcagcttccagaaggagaagaaatccgggcagcagtgacactggcctccagcctcaatctgttccgtagctcagagcctgcctgccagggccaagtgccctagagtccacccggtgtcctgaagtcctcggggggaggccagcccctggctcactggcacagggcaggtgggctctcggggaaggtgtcgggggccccctaggagggagcgctggggacattgccatgggacggaagtctgcttggcagtggctttgataagcgatgcttgggggtcagaccaccccctagaggagccacgtgccgcccagccaccttcaatgcctgccaccctgcccgaggatgtacagagccgtgcccacacatttccttgcaacttgatcaaatttcttaaagcaaacaacaaaaatgtacatttctgtttttccttttaataaacaggtgtactctttatcatggttggtatgatggaccattctttggggcggaggattgattatgttactctctttaaaatctgttcccatattgaacaggcagattggaaaagctatggttcgatttctcagaagaaatgtttaggtcttagtcaatagttttaactatgccatttgtttaaatgagtgcatttgcttcgagggtagtgtcttactaaaagttaggaacagagacctagtggtgtgtccaaggccgtgtcactttccccttcagcacaccccagcttctgacctcagagcccaggagctgcgtggacagtgtggggtgccaggaggaggggcggtggctggtcctcaggcacgctgcactcccagccagacatggtctttccgtttcttaagtagcaagtgtaggtttcagctggcagttccacctgcatgttctctgcttcgctgccttggaaggggccacattccccattcctcttctccttacagcgcctgcctcctttttcaagcaggcggaaagctgctgtttctcacgtttcagggagaggggtgagcggagggagacctgtgtccgtgccgtccggctccctgggtgggaacaggcaagggatcagatgcccctgacaccacgcctctggccacaccagatgcctctgcagtcctcgacagcctcttcagtgtccctcctgcggtgatgtccttactgtccccagccagggccggggaccggtgtttcactgaggacctgcattagaaacattttttaaattgttgtacaggaagagatgtgtctaaaacagcatcttaaagctgagtgtatttctttgcacaaggggtcatgctgatgaattcttctttcattctgatctttgttcagccaacaggagcgtccttttctaatgtcttccattcctaccccccacccaaaaacaaaagaaatatttgtagcttgctatctgtatttgaatttttagcaattttatatttagatactttgaaaaatgtaaatgactaatttggtcattaaatcttgtgacatattcgatattaaaatgatattaaaataaaagtcatataaatacaca

SEQ ID NO: 154899 - DNA, 3256 bp, Homo sapiens
  Payload ID: 10456
  Gene Symbol: MAPKAP1
  Gene Name: mitogen-activated protein kinase associated protein 1
  Uniprot ID: Q9BPZ7
  ENST ID: ENST00000350766
  CDS Start-End: 303-1763
gtgcggctcggggtaatagggctgctgctcggccggccggcggcggcgagcagcaggggcatgagggctaacccgggaagcggcagctgagcgggccgggaggagcgccggtccccgtggatcccgagagtgcagagctcggggcaggggccgggaggcgtgggggagccgggccctcccctcaggaacgtgtcccggggccgacccggcccgtagtgtggaagcagcttcaggtaggtgagctcgtgaaacaatatgaagaggagaaaatagccttttaaggaaattggcccacagaaaggatggccttcttggacaatccaactatcattctagctcatattcgacagtcacatgtgaccagtgatgacacgggaatgtgtgagatggttctcattgatcatgatgttgacctagagaagattcatcctccttcaatgcctggagacagtgggtcagaaattcagggaagcaatggtgagactcagggctatgtatatgcccagtcagtcgatattacctcaagttgggactttggtattagaagacgctcaaacacagctcaaagattagaacgactccgaaaagagagacaaaaccagatcaaatgcaaaaatattcagtggaaagaaagaaattctaagcaatcagcccaggagttaaagtcactgtttgaaaaaaaatctctcaaagagaagcctccaatttctgggaagcagtcgatattatctgtacgcctagaacagtgccctctgcagctgaataacccttttaacgagtattccaaatttgatggcaagggtcatgtaggtacaacagcaaccaagaagatcgatgtctacctccctctgcactcgagccaggacagactgctgccaatgaccgtggtgacaatggccagcgccagggtgcaggacctgatcgggctcatctgctggcagtatacaagcgaaggacgggagccgaagctcaatgacaatgtcagtgcctactgcctgcatattgctgaggatgatggggaggtggacaccgatttccccccgctggattccaatgagcccattcataagtttggcttcagtactttggccctggttgaaaagtactcatctcctggtctgacatccaaagagtcactctttgttcgaataaatgctgctcatggattctcccttattcaggtggacaacacaaaggttaccatgaaggaaatcttactgaaggcagtgaagcgaagaaaaggatcccagaaagtttcaggttcaagggcagacggggtttttgaggaggattcgcaaattgacatagccacagtacaggatatgcttagcagccaccattacaagtcattcaaagtcagcatgatccacagactgcgattcacaaccgacgtacagctaggtatctctggagacaaagtagagatagaccctgttacgaatcagaaagccagcactaagttttggattaagcagaaacccatctcaatcgattccgacctgctctgtgcctgtgaccttgctgaagagaaaagccccagtcacgcaatatttaaactcacgtatctaagcaatcacgactataaacacctctactttgaatcggacgctgctaccgtcaatgaaattgtgctcaaggttaactacatcctggaatcgcgagctagcactgcccgggctgactactttgctcaaaaacaaagaaaactgaacagacgtacgagcttcagcttccagaaggagaagaaatccgggcagcagtgacactggcctccagcctcaatctgttccgtagctcagagcctgcctgccagggccaagtgccctagagtccacccggtgtcctgaagtcctcggggggaggccagcccctggctcactggcacagggcaggtgggctctcggggaaggtgtcgggggccccctaggagggagcgctggggacattgccatgggacggaagtctgcttggcagtggctttgataagcgatgcttgggggtcagaccaccccctagaggagccacgtgccgcccagccaccttcaatgcctgccaccctgcccgaggatgtacagagccgtgcccacacatttccttgcaacttgatcaaatttcttaaagcaaacaacaaaaatgtacatttctgtttttccttttaataaacaggtgtactctttatcatggttggtatgatggaccattctttggggcggaggattgattatgttactctctttaaaatctgttcccatattgaacaggcagattggaaaagctatggttcgatttctcagaagaaatgtttaggtcttagtcaatagttttaactatgccatttgtttaaatgagtgcatttgcttcgagggtagtgtcttactaaaagttaggaacagagacctagtggtgtgtccaaggccgtgtcactttccccttcagcacaccccagcttctgacctcagagcccaggagctgcgtggacagtgtggggtgccaggaggaggggcggtggctggtcctcaggcacgctgcactcccagccagacatggtctttccgtttcttaagtagcaagtgtaggtttcagctggcagttccacctgcatgttctctgcttcgctgccttggaaggggccacattccccattcctcttctccttacagcgcctgcctcctttttcaagcaggcggaaagctgctgtttctcacgtttcagggagaggggtgagcggagggagacctgtgtccgtgccgtccggctccctgggtgggaacaggcaagggatcagatgcccctgacaccacgcctctggccacaccagatgcctctgcagtcctcgacagcctcttcagtgtccctcctgcggtgatgtccttactgtccccagccagggccggggaccggtgtttcactgaggacctgcattagaaacattttttaaattgttgtacaggaagagatgtgtctaaaacagcatcttaaagctgagtgtatttctttgcacaaggggtcatgctgatgaattcttctttcattctgatctttgttcagccaacaggagcgtccttttctaatgtcttccattcctaccccccacccaaaaacaaaagaaatatttgtagcttgctatctgtatttgaatttttagcaattttatatttagatactttgaaaaatgtaaatgactaatttggtcattaaatcttgtgacatattcgatattaaaatgatattaaaataaaagtcatataaatacaca

SEQ ID NO: 154900 - DNA, 693 bp, Homo sapiens
  Payload ID: 10456
  Gene Symbol: MAPKAP1
  Gene Name: mitogen-activated protein kinase associated protein 1
  ENST ID: ENST00000373496
  CDS Start-End: 298-693
gctcggggtaatagggctgctgctcggccggccggcggcggcgagcagcaggggcatgagggctaacccgggaagcggcagctgagcgggccgggaggagcgccggtccccgtggatcccgagagtgcagagctcggggcaggggccgggaggcgtgggggagccgggccctcccctcaggaacgtgtcccggggccgacccggcccgtagtgtggaagcagcttcaggtaggtgagctcgtgaaacaatatgaagaggagaaaatagccttttaaggaaattggcccacagaaaggatggccttcttggacaatccaactatcattctagctcatattcgacagtcacatgtgaccagtgatgacacgggaatgtgtgagatggttctcattgatcatgatgttgacctagagaagattcatcctccttcaatgcctggagacagtgggtcagaaattcagggaagcaatgctcaaagattagaacgactccgaaaagagagacaaaaccagatcaaatgcaaaaatattcagtggaaagaaagaaattctaagcaatcagcccaggagttaaagtcactgtttgaaaaaaaatctctcaaagagaagcctccaatttctgggaagcagtcgatattatctgtacgcctagaacagtgccctctgcagctgaataacccttttaacgagtat

SEQ ID NO: 154901 - DNA, 3131 bp, Homo sapiens
  Payload ID: 10456
  Gene Symbol: MAPKAP1
  Gene Name: mitogen-activated protein kinase associated protein 1
  Uniprot ID: Q9BPZ7
  ENST ID: ENST00000373498
  CDS Start-End: 70-1638
gtaggtgagctcgtgaaacaatatgaagaggagaaaatagccttttaaggaaattggcccacagaaaggatggccttcttggacaatccaactatcattctagctcatattcgacagtcacatgtgaccagtgatgacacgggaatgtgtgagatggttctcattgatcatgatgttgacctagagaagattcatcctccttcaatgcctggagacagtgggtcagaaattcagggaagcaatggtgagactcagggctatgtatatgcccagtcagtcgatattacctcaagttgggactttggtattagaagacgctcaaacacagctcaaagattagaacgactccgaaaagagagacaaaaccagatcaaatgcaaaaatattcagtggaaagaaagaaattctaagcaatcagcccaggagttaaagtcactgtttgaaaaaaaatctctcaaagagaagcctccaatttctgggaagcagtcgatattatctgtacgcctagaacagtgccctctgcagctgaataacccttttaacgagtattccaaatttgatggcaagggtcatgtaggtacaacagcaaccaagaagatcgatgtctacctccctctgcactcgagccaggacagactgctgccaatgaccgtggtgacaatggccagcgccagggtgcaggacctgatcgggctcatctgctggcagtatacaagcgaaggacgggagccgaagctcaatgacaatgtcagtgcctactgcctgcatattgctgaggatgatggggaggtggacaccgatttccccccgctggattccaatgagcccattcataagtttggcttcagtactttggccctggttgaaaagtactcatctcctggtctgacatccaaagagtcactctttgttcgaataaatgctgctcatggattctcccttattcaggtggacaacacaaaggttaccatgaaggaaatcttactgaaggcagtgaagcgaagaaaaggatcccagaaagtttcaggccctcagtaccgcctggagaagcagagcgagcccaatgtcgccgttgacctggacagcactttggagagccagagcgcatgggagttctgcctggtccgcgagaacagttcaagggcagacggggtttttgaggaggattcgcaaattgacatagccacagtacaggatatgcttagcagccaccattacaagtcattcaaagtcagcatgatccacagactgcgattcacaaccgacgtacagctaggtatctctggagacaaagtagagatagaccctgttacgaatcagaaagccagcactaagttttggattaagcagaaacccatctcaatcgattccgacctgctctgtgcctgtgaccttgctgaagagaaaagccccagtcacgcaatatttaaactcacgtatctaagcaatcacgactataaacacctctactttgaatcggacgctgctaccgtcaatgaaattgtgctcaaggttaactacatcctggaatcgcgagctagcactgcccgggctgactactttgctcaaaaacaaagaaaactgaacagacgtacgagcttcagcttccagaaggagaagaaatccgggcagcagtgacactggcctccagcctcaatctgttccgtagctcagagcctgcctgccagggccaagtgccctagagtccacccggtgtcctgaagtcctcggggggaggccagcccctggctcactggcacagggcaggtgggctctcggggaaggtgtcgggggccccctaggagggagcgctggggacattgccatgggacggaagtctgcttggcagtggctttgataagcgatgcttgggggtcagaccaccccctagaggagccacgtgccgcccagccaccttcaatgcctgccaccctgcccgaggatgtacagagccgtgcccacacatttccttgcaacttgatcaaatttcttaaagcaaacaacaaaaatgtacatttctgtttttccttttaataaacaggtgtactctttatcatggttggtatgatggaccattctttggggcggaggattgattatgttactctctttaaaatctgttcccatattgaacaggcagattggaaaagctatggttcgatttctcagaagaaatgtttaggtcttagtcaatagttttaactatgccatttgtttaaatgagtgcatttgcttcgagggtagtgtcttactaaaagttaggaacagagacctagtggtgtgtccaaggccgtgtcactttccccttcagcacaccccagcttctgacctcagagcccaggagctgcgtggacagtgtggggtgccaggaggaggggcggtggctggtcctcaggcacgctgcactcccagccagacatggtctttccgtttcttaagtagcaagtgtaggtttcagctggcagttccacctgcatgttctctgcttcgctgccttggaaggggccacattccccattcctcttctccttacagcgcctgcctcctttttcaagcaggcggaaagctgctgtttctcacgtttcagggagaggggtgagcggagggagacctgtgtccgtgccgtccggctccctgggtgggaacaggcaagggatcagatgcccctgacaccacgcctctggccacaccagatgcctctgcagtcctcgacagcctcttcagtgtccctcctgcggtgatgtccttactgtccccagccagggccggggaccggtgtttcactgaggacctgcattagaaacattttttaaattgttgtacaggaagagatgtgtctaaaacagcatcttaaagctgagtgtatttctttgcacaaggggtcatgctgatgaattcttctttcattctgatctttgttcagccaacaggagcgtccttttctaatgtcttccattcctaccccccacccaaaaacaaaagaaatatttgtagcttgctatctgtatttgaatttttagcaattttatatttagatactttgaaaaatgtaaatgactaatttggtcattaaatcttgtgacatattcgatattaaaatgatattaaaataaaagtcatataaatacaca

SEQ ID NO: 154902 - DNA, 3045 bp, Homo sapiens
  Payload ID: 10456
  Gene Symbol: MAPKAP1
  Gene Name: mitogen-activated protein kinase associated protein 1
  Uniprot ID: Q9BPZ7
  ENST ID: ENST00000373503
  CDS Start-End: 560-1552
ccgggtcgtgtgcggctcggggtaatagggctgctgctcggccggccggcggcggcgagcagcaggggcatgagggctaacccgggaagcggcagctgagcgggccgggaggagcgccggtccccgtggatcccgagagtgcagagctcggggcaggggccgggaggcgtgggggagccgggccctcccctcaggaacgtgtcccggggccgacccggcccgtagtgtggaagcagcttcagctcaaagattagaacgactccgaaaagagagacaaaaccagatcaaatgcaaaaatattcagtggaaagaaagaaattctaagcaatcagcccaggagttaaagtcactgtttgaaaaaaaatctctcaaagagaagcctccaatttctgggaagcagtcgatattatctgtacgcctagaacagtgccctctgcagctgaataacccttttaacgagtattccaaatttgatggcaagggtcatgtaggtacaacagcaaccaagaagatcgatgtctacctccctctgcactcgagccaggacagactgctgccaatgaccgtggtgacaatggccagcgccagggtgcaggacctgatcgggctcatctgctggcagtatacaagcgaaggacgggagccgaagctcaatgacaatgtcagtgcctactgcctgcatattgctgaggatgatggggaggtggacaccgatttccccccgctggattccaatgagcccattcataagtttggcttcagtactttggccctggttgaaaagtactcatctcctggtctgacatccaaagagtcactctttgttcgaataaatgctgctcatggattctcccttattcaggtggacaacacaaaggttaccatgaaggaaatcttactgaaggcagtgaagcgaagaaaaggatcccagaaagtttcaggccctcagtaccgcctggagaagcagagcgagcccaatgtcgccgttgacctggacagcactttggagagccagagcgcatgggagttctgcctggtccgcgagaacagttcaagggcagacggggtttttgaggaggattcgcaaattgacatagccacagtacaggatatgcttagcagccaccattacaagtcattcaaagtcagcatgatccacagactgcgattcacaaccgacgtacagctaggtatctctggagacaaagtagagatagaccctgttacgaatcagaaagccagcactaagttttggattaagcagaaacccatctcaatcgattccgacctgctctgtgcctgtgaccttgctgaagagaaaagccccagtcacgcaatatttaaactcacgtatctaagcaatcacgactataaacacctctactttgaatcggacgctgctaccgtcaatgaaattgtgctcaaggttaactacatcctggaatcgcgagctagcactgcccgggctgactactttgctcaaaaacaaagaaaactgaacagacgtacgagcttcagcttccagaaggagaagaaatccgggcagcagtgacactggcctccagcctcaatctgttccgtagctcagagcctgcctgccagggccaagtgccctagagtccacccggtgtcctgaagtcctcggggggaggccagcccctggctcactggcacagggcaggtgggctctcggggaaggtgtcgggggccccctaggagggagcgctggggacattgccatgggacggaagtctgcttggcagtggctttgataagcgatgcttgggggtcagaccaccccctagaggagccacgtgccgcccagccaccttcaatgcctgccaccctgcccgaggatgtacagagccgtgcccacacatttccttgcaacttgatcaaatttcttaaagcaaacaacaaaaatgtacatttctgtttttccttttaataaacaggtgtactctttatcatggttggtatgatggaccattctttggggcggaggattgattatgttactctctttaaaatctgttcccatattgaacaggcagattggaaaagctatggttcgatttctcagaagaaatgtttaggtcttagtcaatagttttaactatgccatttgtttaaatgagtgcatttgcttcgagggtagtgtcttactaaaagttaggaacagagacctagtggtgtgtccaaggccgtgtcactttccccttcagcacaccccagcttctgacctcagagcccaggagctgcgtggacagtgtggggtgccaggaggaggggcggtggctggtcctcaggcacgctgcactcccagccagacatggtctttccgtttcttaagtagcaagtgtaggtttcagctggcagttccacctgcatgttctctgcttcgctgccttggaaggggccacattccccattcctcttctccttacagcgcctgcctcctttttcaagcaggcggaaagctgctgtttctcacgtttcagggagaggggtgagcggagggagacctgtgtccgtgccgtccggctccctgggtgggaacaggcaagggatcagatgcccctgacaccacgcctctggccacaccagatgcctctgcagtcctcgacagcctcttcagtgtccctcctgcggtgatgtccttactgtccccagccagggccggggaccggtgtttcactgaggacctgcattagaaacattttttaaattgttgtacaggaagagatgtgtctaaaacagcatcttaaagctgagtgtatttctttgcacaaggggtcatgctgatgaattcttctttcattctgatctttgttcagccaacaggagcgtccttttctaatgtcttccattcctaccccccacccaaaaacaaaagaaatatttgtagcttgctatctgtatttgaatttttagcaattttatatttagatactttgaaaaatgtaaatgactaatttggtcattaaatcttgtgacatattcgatattaaaatgatattaaaataaaagtcatataaatacaca

SEQ ID NO: 154903 - DNA, 3252 bp, Homo sapiens
  Payload ID: 10456
  Gene Symbol: MAPKAP1
  Gene Name: mitogen-activated protein kinase associated protein 1
  Uniprot ID: Q9BPZ7
  ENST ID: ENST00000373511
  CDS Start-End: 331-1758
ggaacgccggggtgtggttccgggtcgtgtgcggctcggggtaatagggctgctgctcggccggccggcggcggcgagcagcaggggcatgagggctaacccgggaagcggcagctgagcgggccgggaggagcgccggtccccgtggatcccgagagtgcagagctcggggcaggggccgggaggcgtgggggagccgggccctcccctcaggaacgtgtcccggggccgacccggcccgtagtgtggaagcagcttcaggtaggtgagctcgtgaaacaatatgaagaggagaaaatagccttttaaggaaattggcccacagaaaggatggccttcttggacaatccaactatcattctagctcatattcgacagtcacatgtgaccagtgatgacacgggaatgtgtgagatggttctcattgatcatgatgttgacctagagaagattcatcctccttcaatgcctggagacagtgggtcagaaattcagggaagcaatggtgagactcagggctatgtatatgcccagtcagtcgatattacctcaagttgggactttggtattagaagacgctcaaacacagctcaaagattagaacgactccgaaaagagagacaaaaccagatcaaatgcaaaaatattcagtggaaagaaagaaattctaagcaatcagcccaggagttaaagtcactgtttgaaaaaaaatctctcaaagagaagcctccaatttctgggaagcagtcgatattatctgtacgcctagaacagtgccctctgcagctgaataacccttttaacgagtattccaaatttgatggcaagggtcatgtaggtacaacagcaaccaagaagatcgatgtctacctccctctgcactcgagccaggacagactgctgccaatgaccgtggtgacaatggccagcgccagggtgcaggacctgatcgggctcatctgctggcagtatacaagcgaaggacgggagccgaagctcaatgacaatgtcagtgcctactgcctgcatattgctgaggatgatggggaggtggacaccgatttccccccgctggattccaatgagcccattcataagtttggcttcagtactttggccctggttgaaaagtactcatctcctggtctgacatccaaagagtcactctttgttcgaataaatgctgctcatggattctcccttattcaggtggacaacacaaaggttaccatgaaggaaatcttactgaaggcagtgaagcgaagaaaaggatcccagaaagtttcaggccctcagtaccgcctggagaagcagagcgagcccaatgtcgccgttgacctggacagcactttggagagccagagcgcatgggagttctgcctggtccgcgagaacagtatctctggagacaaagtagagatagaccctgttacgaatcagaaagccagcactaagttttggattaagcagaaacccatctcaatcgattccgacctgctctgtgcctgtgaccttgctgaagagaaaagccccagtcacgcaatatttaaactcacgtatctaagcaatcacgactataaacacctctactttgaatcggacgctgctaccgtcaatgaaattgtgctcaaggttaactacatcctggaatcgcgagctagcactgcccgggctgactactttgctcaaaaacaaagaaaactgaacagacgtacgagcttcagcttccagaaggagaagaaatccgggcagcagtgacactggcctccagcctcaatctgttccgtagctcagagcctgcctgccagggccaagtgccctagagtccacccggtgtcctgaagtcctcggggggaggccagcccctggctcactggcacagggcaggtgggctctcggggaaggtgtcgggggccccctaggagggagcgctggggacattgccatgggacggaagtctgcttggcagtggctttgataagcgatgcttgggggtcagaccaccccctagaggagccacgtgccgcccagccaccttcaatgcctgccaccctgcccgaggatgtacagagccgtgcccacacatttccttgcaacttgatcaaatttcttaaagcaaacaacaaaaatgtacatttctgtttttccttttaataaacaggtgtactctttatcatggttggtatgatggaccattctttggggcggaggattgattatgttactctctttaaaatctgttcccatattgaacaggcagattggaaaagctatggttcgatttctcagaagaaatgtttaggtcttagtcaatagttttaactatgccatttgtttaaatgagtgcatttgcttcgagggtagtgtcttactaaaagttaggaacagagacctagtggtgtgtccaaggccgtgtcactttccccttcagcacaccccagcttctgacctcagagcccaggagctgcgtggacagtgtggggtgccaggaggaggggcggtggctggtcctcaggcacgctgcactcccagccagacatggtctttccgtttcttaagtagcaagtgtaggtttcagctggcagttccacctgcatgttctctgcttcgctgccttggaaggggccacattccccattcctcttctccttacagcgcctgcctcctttttcaagcaggcggaaagctgctgtttctcacgtttcagggagaggggtgagcggagggagacctgtgtccgtgccgtccggctccctgggtgggaacaggcaagggatcagatgcccctgacaccacgcctctggccacaccagatgcctctgcagtcctcgacagcctcttcagtgtccctcctgcggtgatgtccttactgtccccagccagggccggggaccggtgtttcactgaggacctgcattagaaacattttttaaattgttgtacaggaagagatgtgtctaaaacagcatcttaaagctgagtgtatttctttgcacaaggggtcatgctgatgaattcttctttcattctgatctttgttcagccaacaggagcgtccttttctaatgtcttccattcctaccccccacccaaaaacaaaagaaatatttgtagcttgctatctgtatttgaatttttagcaattttatatttagatactttgaaaaatgtaaatgactaatttggtcattaaatcttgtgacatattcgatattaaaatgatattaaaataaaagtcatataaatacacac

SEQ ID NO: 154904 - DNA, 1586 bp, Homo sapiens
  Payload ID: 10456
  Gene Symbol: MAPKAP1
  Gene Name: mitogen-activated protein kinase associated protein 1
  Uniprot ID: Q9BPZ7
  ENST ID: ENST00000394060
  CDS Start-End: 331-1302
ggaacgccggggtgtggttccgggtcgtgtgcggctcggggtaatagggctgctgctcggccggccggcggcggcgagcagcaggggcatgagggctaacccgggaagcggcagctgagcgggccgggaggagcgccggtccccgtggatcccgagagtgcagagctcggggcaggggccgggaggcgtgggggagccgggccctcccctcaggaacgtgtcccggggccgacccggcccgtagtgtggaagcagcttcaggtaggtgagctcgtgaaacaatatgaagaggagaaaatagccttttaaggaaattggcccacagaaaggatggccttcttggacaatccaactatcattctagctcatattcgacagtcacatgtgaccagtgatgacacgggaatgtgtgagatggttctcattgatcatgatgttgacctagagaagattcatcctccttcaatgcctggagacagtgggtcagaaattcagggaagcaatggtgagactcagggctatgtatatgcccagtcagtcgatattacctcaagttgggactttggtattagaagacgctcaaacacagctcaaagattagaacgactccgaaaagagagacaaaaccagatcaaatgcaaaaatattcagtggaaagaaagaaattctaagcaatcagcccaggagttaaagtcactgtttgaaaaaaaatctctcaaagagaagcctccaatttctgggaagcagtcgatattatctgtacgcctagaacagtgccctctgcagctgaataacccttttaacgagtattccaaatttgatggcaagggtcatgtaggtacaacagcaaccaagaagatcgatgtctacctccctctgcactcgagccaggacagactgctgccaatgaccgtggtgacaatggccagcgccagggtgcaggacctgatcgggctcatctgctggcagtatacaagcgaaggacgggagccgaagctcaatgacaatgtcagtgcctactgcctgcatattgctgaggatgatggggaggtggacaccgatttccccccgctggattccaatgagcccattcataagtttggcttcagtactttggccctggttgaaaagtactcatctcctggtctgacatccaaagagtcactctttgttcgaataaatgctgctcatggattctcccttattcaggtggacaacacaaaggttaccatgaaggaaatcttactgaaggcagtgaagcgaagaaaaggatcccagaaagtttcaggtgcttgtgactaaattcactaatttcactggctgtcaaggctgtgttaaggaaaatgggtttgaactgctgtgggttttgagtactggactggatgtcagaaacctttgccatcacgggaaattctgtcactctggatttactgtctgttccccacagctaaattcctctgcagtgtgatttagcaccctggatccccatcaaccagttttggcatttatttgaatgcattaccccactggtttccataaactattttacaattgtttaaaataaatgactgtttatttccacaaaa

SEQ ID NO: 154905 - DNA, 2977 bp, Homo sapiens
  Payload ID: 10456
  Gene Symbol: MAPKAP1
  Gene Name: mitogen-activated protein kinase associated protein 1
  Uniprot ID: Q9BPZ7
  ENST ID: ENST00000394063
  CDS Start-End: 492-1484
tccggaacgccggggtgtggttccgggtcgtgtgcggctcggggtaatagggctgctgctcggccggccggcggcggcgagcagcaggggcatgagggctaacccgggaagcggcagctgagcgggccgggaggagcgccggtccccgtggatcccgagagtgcagagctcggggcaggggccgggaggcgtgggggagccgggccctcccctcaggaacgtgtcccggggccgacccggcccgtagtgtggaagcagcttcagcccaggagttaaagtcactgtttgaaaaaaaatctctcaaagagaagcctccaatttctgggaagcagtcgatattatctgtacgcctagaacagtgccctctgcagctgaataacccttttaacgagtattccaaatttgatggcaagggtcatgtaggtacaacagcaaccaagaagatcgatgtctacctccctctgcactcgagccaggacagactgctgccaatgaccgtggtgacaatggccagcgccagggtgcaggacctgatcgggctcatctgctggcagtatacaagcgaaggacgggagccgaagctcaatgacaatgtcagtgcctactgcctgcatattgctgaggatgatggggaggtggacaccgatttccccccgctggattccaatgagcccattcataagtttggcttcagtactttggccctggttgaaaagtactcatctcctggtctgacatccaaagagtcactctttgttcgaataaatgctgctcatggattctcccttattcaggtggacaacacaaaggttaccatgaaggaaatcttactgaaggcagtgaagcgaagaaaaggatcccagaaagtttcaggccctcagtaccgcctggagaagcagagcgagcccaatgtcgccgttgacctggacagcactttggagagccagagcgcatgggagttctgcctggtccgcgagaacagttcaagggcagacggggtttttgaggaggattcgcaaattgacatagccacagtacaggatatgcttagcagccaccattacaagtcattcaaagtcagcatgatccacagactgcgattcacaaccgacgtacagctaggtatctctggagacaaagtagagatagaccctgttacgaatcagaaagccagcactaagttttggattaagcagaaacccatctcaatcgattccgacctgctctgtgcctgtgaccttgctgaagagaaaagccccagtcacgcaatatttaaactcacgtatctaagcaatcacgactataaacacctctactttgaatcggacgctgctaccgtcaatgaaattgtgctcaaggttaactacatcctggaatcgcgagctagcactgcccgggctgactactttgctcaaaaacaaagaaaactgaacagacgtacgagcttcagcttccagaaggagaagaaatccgggcagcagtgacactggcctccagcctcaatctgttccgtagctcagagcctgcctgccagggccaagtgccctagagtccacccggtgtcctgaagtcctcggggggaggccagcccctggctcactggcacagggcaggtgggctctcggggaaggtgtcgggggccccctaggagggagcgctggggacattgccatgggacggaagtctgcttggcagtggctttgataagcgatgcttgggggtcagaccaccccctagaggagccacgtgccgcccagccaccttcaatgcctgccaccctgcccgaggatgtacagagccgtgcccacacatttccttgcaacttgatcaaatttcttaaagcaaacaacaaaaatgtacatttctgtttttccttttaataaacaggtgtactctttatcatggttggtatgatggaccattctttggggcggaggattgattatgttactctctttaaaatctgttcccatattgaacaggcagattggaaaagctatggttcgatttctcagaagaaatgtttaggtcttagtcaatagttttaactatgccatttgtttaaatgagtgcatttgcttcgagggtagtgtcttactaaaagttaggaacagagacctagtggtgtgtccaaggccgtgtcactttccccttcagcacaccccagcttctgacctcagagcccaggagctgcgtggacagtgtggggtgccaggaggaggggcggtggctggtcctcaggcacgctgcactcccagccagacatggtctttccgtttcttaagtagcaagtgtaggtttcagctggcagttccacctgcatgttctctgcttcgctgccttggaaggggccacattccccattcctcttctccttacagcgcctgcctcctttttcaagcaggcggaaagctgctgtttctcacgtttcagggagaggggtgagcggagggagacctgtgtccgtgccgtccggctccctgggtgggaacaggcaagggatcagatgcccctgacaccacgcctctggccacaccagatgcctctgcagtcctcgacagcctcttcagtgtccctcctgcggtgatgtccttactgtccccagccagggccggggaccggtgtttcactgaggacctgcattagaaacattttttaaattgttgtacaggaagagatgtgtctaaaacagcatcttaaagctgagtgtatttctttgcacaaggggtcatgctgatgaattcttctttcattctgatctttgttcagccaacaggagcgtccttttctaatgtcttccattcctaccccccacccaaaaacaaaagaaatatttgtagcttgctatctgtatttgaatttttagcaattttatatttagatactttgaaaaatgtaaatgactaatttggtcattaaatcttgtgacatattcgatattaaaatgatattaaaataaaagtcatataaatacaca

SEQ ID NO: 154906 - DNA, 769 bp, Homo sapiens
  Payload ID: 10456
  Gene Symbol: MAPKAP1
  Gene Name: mitogen-activated protein kinase associated protein 1
  ENST ID: ENST00000433483
  CDS Start-End: 490-769
tgcggctcggggtaatagggctgctgctcggccggccggcggcggcgagcagcaggggcatgagggctaacccgggaagcggcagctgagcgggccgggaggagcgccggtccccgtggatcccgagagtgcagagctcggggcaggggccgggaggcgtgggggagccgggccctcccctcaggaacgtgtcccggggccgacccggcccgtagtgtggaagcagcttcagggttcttgctctattgaccaggctggagtgcagtggcacgatcacggctcactgcagcctcaacttcctggactcaagcgatcctcccacctcttcctccccagcagctgggactacaggcatgcactaccacggcctcccaaattgttgggattgtaagcatgaaccactgcatctggccaggcctggtaggtgagctcgtgaaacaatatgaagaggagaaaatagccttttaaggaaattggcccacagaaaggatggccttcttggacaatccaactatcattctagctcatattcgacagtcacatgtgaccagtgatgacacgggaatgtgtgagatggttctcattgatcatgatgttgacctagagaagattcatcctccttcaatgcctggagacagtgggtcagaaattcagggaagcaatggtgagactcagggctatgtatatgcccagtcagtcgatattacctcaagttgggactttggtattagaagacgctcaaacacagctcaaagattagaacgactcc

SEQ ID NO: 154907 - DNA, 984 bp, Homo sapiens
  Payload ID: 10456
  Gene Symbol: MAPKAP1
  Gene Name: mitogen-activated protein kinase associated protein 1
  ENST ID: ENST00000420643
  CDS Start-End: 226-984
agccctagggtgaagtagatcgtggtgaaaagtgaagctctgggggaagaccgggcgcggtggctcacgcctgtaatcccagcacttgggaggccaaggcagccggatcacctgaggtcaggagttcaagcagccacgtcacctgagggtcatgtaggtacaacagcaaccaagaagatcgatgtctacctccctctgcactcgagccaggacagactgctgccaatgaccgtggtgacaatggccagcgccagggtgcaggacctgatcgggctcatctgctggcagtatacaagcgaaggacgggagccgaagctcaatgacaatgtcagtgcctactgcctgcatattgctgaggatgatggggaggtggacaccgatttccccccgctggattccaatgagcccattcataagtttggcttcagtactttggccctggttgaaaagtactcatctcctggtctgacatccaaagagtcactctttgttcgaataaatgctgctcatggattctcccttattcaggtggacaacacaaaggttaccatgaaggaaatcttactgaaggcagtgaagcgaagaaaaggatcccagaaagtttcaggttcaagggcagacggggtttttgaggaggattcgcaaattgacatagccacagtacaggatatgcttagcagccaccattacaagtcattcaaagtcagcatgatccacagactgcgattcacaaccgacgtacagctaggtatctctggagacaaagtagagatagaccctgttacgaatcagaaagccagcactaagttttggattaagcagaaacccatctcaatcgattccgacctgctctgtgcctgtgaccttgctgaagagaaaagccccagtcacgcaatatttaaactcacgtatctaagcaatcacgactataaacacctctactttgaatcggacgctgctaccgtcaatgaaattgtgctcaag

SEQ ID NO: 154908 - DNA, 816 bp, Homo sapiens
  Payload ID: 10456
  Gene Symbol: MAPKAP1
  Gene Name: mitogen-activated protein kinase associated protein 1
  ENST ID: ENST00000427078
  CDS Start-End: 435-816
gctcggccggccggcggcggcgagcagcaggggcatgagggctaacccgggaagcggcagctgagcgggccgggaggagcgccggtccccgtggatcccgagagtgcagagctcggggcaggggccgggaggcgtgggggagccgggccctcccctcaggaacgtgtcccggggccgacccggcccgtagtgtggaagcagcttcagcccaggagttaaagtcactgtttgaaaaaaaatctctcaaagagaagcctccaatttctgggaagcagtcgatattatctgtacgcctagaacagtgccctctgcagctgaataacccttttaacgagtattccaaatttgatggcaagggtcatgtaggtacaacagcaaccaagaagatcgatgtctacctccctctgcactcgagccaggacagactgctgccaatgaccgtggtgacaatggccagcgccagggtgcaggacctgatcgggctcatctgctggcagtatacaagcgaaggacgggagccgaagctcaatgacaatgtcagtgcctactgcctgcatattgctgaggatgatggggaggtggacaccgatttccccccgctggattccaatgagcccattcataagtttggcttcagtactttggccctggttgaaaagtactcatctcctggtctgacatccaaagagtcactctttgttcgaataaatgctgctcatggattctcccttattcaggtggacaacacaaaggttaccatgaaggaaatcttactgaaggcagtgaagcgaagaaaaggatcccagaaagtttcag

SEQ ID NO: 154909 - DNA, 701 bp, Homo sapiens
  Payload ID: 10456
  Gene Symbol: MAPKAP1
  Gene Name: mitogen-activated protein kinase associated protein 1
  ENST ID: ENST00000444226
  CDS Start-End: 1-283
caagtcattcaaagtcagcatgatccacagactgcgattcacaaccgacgtacagctaggtcacgcaatatttaaactcacgtatctaagcaatcacgactataaacacctctactttgaatcggacgctgctaccgtcaatgaaattgtgctcaaggttaactacatcctggaatcgcgagctagcactgcccgggctgactactttgctcaaaaacaaagaaaactgaacagacgtacgagcttcagcttccagaaggagaagaaatccgggcagcagtgacactggcctccagcctcaatctgttccgtagctcagagcctgcctgccagggccaagtgccctagagtccacccggtgtcctgaagtcctcggggggaggccagcccctggctcactggcacagggcaggtgggctctcggggaaggtgtcgggggccccctaggagggagcgctggggacattgccatgggacggaagtctgcttggcagtggctttgataagcgatgcttgggggtcagaccaccccctagaggagccacgtgccgcccagccaccttcaatgcctgccaccctgcccgaggatgtacagagccgtgcccacacatttccttgcaacttgatcaaatttcttaaagcaaacaacaaaaatgtacatttctgtttttccttttaataaacaggtgtactctttatca

SEQ ID NO: 154910 - DNA, 401 bp, Homo sapiens
  Payload ID: 10456
  Gene Symbol: MAPKAP1
  Gene Name: mitogen-activated protein kinase associated protein 1
  ENST ID: ENST00000468896
  CDS Start-End: 1-401
gaacagtgccctctgcagctgaataacccttttaacgagtattccaaatttgatggcaagcattgttccagtctatgtcggataattatgaacaaatgttttctacaatcattggcattaaatagctctcttcaaagaaagtcacttaaaactttgcagaaaagcatgaagccaccgagaaatgttgcaaactcagaaaagggtcatgtaggtacaacagcaaccaagaagatcgatgtctacctccctctgcactcgagccaggacagactgctgccaatgaccgtggtgacaatggccagcgccagggtgcaggacctgatcgggctcatctgctggcagtatacaagcgaaggacgggagccgaagctcaatgacaatgtcagtgcctactgcctgca

SEQ ID NO: 154911 - DNA, 1495 bp, Homo sapiens
  Payload ID: 10456
  Gene Symbol: MAPKAP1
  Gene Name: mitogen-activated protein kinase associated protein 1
  ENST ID: ENST00000497932
  CDS Start-End: 216-953
aacgatgcttccttggcgtgtccacaggcagaaaggagtaagctgacaaacatagcatgatatttcttaattcaagattattttgaactgaatcccatctgtattcttattgcttctcctactttggaaactatcagggtcatgtaggtacaacagcaaccaagaagatcgatgtctacctccctctgcactcgagccaggacagactgctgccaatgaccgtggtgacaatggccagcgccagggtgcaggacctgatcgggctcatctgctggcagtatacaagcgaaggacgggagccgaagctcaatgacaatgtcagtgcctactgcctgcatattgctgaggatgatggggaggtggacaccgatttccccccgctggattccaatgagcccattcataagtttggcttcagtactttggccctggttgaaaagtactcatctcctggtctgacatccaaagagtcactctttgttcgaataaatgctgctcatggattctcccttattcaggtggacaacacaaaggttaccatgaaggaaatcttactgaaggcagtgaagcgaagaaaaggatcccagaaagtttcaggttcaagggcagacggggtttttgaggaggattcgcaaattgacatagccacagtacaggatatgcttagcagccaccattacaagtcattcaaagtcagcatgatccacagactgcgattcacaaccgacgtacagctaggtatctctggagacaaagtagagatagaccctgttacgaatcagaaagccagcactaagttttggattaagcagaaacccatctcaatcgattccgacctgctctgtgcctgtgaccttgctgaagagaaaagccccaggttccgctcatcactccttgcagagagcaagagggggctgtctgctgtggctgtccaccgtgcctcggcccagtgattaactttgcagctgtgtcattgttcaagtccaaacacaagtgctccacagaacgttctctgccctctgttcccctctcctatggcgtcacgcaatatttaaactcacgtatctaagcaatcacgactataaacacctctactttgaatcggacgctgctaccgtcaatgaaattgtgctcaaggttaactacatcctggaatcgcgagctagcactgcccgggctgactactttgctcaaaaacaaagaaaactgaacagacgtacgagcttcagcttccagaaggagaagaaatccgggcagcagtgacactggcctccagcctcaatctgttccgtagctcagagcctgcctgccagggccaagtgccctagagtccacccggtgtcctgaagtcctcggggggaggccagcccctggctcactggcacagggcaggtgggctctcggggaaggtgtcgggggccccctaggagggagcgctggggacattgccatgggacggaagtctgcttggcagtggctttgataagcgatgctt

SEQ ID NO: 154912 - DNA, 7158 bp, Homo sapiens
  Payload ID: 10457
  Gene Symbol: MAPKBP1
  Gene Name: mitogen-activated protein kinase binding protein 1
  Uniprot ID: O60336
  ENST ID: ENST00000456763
  CDS Start-End: 197-4741
cgctgcggctaccgcggcggagctgaaattgccgaacgcgatgcccgagggcgctgtgagcggggtggccttagctcgccgaggctggtcagtgagagggcatactgggaagccctctggagtgggaagacagtgccgctgttgagacaagacccaggactgggccggggactgtcccaaagggtttctcgtcataatggctgtggaagggtcaaccattaccagccggatcaagaatctgttgagatctccatccatcaaactgcgcaggagtaaggcaggaaaccgacgagaggacctcagctccaaggtgaccttggagaaggtgctgggaattacagtgtctggaggcagaggacttgcctgtgacccccgatcaggtttagttgcttacccagcagggtgtgtggttgtgttgttcaatccccggaaacacaaacagcaccacatcctcaacagttccaggaaaaccatcactgcccttgccttctcccctgatggcaagtacttggtcactggagagagtgggcacatgcctgccgtgcgggtttgggacgtggcagagcacagccaggtggccgagctgcaggagcacaagtatggtgtggcttgtgtggccttctctcctagcgccaagtacattgtctctgtgggctaccagcatgacatgatcgtcaacgtgtgggcctggaagaaaaacattgtggtggcctccaacaaggtgtccagtcgggtgacagcagtgtccttctctgaggattgcagctactttgtcactgcaggcaaccgacacatcaaattctggtatctcgatgacagcaagacctcaaaggtgaatgccactgtgcccttgctgggccgctcagggctgctgggagagctacggaacaacctattcactgatgtggcctgtggcagaggaaaaaaggcggacagtaccttctgcatcacgtcctcagggctgctgtgcgagttcagtgatcgaaggcttttggacaagtgggtggagctgaggaacatagacagcttcacaaccacagtggcccactgcatctctgtgagccaagactacatcttctgtggctgtgctgatggcaccgtgcgccttttcaacccctctaacctgcacttccttagcaccttgccccgaccccatgctctggggacagacattgctagcgtcaccgaggccagtcgcctcttctctggagtggcgaatgccaggtatccagacaccattgccttgacctttgatcctactaatcagtggctgtcttgtgtgtacaacgatcatagcatttatgtttgggatgtgagggaccccaagaaagtgggcaaggtgtactcggctctgtatcattcttcctgcgtctggagtgtggaggtctaccccgaggtgaaggatagtaaccaggcctgcctgccccccagttcctttattacctgctcctcagacaacaccatccgcctgtggaacacagagagctccggggtgcatggctccaccctccaccgaaacatcctcagcagtgacctcattaaaatcatctatgtggatgggaacacccaggccctgctggacacagagctgcctggaggagacaaagctgatgcatccctgttggatccccgcgtgggcatccgctcggtgtgtgtcagccccaatggacagcatctagcatcaggggaccgtatgggcacacttagggtgcacgaacttcagtccctgagtgagatgctgaaggtggaggcccatgactctgagattctgtgcctggagtattctaagccagacacaggtctgaaactgctagcatcggcgagccgggaccggctgatccatgtgctggatgccgggcgggagtacagcctacagcagacgctggacgaacactcatcctccatcactgctgttaagtttgcagccagtgatgggcaagtccgcatgatcagctgtggagcagacaagagcatctacttccgcactgcgcagaagtctggagatggagtgcagttcacacggacacaccacgtggtgcggaagacgaccctctatgacatggatgtggagcccagctggaagtacacggctatcggctgccaggaccgaaatattcggatatttaacatcagcagtggaaagcagaagaagctgtttaaagggtcacagggtgaggacggcacactcattaaggtgcagacagacccctcagggatctacattgccaccagctgttctgacaagaatctctccatttttgacttctcctcaggcgagtgcgtggccaccatgtttggccactcagagattgtcactggcatgaaatttagtaatgattgtaaacatctcatctctgtgtctggggacagctgcatatttgtgtggcgcctgagctctgagatgaccatcagcatgaggcagcgtctggccgagttgcgccagcgtcagcggggcggcaagcagcaaggaccatcctctccccaaagggcttctggacccaaccggcaccaggccccatcaatgctgtctcctggaccggctctctcatcagacagtgacaaggagggagaagatgaggggactgaagaagaacttccagcactgcccgtccttgccaagagtaccaagaaggcactggcctcggtccccagcccagctttgccccgaagcctgtcccactgggagatgagtcgggcacaggagtccgtggggttcctggacccagctcctgcagccaacccaggacccagaagaagagggcgctgggttcagccaggtgtggaactgagcgttagatccatgctggatctgcggcagctggaaacactggccccaagcctgcaggaccctagccaggactcgctggccatcatcccatctggtcccaggaagcatgggcaggaggcccttgagacttcactcactagccagaatgaaaagccccctcggcctcaggcttcccaaccttgttcctatccccatattatccgattattgtcacaagaggaaggggtctttgcccaagatctggaacctgcacccattgaagatggtattgtctacccggagccgagtgacaaccccaccatggataccagtgagttccaagtgcaggctccagcccggggaactctgggaagagtgtacccaggcagcaggagctcagaaaagcacagccctgacagtgcctgctctgtggattacagcagcagctgcctttccagcccggagcaccccactgaagactctgagagcacggagcccctcagtgtggatggcatctcctcagaccttgaagagccagctgagggtgatgaagaagaggaagaagaggagggaggcatgggcccctatgggctacaggagggcagcccccagactccagaccaggagcagtttctaaaacagcactttgagactctggccagtggagctgctccaggggccccagtgcaggtcccagagaggtcagagtctcggagtatctcttcacgattcctgttgcaagtacagacccgcccactcagggaaccatccccatcctcctcaagcctggcactgatgtcgagaccagcccaggtgccacaggcatctggtgagcagccgagaggcaatggtgccaatccccctggagcacccccggaggtggaaccgtcctctggcaaccccagcccccagcaggcagcctctgtgctgttgccacgatgccgtctcaaccctgacagcagctgggctcccaagagagtggccacagccagccccttttctggactccagaaggcccagtctgtgcacagtctggtgccacaggaaagacatgaggccagtctgcaggccccttcaccaggcgcactgctgtctcgggagatcgaagctcaggatggtctgggctccctgcccccagctgatggccgtccgtctcggcctcactcctatcagaaccccaccaccagttccatggccaagatatcccgcagtatctctgttggggagaacctgggcctggtggctgaacctcaagctcatgcccccatccgagtctcaccactcagcaagctggccctgcccagccgggctcacctggtcctggacatccccaaaccactgcctgaccgtcctaccctggctgcattctctcctgtcaccaaaggccgggcccctggcgaggcagaaaagcctggcttcccggtgggcctaggaaaagctcacagtacaactgagagatgggcctgtttgggggagggcaccactcccaagcctaggacagagtgccaggctcatcctgggcccagcagcccctgtgcccagcaactgccagtcagcagcctcttccaaggccctgaaaacttgcagcccccaccccctgagaagactcccaaccccatggaatgcaccaagccaggggcagccctgagccaggactcagagccagcggtgagcctggagcagtgtgagcagctggtggcagagctccgcggcagcgtgcgccaggcagtgcggctctaccactcggtggctggctgcaagatgccctcagcagagcaaagtcggattgcccagctcctcagagacaccttctcttcagtgcgacaggagctggaagctgtggctggggcagtgctgtccagcccaggcagcagccctggggctgtgggagccgagcagacacaggccctgctggagcaatactcagaactgttgcttcgagccgtggaacggcgtatggaacgcaaactctgagttctggaagcctgtcccaagtgaatgaatgctccagcgattccaaactgcagcccctctgcccctcaccaaaacctgcggggctgcttggagtggaaagcagggagcagtgttcagaggcaaagcagccttcccagccgctcctcgtggggggcctgtatttattaatttatttccctgactgttgcctcacttccttggaactcctgcctccacagcccctccagtggcagggacaggtcttgggtctttgtcatcttggtgctgtgagaggtaggagggcagcctgccccatctaggaatctgggaagggctggccctctcttagaagccatttgaaattactgcagggattagctccctgtggtggagcatacacagggtactctggggtcgaggtgagaggtgatgtggtattcagtgcccgtcagccaactgtgggccttcacctctacctgcacttcccctctcacaccagctgcactcccgtggctgccagagcagggtggttttccccaatacctggagctcagaaaggcagagccatctggccctccagggtgtccccagccatcaggagacttgagttggtatttggacctgagcccgcacattccactcccattctccctccaagaggggcccagcattgtatttccctgtgaccccttactctcctggccagaacttgagccagctgtgggatgttgctgcaggacagtaagccctcacctgggcaaacatgaagctctggcctcctttcctcagccccttgttcttccctgtcctccaccctggaccccagccggctgctggagcccagaggccaccttctccctgcatcctgaatgatgcttagtcagaagcctgtgttggaacatccctcgtttacggggcgctggcctacctcctgaggacctcagccacagatgagatcacacgcatgcacgtgcacacatgtacacacacacacctacctgcacagcacgctgttgagtgttggttgctagagtatctggctggctgctgtgtgcctggtttcctcacatcctgcctcagcttcaccaccctggcttatgtggaacacctatcagggagcagaaaaggggtgcagtacactaagtgaacccagattctggattcttggtgtccacagcctagctgatacgagatagcccataggacacctggtttaggtagaaggagcctcctcaaaggcagtgctgggcacccacgggtgtgctggatactggagtttgagaggagggaggtgctggggccaaaggagacactagaaaagtggtagatgggacaggtaagtggcagaggtgaggggataagttagaatgtaaaagggcagtaattaggggtgagggaaaggagataggggaccctaggaggtagagtgggaccatgtcgtgaggcagttgaagagttgaggaaaggtttttctgggccctactgctcccctctgctgcaggtaagtcagagcagctttaccacagcttcaggccacgagagccccttcacccgccctgctgcgccataggcagaggcttataaagaaatgggttctgggccaggtgtggtggctcaagcctgtaatcccagcactttgggaggccgaggcgggtggatcacctgaggttaggagttcgagatcagcctggccaacatggtgaaaccctgtctactaaaaataaaaaaattagctgggcgtggtggtgggcgcctgtaatcccagctactcgggaggtttaggcaggagaatcgcttgaaccctggaggtggaggtggaggttgcagtgagccgagatcgcgccattgcactccaacctaggtgacaaagctacacgccatctcaaaaaaaaaaaagaaaaagggttacaaaaggttcccagctccggggcatcagcctgagtgcgcttgagctgctccaaacctggcccttccccactcctctagcatcgccacccgcatggccctggaactcccgcggcggcgggggcgggcccgtgcctgctgtgccccgacttcccacaccagccgcgcccaccgcaggtgggactcaggttcgccctctgggccaggtccttcacgaggagggagctacccttcgccagaagtttgtgagaatgtggccgcccttttcctgccctctgccccatgtgggtggggggcctcgtggcccggccggcgccccgtccccttctgcatgtctgaggccaccggcaaccgccgccccactccagatttgcccccgccttgttttgaaagccccttatttataacttttatactttgtgcaggtcgcggcgcttcctgcctcatcctcggctgcatggggcgggggcgctgtttttaacgtgcccgtttgtactgatgtatgaacttgtcaataaacacaattgtttgtt

SEQ ID NO: 154913 - DNA, 7232 bp, Homo sapiens
  Payload ID: 10457
  Gene Symbol: MAPKBP1
  Gene Name: mitogen-activated protein kinase binding protein 1
  Uniprot ID: O60336
  ENST ID: ENST00000457542
  CDS Start-End: 287-4813
ggctccgcccacccagcccgcggcttggcccaggcggtagttcgcgttttgagccgatcgtgccaccatagctcctgctgctgcctctaccgctgcggctaccgcggcggagctgaaattgccgaacgcgatgcccgagggcgctgtgagcggggtggccttagctcgccgaggctggtcagtgagagggcatactgggaagccctctggagtgggaagacagtgccgctgttgagacaagacccaggactgggccggggactgtcccaaagggtttctcgtcataatggctgtggaagggtcaaccattaccagccggatcaagaatctgttgagatctccatccatcaaactgcgcaggagtaaggcaggaaaccgacgagaggacctcagctccaaggtgaccttggagaaggtgctgggaattacagtgtctggaggcagaggacttgcctgtgacccccgatcaggtttagttgcttacccagcagggtgtgtggttgtgttgttcaatccccggaaacacaaacagcaccacatcctcaacagttccaggaaaaccatcactgcccttgccttctcccctgatggcaagtacttggtcactggagagagtgggcacatgcctgccgtgcgggtttgggacgtggcagagcacagccaggtggccgagctgcaggagcacaagtatggtgtggcttgtgtggccttctctcctagcgccaagtacattgtctctgtgggctaccagcatgacatgatcgtcaacgtgtgggcctggaagaaaaacattgtggtggcctccaacaaggtgtccagtcgggtgacagcagtgtccttctctgaggattgcagctactttgtcactgcaggcaaccgacacatcaaattctggtatctcgatgacagcaagacctcaaaggtgaatgccactgtgcccttgctgggccgctcagggctgctgggagagctacggaacaacctattcactgatgtggcctgtggcagaggaaaaaaggcggacagtaccttctgcatcacgtcctcagggctgctgtgcgagttcagtgatcgaaggcttttggacaagtgggtggagctgaggaccacagtggcccactgcatctctgtgagccaagactacatcttctgtggctgtgctgatggcaccgtgcgccttttcaacccctctaacctgcacttccttagcaccttgccccgaccccatgctctggggacagacattgctagcgtcaccgaggccagtcgcctcttctctggagtggcgaatgccaggtatccagacaccattgccttgacctttgatcctactaatcagtggctgtcttgtgtgtacaacgatcatagcatttatgtttgggatgtgagggaccccaagaaagtgggcaaggtgtactcggctctgtatcattcttcctgcgtctggagtgtggaggtctaccccgaggtgaaggatagtaaccaggcctgcctgccccccagttcctttattacctgctcctcagacaacaccatccgcctgtggaacacagagagctccggggtgcatggctccaccctccaccgaaacatcctcagcagtgacctcattaaaatcatctatgtggatgggaacacccaggccctgctggacacagagctgcctggaggagacaaagctgatgcatccctgttggatccccgcgtgggcatccgctcggtgtgtgtcagccccaatggacagcatctagcatcaggggaccgtatgggcacacttagggtgcacgaacttcagtccctgagtgagatgctgaaggtggaggcccatgactctgagattctgtgcctggagtattctaagccagacacaggtctgaaactgctagcatcggcgagccgggaccggctgatccatgtgctggatgccgggcgggagtacagcctacagcagacgctggacgaacactcatcctccatcactgctgttaagtttgcagccagtgatgggcaagtccgcatgatcagctgtggagcagacaagagcatctacttccgcactgcgcagaagtctggagatggagtgcagttcacacggacacaccacgtggtgcggaagacgaccctctatgacatggatgtggagcccagctggaagtacacggctatcggctgccaggaccgaaatattcggatatttaacatcagcagtggaaagcagaagaagctgtttaaagggtcacagggtgaggacggcacactcattaaggtgcagacagacccctcagggatctacattgccaccagctgttctgacaagaatctctccatttttgacttctcctcaggcgagtgcgtggccaccatgtttggccactcagagattgtcactggcatgaaatttagtaatgattgtaaacatctcatctctgtgtctggggacagctgcatatttgtgtggcgcctgagctctgagatgaccatcagcatgaggcagcgtctggccgagttgcgccagcgtcagcggggcggcaagcagcaaggaccatcctctccccaaagggcttctggacccaaccggcaccaggccccatcaatgctgtctcctggaccggctctctcatcagacagtgacaaggagggagaagatgaggggactgaagaagaacttccagcactgcccgtccttgccaagagtaccaagaaggcactggcctcggtccccagcccagctttgccccgaagcctgtcccactgggagatgagtcgggcacaggagtccgtggggttcctggacccagctcctgcagccaacccaggacccagaagaagagggcgctgggttcagccaggtgtggaactgagcgttagatccatgctggatctgcggcagctggaaacactggccccaagcctgcaggaccctagccaggactcgctggccatcatcccatctggtcccaggaagcatgggcaggaggcccttgagacttcactcactagccagaatgaaaagccccctcggcctcaggcttcccaaccttgttcctatccccatattatccgattattgtcacaagaggaaggggtctttgcccaagatctggaacctgcacccattgaagatggtattgtctacccggagccgagtgacaaccccaccatggataccagtgagttccaagtgcaggctccagcccggggaactctgggaagagtgtacccaggcagcaggagctcagaaaagcacagccctgacagtgcctgctctgtggattacagcagcagctgcctttccagcccggagcaccccactgaagactctgagagcacggagcccctcagtgtggatggcatctcctcagaccttgaagagccagctgagggtgatgaagaagaggaagaagaggagggaggcatgggcccctatgggctacaggagggcagcccccagactccagaccaggagcagtttctaaaacagcactttgagactctggccagtggagctgctccaggggccccagtgcaggtcccagagaggtcagagtctcggagtatctcttcacgattcctgttgcaagtacagacccgcccactcagggaaccatccccatcctcctcaagcctggcactgatgtcgagaccagcccaggtgccacaggcatctggtgagcagccgagaggcaatggtgccaatccccctggagcacccccggaggtggaaccgtcctctggcaaccccagcccccagcaggcagcctctgtgctgttgccacgatgccgtctcaaccctgacagcagctgggctcccaagagagtggccacagccagccccttttctggactccagaaggcccagtctgtgcacagtctggtgccacaggaaagacatgaggccagtctgcaggccccttcaccaggcgcactgctgtctcgggagatcgaagctcaggatggtctgggctccctgcccccagctgatggccgtccgtctcggcctcactcctatcagaaccccaccaccagttccatggccaagatatcccgcagtatctctgttggggagaacctgggcctggtggctgaacctcaagctcatgcccccatccgagtctcaccactcagcaagctggccctgcccagccgggctcacctggtcctggacatccccaaaccactgcctgaccgtcctaccctggctgcattctctcctgtcaccaaaggccgggcccctggcgaggcagaaaagcctggcttcccggtgggcctaggaaaagctcacagtacaactgagagatgggcctgtttgggggagggcaccactcccaagcctaggacagagtgccaggctcatcctgggcccagcagcccctgtgcccagcaactgccagtcagcagcctcttccaaggccctgaaaacttgcagcccccaccccctgagaagactcccaaccccatggaatgcaccaagccaggggcagccctgagccaggactcagagccagcggtgagcctggagcagtgtgagcagctggtggcagagctccgcggcagcgtgcgccaggcagtgcggctctaccactcggtggctggctgcaagatgccctcagcagagcaaagtcggattgcccagctcctcagagacaccttctcttcagtgcgacaggagctggaagctgtggctggggcagtgctgtccagcccaggcagcagccctggggctgtgggagccgagcagacacaggccctgctggagcaatactcagaactgttgcttcgagccgtggaacggcgtatggaacgcaaactctgagttctggaagcctgtcccaagtgaatgaatgctccagcgattccaaactgcagcccctctgcccctcaccaaaacctgcggggctgcttggagtggaaagcagggagcagtgttcagaggcaaagcagccttcccagccgctcctcgtggggggcctgtatttattaatttatttccctgactgttgcctcacttccttggaactcctgcctccacagcccctccagtggcagggacaggtcttgggtctttgtcatcttggtgctgtgagaggtaggagggcagcctgccccatctaggaatctgggaagggctggccctctcttagaagccatttgaaattactgcagggattagctccctgtggtggagcatacacagggtactctggggtcgaggtgagaggtgatgtggtattcagtgcccgtcagccaactgtgggccttcacctctacctgcacttcccctctcacaccagctgcactcccgtggctgccagagcagggtggttttccccaatacctggagctcagaaaggcagagccatctggccctccagggtgtccccagccatcaggagacttgagttggtatttggacctgagcccgcacattccactcccattctccctccaagaggggcccagcattgtatttccctgtgaccccttactctcctggccagaacttgagccagctgtgggatgttgctgcaggacagtaagccctcacctgggcaaacatgaagctctggcctcctttcctcagccccttgttcttccctgtcctccaccctggaccccagccggctgctggagcccagaggccaccttctccctgcatcctgaatgatgcttagtcagaagcctgtgttggaacatccctcgtttacggggcgctggcctacctcctgaggacctcagccacagatgagatcacacgcatgcacgtgcacacatgtacacacacacacctacctgcacagcacgctgttgagtgttggttgctagagtatctggctggctgctgtgtgcctggtttcctcacatcctgcctcagcttcaccaccctggcttatgtggaacacctatcagggagcagaaaaggggtgcagtacactaagtgaacccagattctggattcttggtgtccacagcctagctgatacgagatagcccataggacacctggtttaggtagaaggagcctcctcaaaggcagtgctgggcacccacgggtgtgctggatactggagtttgagaggagggaggtgctggggccaaaggagacactagaaaagtggtagatgggacaggtaagtggcagaggtgaggggataagttagaatgtaaaagggcagtaattaggggtgagggaaaggagataggggaccctaggaggtagagtgggaccatgtcgtgaggcagttgaagagttgaggaaaggtttttctgggccctactgctcccctctgctgcaggtaagtcagagcagctttaccacagcttcaggccacgagagccccttcacccgccctgctgcgccataggcagaggcttataaagaaatgggttctgggccaggtgtggtggctcaagcctgtaatcccagcactttgggaggccgaggcgggtggatcacctgaggttaggagttcgagatcagcctggccaacatggtgaaaccctgtctactaaaaataaaaaaattagctgggcgtggtggtgggcgcctgtaatcccagctactcgggaggtttaggcaggagaatcgcttgaaccctggaggtggaggtggaggttgcagtgagccgagatcgcgccattgcactccaacctaggtgacaaagctacacgccatctcaaaaaaaaaaaagaaaaagggttacaaaaggttcccagctccggggcatcagcctgagtgcgcttgagctgctccaaacctggcccttccccactcctctagcatcgccacccgcatggccctggaactcccgcggcggcgggggcgggcccgtgcctgctgtgccccgacttcccacaccagccgcgcccaccgcaggtgggactcaggttcgccctctgggccaggtccttcacgaggagggagctacccttcgccagaagtttgtgagaatgtggccgcccttttcctgccctctgccccatgtgggtggggggcctcgtggcccggccggcgccccgtccccttctgcatgtctgaggccaccggcaaccgccgccccactccagatttgcccccgccttgttttgaaagccccttatttataacttttatactttgtgcaggtcgcggcgcttcctgcctcatcctcggctgcatggggcgggggcgctgtttttaacgtgcccgtttgtactgatgtatgaacttgtcaataaacacaattgtttgttaa

SEQ ID NO: 154914 - DNA, 4695 bp, Homo sapiens
  Payload ID: 10457
  Gene Symbol: MAPKBP1
  Gene Name: mitogen-activated protein kinase binding protein 1
  ENST ID: ENST00000505373
  CDS Start-End: 228-437
gtgccaccatagctcctgctgctgcctctaccgctgcggctaccgcggcggagctgaaattgccgaacgcgatgcccgagggcgctgtgagcggggtggccttagctcgccgaggctggtcagtgagagggcatactgggaagccctctggagtgggaagacagtgccgctgttgagacaagacccaggactgggccggggactgtcccaaagggtttctcgtcataatggctgtggaagggtcaaccattaccagccggatcaagaatctgttgagatctccatccatcaaactgcgcaggagtaaggcaggaaaccgacgagaggacctcagctccaaggtgtgtggttgtgttgttcaatccccggaaacacaaacagcaccacatcctcaacagttccaggaaaaccatcactgcccttgccttctcccctgatggcaagtacttggtcactggagagagtgggcacatgcctgccgtgcgggtttgggacgtggcagagcacagccaggtggccgagctgcaggagcacaagtatggtgtggcttgtgtggccttctctcctagcgccaagtacattgtctctgtgggctaccagcatgacatgatcgtcaacgtgtgggcctggaagaaaaacattgtggtggcctccaacaaggtgtccagtcgggtgacagcagtgtccttctctgaggattgcagctactttgtcactgcaggcaaccgacacatcaaattctggtatctcgatgacagcaagacctcaaaggtgaatgccactgtgcccttgctgggccgctcagggctgctgggagagctacggaacaacctattcactgatgtggcctgtggcagaggaaaaaaggcggacagtaccttctgcatcacgtcctcagggctgctgtgcgagttcagtgatcgaaggcttttggacaagtgggtggagctgaggaccacagtggcccactgcatctctgtgagccaagactacatcttctgtggctgtgctgatggcaccgtgcgccttttcaacccctctaacctgcacttccttagcaccttgccccgaccccatgctctggggacagacattgctagcgtcaccgaggccagtcgcctcttctctggagtggcgaatgccaggtatccagacaccattgccttgacctttgatcctactaatcagtggctgtcttgtgtgtacaacgatcatagcatttatgtttgggatgtgagggaccccaagaaagtgggcaaggtgtactcggctctgtatcattcttcctgcgtctggagtgtggaggacctcattaaaatcatctatgtggatgggaacacccaggccctgctggacacagagctgcctggaggagacaaagctgatgcatccctgttggatccccgcgtgggcatccgctcggtgtgtgtcagccccaatggacagcatctagcatcaggggaccgtatgggcacacttagggtgcacgaacttcagtccctgagtgagatgctgaaggtggaggcccatgactctgagattctgtgcctggagtattctaagccagacacaggtctgaaactgctagcatcggcgagccgggaccggctgatccatgtgctggatgccgggcgggagtacagcctacagcagacgctggacgaacactcatcctccatcactgctgttaagtttgcagccagtgatgggcaagtccgcatgatcagctgtggagcagacaagagcatctacttccgcactgcgcagaagtctggagatggagtgcagttcacacggacacaccacgtggtgcggaagacgaccctctatgacatggatgtggagcccagctggaagtacacggctatcggctgccaggaccgaaatattcggatatttaacatcagcagtggaaagcagaagaagctgtttaaagggtcacagggtgaggacggcacactcattaaggtgcagacagacccctcagggatctacattgccaccagctgttctgacaagaatctctccatttttgacttctcctcaggcgagtgcgtggccaccatgtttggccactcagagattgtcactggcatgaaatttagtaatgattgtaaacatctcatctctgtgtctggggacagctgcatatttgtgtggcgcctgagctctgagatgaccatcagcatgaggcagcgtctggccgagttgcgccagcgtcagcggggcggcaagcagcaaggaccatcctctccccaaagggcttctggacccaaccggcaccaggccccatcaatgctgtctcctggaccggctctctcatcagacagtgacaaggagggagaagatgaggggactgaagaagaacttccagcactgcccgtccttgccaagagtaccaagaaggcactggcctcggtccccagcccagctttgccccgaagcctgtcccactgggagatgagtcgggcacaggagtccgtggggttcctggacccagctcctgcagccaacccaggacccagaagaagagggcgctgggttcagccaggtgtggaactgagcgttagatccatgctggatctgcggcagctggaaacactggccccaagcctgcaggaccctagccaggactcgctggccatcatcccatctggtcccaggaagcatgggcaggaggcccttgagacttcactcactagccagaatgaaaagccccctcggcctcaggcttcccaaccttgttcctatccccatattatccgattattgtcacaagaggaaggggtctttgcccaagatctggaacctgcacccattgaagatggtattgtctacccggagccgagtgacaaccccaccatggataccagtgagttccaagtgcaggctccagcccggggaactctgggaagagtgtacccaggcagcaggagctcagaaaagcacagccctgacagtgcctgctctgtggattacagcagcagctgcctttccagcccggagcaccccactgaagactctgagagcacggagcccctcagtgtggatggcatctcctcagaccttgaagagccagctgagggtgatgaagaagaggaagaagaggagggaggcatgggcccctatgggctacaggagggcagcccccagactccagaccaggagcagtttctaaaacagcactttgagactctggccagtggagctgctccaggggccccagtgcaggtcccagagaggtcagagtctcggagtatctcttcacgattcctgttgcaagtacagacccgcccactcagggaaccatccccatcctcctcaagcctggcactgatgtcgagaccagcccaggtgccacaggcatctggtgagcagccgagaggcaatggtgccaatccccctggagcacccccggaggtggaaccgtcctctggcaaccccagcccccagcaggcagcctctgtgctgttgccacgatgccgtctcaaccctgacagcagctgggctcccaagagagtggccacagccagccccttttctggactccagaaggcccagtctgtgcacagtctggtgccacaggaaagacatgaggccagtctgcaggccccttcaccaggcgcactgctgtctcgggagatcgaagctcaggatggtctgggctccctgcccccagctgatggccgtccgtctcggcctcactcctatcagaaccccaccaccagttccatggccaagatatcccgcagtatctctgttggggagaacctgggcctggtggctgaacctcaagctcatgcccccatccgagtctcaccactcagcaagctggccctgcccagccgggctcacctggtcctggacatccccaaaccactgcctgaccgtcctaccctggctgcattctctcctgtcaccaaaggccgggcccctggcgaggcagaaaagcctggcttcccggtgggcctaggaaaagctcacagtacaactgagagatgggcctgtttgggggagggcaccactcccaagcctaggacagagtgccaggctcatcctgggcccagcagcccctgtgcccagcaactgccagtcagcagcctcttccaaggccctgaaaacttgcagcccccaccccctgagaagactcccaaccccatggaatgcaccaagccaggggcagccctgagccaggactcagagccagcggtgagcctggagcagtgtgagcagctggtggcagagctccgcggcagcgtgcgccaggcagtgcggctctaccactcggtggctggctgcaagatgccctcagcagagcaaagtcggattgcccagctcctcagagacaccttctcttcagtgcgacaggagctggaagctgtggctggggcagtgctgtccagcccaggcagcagccctggggctgtgggagccgagcagacacaggccctgctggagcaatactcagaactgttgcttcgagccgtggaacggcgtatggaacgcaaactctgagttctggaagcctgtcccaagtgaatgaatgctccagcgattccaaactgcagcccctctgcccctcaccaaaacctgcggggctgcttggagtggaaagcagggagcagtgttcagaggcaaagcagccttcccagccgctcctcgtggggggcctgtatttattaatttatttccctg

SEQ ID NO: 154915 - DNA, 908 bp, Homo sapiens
  Payload ID: 10457
  Gene Symbol: MAPKBP1
  Gene Name: mitogen-activated protein kinase binding protein 1
  ENST ID: ENST00000510535
  CDS Start-End: 440-908
agagcgagctctggaggatagggagtgggggagggaggctcccgtggcagaacgagttgtgggctacggcgagccccgccgcgtccccgccggcgctagcgcaggtgtccaggcctgcggaaatccctggtggtctcggcggcctcctcccttggacactacagttgccatgggaacagttgggcattaacgggaaccagatcgtccacgagaccaactggggcccatcccatccatctcgccagttaaacgcctctggcgggcgtgggcctggcatttcttcgtggcttaggattttccccccctttttcgtgagcctttccttccgacgttgtaagaaactgtgcagggctagaaggtggggatgagggaaatggtgagagcaatacccagaggtaaaagctgcagacttcgctaggcagaagggtttctcgtcataatggctgtggaagggtcaaccattaccagccggatcaagaatctgttgagatctccatccatcaaactgcgcaggagtaaggcaggaaaccgacgagaggacctcagctccaaggtgaccttggagaaggtgctgggaattacagtgtctggaggcagaggacttgcctgtgacccccgatcaggtttagttgcttacccagcagggtgtgtggttgtgttgttcaatccccggaaacacaaacagcaccacatcctcaacagttccaggaaaaccatcactgcccttgccttctcccctgatggcaagtacttggtcactggagagagtgggcacatgcctgccgtgcgggtttgggacgtggcagagcacagccaggtggccgagctgcaggagcacaagtatggtgtggcttgtgtggccttctctcctagcgccaagtacattgtctctgtgggctaccagcatg

SEQ ID NO: 154916 - DNA, 5394 bp, Homo sapiens
  Payload ID: 10457
  Gene Symbol: MAPKBP1
  Gene Name: mitogen-activated protein kinase binding protein 1
  Uniprot ID: O60336
  ENST ID: ENST00000514566
  CDS Start-End: 179-3874
ggagctgaaattgccgaacgcgatgcccgagggcgctgtgagcggggtggccttagctcgccgaggctggtcagtgagagggcatactgggaagccctctggagtgggaagacagtgccgctgttgagacaagacccaggactgggccggggactgtcccaaagggtttctcgtcataatggctgtggaagggtcaaccattaccagccggatcaagaatctgttgagatctccatccatcaaactgcgcaggagtaaggcaggaaaccgacgagaggacctcagctccaaggtgaccttggagaaggtgctgggaattacagtgtctggaggcagaggacttgcctgtgacccccgatcaggtttagttgcttacccagcagggtgtgtggttgtgttgttcaatccccggaaacacaaacagcaccacatcctcaacagttccaggaaaaccatcactgcccttgccttctcccctgatggcaagtacttggtcactggagagagtgggcacatgcctgccgtgcgggtttgggacgtggcagagcacagccaggtggccgagctgcaggagcacaagtatggtgtggcttgtgtggccttctctcctagcgccaagtacattgtctctgtgggctaccagcatgacatgatcgtcaacgtgtgggcctggaagaaaaacattgtggtggcctccaacaaggtgtccagtcgggtgacagcagtgtccttctctgaggattgcagctactttgtcactgcaggcaaccgacacatcaaattctggtatctcgatgacagcaagacctcaaaggtgaatgccactgtgcccttgctgggccgctcagggctgctgggagagctacggaacaacctattcactgatgtggcctgtggcagaggaaaaaaggcggacagtaccttctgcatcacgtcctcagggctgctgtgcgagttcagtgatcgaaggcttttggacaagtgggtggagctgaggaccacagtggcccactgcatctctgtgagccaagactacatcttctgtggctgtgctgatggcaccgtgcgccttttcaacccctctaacctgcacttccttagcaccttgccccgaccccatgctctggggacagacattgctagcgtcaccgaggccagtcgcctcttctctggagtggcgaatgccaggtatccagacaccattgccttgacctttgatcctactaatcagtggctgtcttgtgtgtacaacgatcatagcatttatgtttgggatgtgagggaccccaagaaagtgggcaaggtgtactcggctctgtatcattcttcctgcgtctggagtgtggaggtctaccccgaggtgaaggatagtaaccaggcctgcctgccccccagttcctttattacctgctcctcagacaacaccatccgcctgtggaacacagagagctccggggtgcatggctccaccctccaccgaaacatcctcagcagtgacctcattaaaatcatctatgtggatgggaacacccaggccctgctggacacagagctgcctggaggagacaaagctgatgcatccctgttggatccccgcgtgggcatccgctcggtgtgtgtcagccccaatggacagcatctagcatcaggggaccgtatgggcacacttagggtgcacgaacttcagtccctgagtgagatgctgaaggtggaggcccatgactctgagattctgtgcctggagtattctaagccagacacaggtctgaaactgctagcatcggcgagccgggaccggctgatccatgtgctggatgccgggcgggagtacagcctacagcagacgctggacgaacactcatcctccatcactgctgttaagtttgcagccagtgatgggcaagtccgcatgatcagctgtggagcagacaagagcatctacttccgcactgcgcagaagtctggagatggagtgcagttcacacggacacaccacgtggtgcggaagacgaccctctatgacatggatgtggagcccagctggaagtacacggctatcggctgccaggaccgaaatattcggatatttaacatcagcagtggaaagcagaagaagctgtttaaagggtcacagggtgaggacggcacactcattaaggtgcagacagacccctcagggatctacattgccaccagctgttctgacaagaatctctccatttttgacttctcctcaggcgagtgcgtggccaccatgtttggccactcagagattgtcactggcatgaaatttagtaatgattgtaaacatctcatctctgtgtctggggacagctgcatatttgtgtggcgcctgagctctgagatgaccatcagcatgaggcagcgtctggccgagttgcgccagcgtcagcggggcggcaagcagcaaggaccatcctctccccaaagggcttctggacccaaccggcaccaggccccatcaatgctgtctcctggaccggctctctcatcagacagtgacaaggagggagaagatgaggggactgaagaagaacttccagcactgcccgtccttgccaagagtaccaagaaggcactggcctcggtccccagcccagctttgccccgaagcctgtcccactgggagatgagtcgggcacaggagtccgtggggttcctggacccagctcctgcagccaacccaggacccagaagaagagggcgctgggttcagccaggtgtggaactgagcgttagatccatgctggatctgcggcagctggaaacactggccccaagcctgcaggaccctagccaggactcgctggccatcatcccatctggtcccaggaagcatgggcaggaggcccttgagacttcactcactagccagaatgaaaagccccctcggcctcaggcttcccaaccttgttcctatccccatattatccgattattgtcacaagaggaaggggtctttgcccaagatctggaacctgcacccattgaagatggtattgtctacccggagccgagtgacaaccccaccatggataccagtgagttccaagtgcaggctccagcccggggaactctgggaagagtgtacccaggcagcaggagctcagaaaagcacagccctgacagtgcctgctctgtggattacagcagcagctgcctttccagcccggagcaccccactgaagactctgagagcacggagcccctcagtgtggatggcatctcctcagaccttgaagagccagctgagggtgatgaagaagaggaagaagaggagggaggcatgggcccctatgggctacaggagggcagcccccagactccagaccaggagcagtttctaaaacagcactttgagactctggccagtggagctgctccaggggccccagtgcaggtcccagagaggtcagagtctcggagtatctcttcacgattcctgttgcaagtacagacccgcccactcagggaaccatccccatcctcctcaagcctggcactgatgtcgagaccagcccaggtgccacaggcatctgagccagcggtgagcctggagcagtgtgagcagctggtggcagagctccgcggcagcgtgcgccaggcagtgcggctctaccactcggtggctggctgcaagatgccctcagcagagcaaagtcggattgcccagctcctcagagacaccttctcttcagtgcgacaggagctggaagctgtggctggggcagtgctgtccagcccaggcagcagccctggggctgtgggagccgagcagacacaggccctgctggagcaatactcagaactgttgcttcgagccgtggaacggcgtatggaacgcaaactctgagttctggaagcctgtcccaagtgaatgaatgctccagcgattccaaactgcagcccctctgcccctcaccaaaacctgcggggctgcttggagtggaaagcagggagcagtgttcagaggcaaagcagccttcccagccgctcctcgtggggggcctgtatttattaatttatttccctgactgttgcctcacttccttggaactcctgcctccacagcccctccagtggcagggacaggtcttgggtctttgtcatcttggtgctgtgagaggtaggagggcagcctgccccatctaggaatctgggaagggctggccctctcttagaagccatttgaaattactgcagggattagctccctgtggtggagcatacacagggtactctggggtcgaggtgagaggtgatgtggtattcagtgcccgtcagccaactgtgggccttcacctctacctgcacttcccctctcacaccagctgcactcccgtggctgccagagcagggtggttttccccaatacctggagctcagaaaggcagagccatctggccctccagggtgtccccagccatcaggagacttgagttggtatttggacctgagcccgcacattccactcccattctccctccaagaggggcccagcattgtatttccctgtgaccccttactctcctggccagaacttgagccagctgtgggatgttgctgcaggacagtaagccctcacctgggcaaacatgaagctctggcctcctttcctcagccccttgttcttccctgtcctccaccctggaccccagccggctgctggagcccagaggccaccttctccctgcatcctgaatgatgcttagtcagaagcctgtgttggaacatccctcgtttacggggcgctggcctacctcctgaggacctcagccacagatgagatcacacgcatgcacgtgcacacatgtacacacacacacctacctgcacagcacgctgttgagtgttggttgctagagtatctggctggctgctgtgtgcctggtttcctcacatcctgcctcagcttcaccaccctggcttatgtggaacacctatcagggagcagaaaaggggtgcagtacactaagtgaacccagattctggattcttggtgtccacagcctagctgatacgagatagcccataggacacctggtttaggtagaaggagcctcctcaaaggcagtgctgggcacccacgggtgtgctggatactggagtttgagaggagggaggtgctggggccaaaggagacactagaaaagtggtagatgggacaggtaagtggcagaggtgaggggataagttagaatgtaaaagggcagtaattaggggtgagggaaaggagataggggaccctaggaggtagagtgggaccatgtcgtgaggcagttgaagagttgaggaaaggtttttctgggccctactgctcccctctgctgcaggtaagtcagagcagctttaccacagcttcaggccacgaga

SEQ ID NO: 154917 - DNA, 4804 bp, Homo sapiens
  Payload ID: 10457
  Gene Symbol: MAPKBP1
  Gene Name: mitogen-activated protein kinase binding protein 1
  ENST ID: ENST00000512970
  CDS Start-End: 287-1282
ggctccgcccacccagcccgcggcttggcccaggcggtagttcgcgttttgagccgatcgtgccaccatagctcctgctgctgcctctaccgctgcggctaccgcggcggagctgaaattgccgaacgcgatgcccgagggcgctgtgagcggggtggccttagctcgccgaggctggtcagtgagagggcatactgggaagccctctggagtgggaagacagtgccgctgttgagacaagacccaggactgggccggggactgtcccaaagggtttctcgtcataatggctgtggaagggtcaaccattaccagccggatcaagaatctgttgagatctccatccatcaaactgcgcaggagtaaggcaggaaaccgacgagaggacctcagctccaaggtgaccttggagaaggtgctgggaattacagtgtctggaggcagaggacttgcctgtgacccccgatcaggtttagttgcttacccagcagggtgtgtggttgtgttgttcaatccccggaaacacaaacagcaccacatcctcaacagttccaggaaaaccatcactgcccttgccttctcccctgatggcaagtacttggtcactggagagagtgggcacatgcctgccgtgcgggtttgggacgtggcagagcacagccaggtggccgagctgcaggagcacaagtatggtgtggcttgtgtggccttctctcctagcgccaagtacattgtctctgtgggctaccagcatgacatgatcgtcaacgtgtgggcctggaagaaaaacattgtggtggcctccaacaaggtgtccagtcgggtgacagcagtgtccttctctgaggattgcagctactttgtcactgcaggcaaccgacacatcaaattctggtatctcgatgacagcaagacctcaaaggtgaatgccactgtgcccttgctgggccgctcagggctgctgggagagctacggaacaacctattcactgatgtggcctgtggcagaggaaaaaaggcggacagtaccttctgcatcacgtcctcagggctgctgtgcgagttcagtgatcgaaggcttttggacaagtgggtggagctgaggaccacagtggcccactgcatctctgtgagccaagactacatcttctgtggctgtgctgatggcaccgtgcgccttttcaacccctctaacctgcacttccttagcaccttgccccgaccccatgctctggggacagacattgctagcgtcaccgaggccaggtctaccccgaggtgaaggatagtaaccaggcctgcctgccccccagttcctttattacctgctcctcagacaacaccatccgcctgtggaacacagagagctccggggtgcatggctccaccctccaccgaaacatcctcagcagtgacctcattaaaatcatctatgtggatgggaacacccaggccctgctggacacagagctgcctggaggagacaaagctgatgcatccctgttggatccccgcgtgggcatccgctcggtgtgtgtcagccccaatggacagcatctagcatcaggggaccgtatgggcacacttagggtgcacgaacttcagtccctgagtgagatgctgaaggtggaggcccatgactctgagattctgtgcctggagtattctaagccagacacaggtctgaaactgctagcatcggcgagccgggaccggctgatccatgtgctggatgccgggcgggagtacagcctacagcagacgctggacgaacactcatcctccatcactgctgttaagtttgcagccagtgatgggcaagtccgcatgatcagctgtggagcagacaagagcatctacttccgcactgcgcagaagtctggagatggagtgcagttcacacggacacaccacgtggtgcggaagacgaccctctatgacatggatgtggagcccagctggaagtacacggctatcggctgccaggaccgaaatattcggatatttaacatcagcagtggaaagcagaagaagctgtttaaagggtcacagggtgaggacggcacactcattaaggtgcagacagacccctcagggatctacattgccaccagctgttctgacaagaatctctccatttttgacttctcctcaggcgagtgcgtggccaccatgtttggccactcagagattgtcactggcatgaaatttagtaatgattgtaaacatctcatctctgtgtctggggacagctgcatatttgtgtggcgcctgagctctgagatgaccatcagcatgaggcagcgtctggccgagttgcgccagcgtcagcggggcggcaagcagcaaggaccatcctctccccaaagggcttctggacccaaccggcaccaggccccatcaatgctgtctcctggaccggctctctcatcagacagtgacaaggagggagaagatgaggggactgaagaagaacttccagcactgcccgtccttgccaagagtaccaagaaggcactggcctcggtccccagcccagctttgccccgaagcctgtcccactgggagatgagtcgggcacaggagtccgtggggttcctggacccagctcctgcagccaacccaggacccagaagaagagggcgctgggttcagccaggtgtggaactgagcgttagatccatgctggatctgcggcagctggaaacactggccccaagcctgcaggaccctagccaggactcgctggccatcatcccatctggtcccaggaagcatgggcaggaggcccttgagacttcactcactagccagaatgaaaagccccctcggcctcaggcttcccaaccttgttcctatccccatattatccgattattgtcacaagaggaaggggtctttgcccaagatctggaacctgcacccattgaagatggtattgtctacccggagccgagtgacaaccccaccatggataccagtgagttccaagtgcaggctccagcccggggaactctgggaagagtgtacccaggcagcaggagctcagaaaagcacagccctgacagtgcctgctctgtggattacagcagcagctgcctttccagcccggagcaccccactgaagactctgagagcacggagcccctcagtgtggatggcatctcctcagaccttgaagagccagctgagggtgatgaagaagaggaagaagaggagggaggcatgggcccctatgggctacaggagggcagcccccagactccagaccaggagcagtttctaaaacagcactttgagactctggccagtggagctgctccaggggccccagtgcaggtcccagagaggtcagagtctcggagtatctcttcacgattcctgttgcaagtacagacccgcccactcagggaaccatccccatcctcctcaagcctggcactgatgtcgagaccagcccaggtgccacaggcatctggtgagcagccgagaggcaatggtgccaatccccctggagcacccccggaggtggaaccgtcctctggcaaccccagcccccagcaggcagcctctgtgctgttgccacgatgccgtctcaaccctgacagcagctgggctcccaagagagtggccacagccagccccttttctggactccagaaggcccagtctgtgcacagtctggtgccacaggaaagacatgaggccagtctgcaggccccttcaccaggcgcactgctgtctcgggagatcgaagctcaggatggtctgggctccctgcccccagctgatggccgtccgtctcggcctcactcctatcagaaccccaccaccagttccatggccaagatatcccgcagtatctctgttggggagaacctgggcctggtggctgaacctcaagctcatgcccccatccgagtctcaccactcagcaagctggccctgcccagccgggctcacctggtcctggacatccccaaaccactgcctgaccgtcctaccctggctgcattctctcctgtcaccaaaggccgggcccctggcgaggcagaaaagcctggcttcccggtgggcctaggaaaagctcacagtacaactgagagatgggcctgtttgggggagggcaccactcccaagcctaggacagagtgccaggctcatcctgggcccagcagcccctgtgcccagcaactgccagtcagcagcctcttccaaggccctgaaaacttgcagcccccaccccctgagaagactcccaaccccatggaatgcaccaagccaggggcagccctgagccaggactcagagccagcggtgagcctggagcagtgtgagcagctggtggcagagctccgcggcagcgtgcgccaggcagtgcggctctaccactcggtggctggctgcaagatgccctcagcagagcaaagtcggattgcccagctcctcagagacaccttctcttcagtgcgacaggagctggaagctgtggctggggcagtgctgtccagcccaggcagcagccctggggctgtgggagccgagcagacacaggccctgctggagcaatactcagaactgttgcttcgagccgtggaacggcgtatggaacgcaaactctgagttctggaagcctgtcccaagtgaatgaatgctccagcgattccaaactgcagcccctctgcccctcaccaaaacctgcggggctgcttggagtggaaagcagggagcagtgttcagaggcaaagcagccttcccagccgctcctcgtggggggcctgtatttattaatttatttccctga

SEQ ID NO: 154918 - DNA, 210 bp, Homo sapiens
  Payload ID: 10457
  Gene Symbol: MAPKBP1
  Gene Name: mitogen-activated protein kinase binding protein 1
  ENST ID: ENST00000627631
  CDS Start-End: 1-210
atggctgtggaagggtcaaccattaccagccggatcaagaatctgttgagatctccatccatcaaactgcgcaggagtaaggcaggaaaccgacgagaggacctcagctccaaggtgtgtggttgtgttgttcaatccccggaaacacaaacagcaccacatcctcaacagttccaggaaaaccatcactgcccttgccttctcccctga

SEQ ID NO: 154919 - DNA, 3410 bp, Homo sapiens
  Payload ID: 10458
  Gene Symbol: MAP2K1
  Gene Name: mitogen-activated protein kinase kinase 1
  Uniprot ID: Q02750
  ENST ID: ENST00000307102
  CDS Start-End: 532-1713
gaggcaataggggcggagccgagtgggagtgtggaaagcgccgcatcccgggtgggaggcgaggcttccccttccccgcccctcccccggcctccagtccctcccagggccgcttcgcagagcggctaggagcacggcggcggcggcactttccccggcaggagctggagctgggctctggtgcgcgcgcggctgtgccgcccgagccggagggactggttggttgagagagagagaggaagggaatcccgggctgccgaaccgcacgttcagcccgctccgctcctgcagggcagcctttcggctctctgcgcgcgaagccgagtcccgggcgggtggggcgggggtccactgagaccgctaccggcccctcggcgctgacgggaccgcgcggggcgcacccgctgaaggcagccccggggcccgcggcccggacttggtcctgcgcagcgggcgcggggcagcgcagcgggaggaagcgagaggtgctgccctccccccggagttggaagcgcgttacccgggtccaaaatgcccaagaagaagccgacgcccatccagctgaacccggcccccgacggctctgcagttaacgggaccagctctgcggagaccaacttggaggccttgcagaagaagctggaggagctagagcttgatgagcagcagcgaaagcgccttgaggcctttcttacccagaagcagaaggtgggagaactgaaggatgacgactttgagaagatcagtgagctgggggctggcaatggcggtgtggtgttcaaggtctcccacaagccttctggcctggtcatggccagaaagctaattcatctggagatcaaacccgcaatccggaaccagatcataagggagctgcaggttctgcatgagtgcaactctccgtacatcgtgggcttctatggtgcgttctacagcgatggcgagatcagtatctgcatggagcacatggatggaggttctctggatcaagtcctgaagaaagctggaagaattcctgaacaaattttaggaaaagttagcattgctgtaataaaaggcctgacatatctgagggagaagcacaagatcatgcacagagatgtcaagccctccaacatcctagtcaactcccgtggggagatcaagctctgtgactttggggtcagcgggcagctcatcgactccatggccaactccttcgtgggcacaaggtcctacatgtcgccagaaagactccaggggactcattactctgtgcagtcagacatctggagcatgggactgtctctggtagagatggcggttgggaggtatcccatccctcctccagatgccaaggagctggagctgatgtttgggtgccaggtggaaggagatgcggctgagaccccacccaggccaaggacccccgggaggccccttagctcatacggaatggacagccgacctcccatggcaatttttgagttgttggattacatagtcaacgagcctcctccaaaactgcccagtggagtgttcagtctggaatttcaagattttgtgaataaatgcttaataaaaaaccccgcagagagagcagatttgaagcaactcatggttcatgcttttatcaagagatctgatgctgaggaagtggattttgcaggttggctctgctccaccatcggccttaaccagcccagcacaccaacccatgctgctggcgtctaagtgtttgggaagcaacaaagagcgagtcccctgcccggtggtttgccatgtcgcttttgggcctccttcccatgcctgtctctgttcagatgtgcatttcacctgtgacaaaggatgaagaacacagcatgtgccaagattctactcttgtcatttttaatattactgtctttattcttattactattattgttcccctaagtggattggctttgtgcttggggctatttgtgtgtatgctgatgatcaaaacctgtgccaggctgaattacagtgaaattttggtgaatgtgggtagtcattcttacaattgcactgctgttcctgctccatgactggctgtctgcctgtattttcgggattctttgacatttggtggtactttattcttgctgggcatactttctctctaggagggagccttgtgagatccttcacaggcagtgcatgtgaagcatgctttgctgctatgaaaatgagcatcagagagtgtacatcatgttattttattattattatttgcttttcatgtagaactcagcagttgacatccaaatctagccagagcccttcactgccatgatagctggggcttcaccagtctgtctactgtggtgatctgtagacttctggttgtatttctatatttattttcagtatactgtgtgggatacttagtggtatgtctctttaagttttgattaatgtttcttaaatggaattattttgaatgtcacaaattgatcaagatattaaaatgtcggatttatctttccccatatccaagtaccaatgctgttgtaaacaacgtgtatagtgcctaaaattgtatgaaaatccttttaaccattttaacctagatgtttaacaaatctaatctcttattctaataaatatactatgaaataaaaaaaaaaggatgaaagctacttttgcttttgtggtaagcttttcagtttctttagtacacaagaaatactggtttagccaagcaacactggtgagggggaaaggtgaagatgaggaggaggctggaaggcagaaacaggacaccgagttcagtgctttggactaatggggcttcctgtaatttcaatctctggactcagtccagctcttctcacccaacacccttatctgtgactcttccaaccaccttccttgtgggacctgtgaatagatcctgtatattcctttgatctcttttatacaagggaaaagcagctgatgggggactgggagcaaatctgagaaaaatgacaaaacatttcttatctcacagaacatttctcattttccatataccaatagttgagctgagggcctgcctgcacttttaggctgtcatgctcataggagggccttgctggtggccagcttgcctacctggtgtgggagctttctgcacaacataggacagtctgtctcctttgcgacattaagcaatggtttcccttctttcaccacttacacttaaccacaccttcctggaaaggaggaatgtgcctggcgctggctttgtcatgcctgtgaggtggcagtgatgtcacaaagccattgggaacttcttttaggtacatttgaggctgctggtcaatacctctccgctcattattttctttgaaagggcaggttacagaaactaaagccaacatatatatttataaataaaaggcccattcctttttagattaaaa

SEQ ID NO: 154920 - DNA, 1432 bp, Homo sapiens
  Payload ID: 10458
  Gene Symbol: MAP2K1
  Gene Name: mitogen-activated protein kinase kinase 1
  ENST ID: ENST00000566326
  CDS Start-End: 51-704
gtcttctccagaagccctggaagaatgaactgtaaggcctggactatggaatggtacctgtgcaccagcaattcctgagcaagcagcacaatgtcaagccctccaacatcctagtcaactcccgtggggagatcaagctctgtgactttggggtcagcgggcagctcatcgactccatggccaactccttcgtgggcacaaggtcctacatgtcgccagaaagactccaggggactcattactctgtgcagtcagacatctggagcatgggactgtctctggtagagatggcggttgggaggtatcccatccctcctccagatgccaaggagctggagctgatgtttgggtgccaggtggaaggagatgcggctgagaccccacccaggccaaggacccccgggaggccccttagctcatacggaatggacagccgacctcccatggcaatttttgagttgttggattacatagtcaacgagcctcctccaaaactgcccagtggagtgttcagtctggaatttcaagattttgtgaataaatgcttaataaaaaaccccgcagagagagcagatttgaagcaactcatggttcatgcttttatcaagagatctgatgctgaggaagtggattttgcaggttggctctgctccaccatcggccttaaccagcccagcacaccaacccatgctgctggcgtctaagtgtttgggaagcaacaaagagcgagtcccctgcccggtggtttgccatgtcgcttttgggcctccttcccatgcctgtctctgttcagatgtgcatttcacctgtgacaaaggatgaagaacacagcatgtgccaagattctactcttgtcatttttaatattactgtctttattcttattactattattgttcccctaagtggattggctttgtgcttggggctatttgtgtgtatgctgatgatcaaaacctgtgccaggctgaattacagtgaaattttggtgaatgtgggtagtcattcttacaattgcactgctgttcctgctccatgactggctgtctgcctgtattttcgggattctttgacatttggtggtactttattcttgctgggcatactttctctctaggagggagccttgtgagatccttcacaggcagtgcatgtgaagcatgctttgctgctatgaaaatgagcatcagagagtgtacatcatgttattttattattattatttgcttttcatgtagaactcagcagttgacatccaaatctagccagagcccttcactgccatgatagctggggcttcaccagtctgtctactgtggtgatctgtagacttctggttgtatttctatatttattttcagtatactgtgtgggatacttagtggtatgtctctttaagttttgattaatgtttcttaaatggaattatttt

SEQ ID NO: 154921 - DNA, 1734 bp, Homo sapiens
  Payload ID: 10459
  Gene Symbol: MAP2K2
  Gene Name: mitogen-activated protein kinase kinase 2
  Uniprot ID: P36507
  ENST ID: ENST00000262948
  CDS Start-End: 255-1457
cccctgcctctcggactcgggctgcggcgtcagccttcttcgggcctcggcagcggtagcggctcgctcgcctcagccccagcgcccctcggctaccctcggcccaggcccgcagcgccgcccgccctcggccgccccgacgccggcctgggccgcggccgcagccccgggctcgcgtaggcgccgaccgctcccggcccgccccctatgggccccggctagaggcgccgccgccgccggcccgcggagccccgatgctggcccggaggaagccggtgctgccggcgctcaccatcaaccctaccatcgccgagggcccatcccctaccagcgagggcgcctccgaggcaaacctggtggacctgcagaagaagctggaggagctggaacttgacgagcagcagaagaagcggctggaagcctttctcacccagaaagccaaggtcggcgaactcaaagacgatgacttcgaaaggatctcagagctgggcgcgggcaacggcggggtggtcaccaaagtccagcacagaccctcgggcctcatcatggccaggaagctgatccaccttgagatcaagccggccatccggaaccagatcatccgcgagctgcaggtcctgcacgaatgcaactcgccgtacatcgtgggcttctacggggccttctacagtgacggggagatcagcatttgcatggaacacatggacggcggctccctggaccaggtgctgaaagaggccaagaggattcccgaggagatcctggggaaagtcagcatcgcggttctccggggcttggcgtacctccgagagaagcaccagatcatgcaccgagatgtgaagccctccaacatcctcgtgaactctagaggggagatcaagctgtgtgacttcggggtgagcggccagctcatcgactccatggccaactccttcgtgggcacgcgctcctacatggctccggagcggttgcagggcacacattactcggtgcagtcggacatctggagcatgggcctgtccctggtggagctggccgtcggaaggtaccccatccccccgcccgacgccaaagagctggaggccatctttggccggcccgtggtcgacggggaagaaggagagcctcacagcatctcgcctcggccgaggccccccgggcgccccgtcagcggtcacgggatggatagccggcctgccatggccatctttgaactcctggactatattgtgaacgagccacctcctaagctgcccaacggtgtgttcacccccgacttccaggagtttgtcaataaatgcctcatcaagaacccagcggagcgggcggacctgaagatgctcacaaaccacaccttcatcaagcggtccgaggtggaagaagtggattttgccggctggttgtgtaaaaccctgcggctgaaccagcccggcacacccacgcgcaccgccgtgtgacagtggccgggctccctgcgtcccgctggtgacctgcccaccgtccctgtccatgccccgcccttccagctgaggacaggctggcgcctccacccaccctcctgcctcacccctgcggagagcaccgtggcggggcgacagcgcatgcaggaacgggggtctcctctcctgcccgtcctggccggggtgcctctggggacgggcgacgctgctgtgtgtggtctcagaggctctgcttccttaggttacaaaacaaaacagggagagaaaaagcaaa

SEQ ID NO: 154922 - DNA, 1471 bp, Homo sapiens
  Payload ID: 10459
  Gene Symbol: MAP2K2
  Gene Name: mitogen-activated protein kinase kinase 2
  ENST ID: ENST00000394867
  CDS Start-End: 295-1206
ggactcgggctgcggcgtcagccttcttcgggcctcggcagcggtagcggctcgctcgcctcaggcccatcccctaccagcgagggcgcctccgaggcaaacctggtggacctgcagaagaagctggaggagctggaacttgacgagcagcagaagaagcggctggaagcctttctcacccagaaagccaaggtcggcgaactcaaagacgatgacttcgaaaggatctcagagctgggcgcgggcaacggcggggtggtcaccaaagtccagcacagaccctcgggcctcatcatggccaggaagctgatccaccttgagatcaagccggccatccggaaccagatcatccgcgagctgcaggtcctgcacgaatgcaactcgccgtacatcgtgggcttctacggggccttctacagtgacggggagatcagcatttgcatggaacacatggacggcggctccctggaccaggtgctgaaagaggccaagaggattcccgaggagatcctggggaaagtcagcatcgcggttctccggggcttggcgtacctccgagagaagcaccagatcatgcaccgagatgtgaagccctccaacatcctcgtgaactctagaggggagatcaagctgtgtgacttcggggtgagcggccagctcatcgactccatggccaactccttcgtgggcacgcgctcctacatggctccggagcggttgcagggcacacattactcggtgcagtcggacatctggagcatgggcctgtccctggtggagctggccgtcggaaggtaccccatccccccgcccgacgccaaagagctggaggccatctttggccggcccgtggtcgacggggaagaaggagagcctcacagcatctcgcctcggccgaggccccccgggcgccccgtcagcggtcacgggatggatagccggcctgccatggccatctttgaactcctggactatattgtgaacgagccacctcctaagctgcccaacggtgtgttcacccccgacttccaggagtttgtcaataaatgcctcatcaagaacccagcggagcgggcggacctgaagatgctcacaaaccacaccttcatcaagcggtccgaggtggaagaagtggattttgccggctggttgtgtaaaaccctgcggctgaaccagcccggcacacccacgcgcaccgccgtgtgacagtggccgggctccctgcgtcccgctggtgacctgcccaccgtccctgtccatgccccgcccttccagctgaggacaggctggcgcctccacccaccctcctgcctcacccctgcggagagcaccgtggcggggcgacagcgcatgcaggaacgggggtctcctctcctgcccgtcctggccggggtgcctctggggacgggcgacgctgctgtgtgtggtctcagaggctctgcttccttaggttacaaaacaaaacagggag

SEQ ID NO: 154923 - DNA, 314 bp, Homo sapiens
  Payload ID: 10459
  Gene Symbol: MAP2K2
  Gene Name: mitogen-activated protein kinase kinase 2
  ENST ID: ENST00000599021
  CDS Start-End: 1-313
ccttcgtgggcacgcgctcctacatggctgtcacgggatggatagccggcctgccatggccatctttgaactcctggactatattgtgaacgagccacctcctaagctgcccaacggtgtgttcacccccgacttccaggagtttgtcaataaatgcctcatcaagaacccagcggagcgggcggacctgaagatgctcacaaaccacaccttcatcaagcggtccgaggtggaagaagtggattttgccggctggttgtgtaaaaccctgcggctgaaccagcccggcacacccacgcgcaccgccgtgtgac

SEQ ID NO: 154924 - DNA, 1246 bp, Homo sapiens
  Payload ID: 10460
  Gene Symbol: MAP2K3
  Gene Name: mitogen-activated protein kinase kinase 3
  Uniprot ID: P46734
  ENST ID: ENST00000316920
  CDS Start-End: 210-1166
gttggcccgtgtgaggagaaggccggggcagcggaggcttccggcgagaggctggtcatatccatggtgaccatttatgggccacaacaggtccccatctgcgcagtgaaccctgtgctgagcaccttgcagacgtgatcttgcttcgtcctgcagcactgtgcggggcaggaaaatccaagaggaagaaggatctacggatatcctgcatgtccaagccacccgcacccaaccccacacccccccggaacctggactcccggaccttcatcaccattggagacagaaactttgaggtggaggctgatgacttggtgaccatctcagaactgggccgtggagcctatggggtggtagagaaggtgcggcacgcccagagcggcaccatcatggccgtgaagcggatccgggccaccgtgaactcacaggagcagaagcggctgctcatggacctggacatcaacatgcgcacggtcgactgtttctacactgtcaccttctacggggcactattcagagagggagacgtgtggatctgcatggagctcatggacacatccttggacaagttctaccggaaggtgctggataaaaacatgacaattccagaggacatccttggggagattgctgtgtctatcgtgcgggccctggagcatctgcacagcaagctgtcggtgatccacagagatgtgaagccctccaatgtccttatcaacaaggagggccatgtgaagatgtgtgactttggcatcagtggctacttggtggactctgtggccaagacgatggatgccggctgcaagccctacatggcccctgagaggatcaacccagagctgaaccagaagggctacaatgtcaagtccgacgtctggagcctgggcatcaccatgattgagatggccatcctgcggttcccttacgagtcctgggggaccccgttccagcagctgaagcaggtggtggaggagccgtccccccagctcccagccgaccgtttctcccccgagtttgtggacttcactgctcagtgcctgaggaagaaccccgcagagcgtatgagctacctggagctgatggagcaccccttcttcaccttgcacaaaaccaagaagacggacattgctgccttcgtgaaggagatcctgggagaagactcataggggctgggcctcggaccccactccggccctccagagccccacagccccatctgcgggggcagtgctcacccacaccataa

SEQ ID NO: 154925 - DNA, 2303 bp, Homo sapiens
  Payload ID: 10460
  Gene Symbol: MAP2K3
  Gene Name: mitogen-activated protein kinase kinase 3
  Uniprot ID: P46734
  ENST ID: ENST00000342679
  CDS Start-End: 250-1293
agtcagcgcagttcggccggggtctccccggcgctgcccagtctgtctccggcgccgcccgtcgcggactcgtccttgctgcagtcgccgccgcagtcctcgccgcagtcgccgccgccgccgccgccgccgccgctgctcctccgcctggcctgggccgtctgcccgcagccatgagcgtgctcggccccggtggagcccgcagtcctctagattagtctccaccgccgtccaggacccacttgcagcatggagtcgcccgcctcgagccagcccgccagcatgccccagtccaaaggaaaatccaagaggaagaaggatctacggatatcctgcatgtccaagccacccgcacccaaccccacacccccccggaacctggactcccggaccttcatcaccattggagacagaaactttgaggtggaggctgatgacttggtgaccatctcagaactgggccgtggagcctatggggtggtagagaaggtgcggcacgcccagagcggcaccatcatggccgtgaagcggatccgggccaccgtgaactcacaggagcagaagcggctgctcatggacctggacatcaacatgcgcacggtcgactgtttctacactgtcaccttctacggggcactattcagagagggagacgtgtggatctgcatggagctcatggacacatccttggacaagttctaccggaaggtgctggataaaaacatgacaattccagaggacatccttggggagattgctgtgtctatcgtgcgggccctggagcatctgcacagcaagctgtcggtgatccacagagatgtgaagccctccaatgtccttatcaacaaggagggccatgtgaagatgtgtgactttggcatcagtggctacttggtggactctgtggccaagacgatggatgccggctgcaagccctacatggcccctgagaggatcaacccagagctgaaccagaagggctacaatgtcaagtccgacgtctggagcctgggcatcaccatgattgagatggccatcctgcggttcccttacgagtcctgggggaccccgttccagcagctgaagcaggtggtggaggagccgtccccccagctcccagccgaccgtttctcccccgagtttgtggacttcactgctcagtgcctgaggaagaaccccgcagagcgtatgagctacctggagctgatggagcaccccttcttcaccttgcacaaaaccaagaagacggacattgctgccttcgtgaaggagatcctgggagaagactcataggggctgggcctcggaccccactccggccctccagagccccacagccccatctgcgggggcagtgctcacccacaccataagctactgccatcctggcccagggcatctgggaggaaccgagggggctgctcccacctggctctgtggcgagccatttgtcccaagtgccaaagaagcagaccattggggctcccagccaggcccttgtcggccccaccagtgcctctccctgctgctcctaggacccgtctccagctgctgagatcctggactgagggggcctggatgccccctgtggatgctgctgcccctgcacagcaggctgccagtgcctgggtggatgggccaccgccttgcccagcctggatgccatccaagttgtatatttttttaatctctcgactgaatggactttgcacactttggcccagggtggccacacctctatcccggctttggtgcggggtacacaagaggggatgagttgtgtgaataccccaagactcccatgagggagatgccatgagccgcccaaggccttcccctggcactggcaaacagggcctctgcggagcacactggctcacccagtcctgcccgccaccgttatcggtgtcattcacctttcgtgttttttttaatttatcctctgttgattttttcttttgctttatgggtttggcttgtttttcttgcatggtttggagctgatcgcttctcccccaccccctagggtaccagcaggcagagccttgccctctgctcaggctggggtccagtgggaggggcccaagatctctgctcagagaagtgcagggggagccttccagctcactctccctgaggactggcttgacaggggctatgggtttgctttggtgttgtttttaaaaaaagaaaatatatttttttgaaaaaacgactgcccatcccgggtcctttccctgatgggttggggcagttacctggttgctgttttaattaaaaaaaaaaaaaaaaaaaggactaaa

SEQ ID NO: 154926 - DNA, 2034 bp, Homo sapiens
  Payload ID: 10460
  Gene Symbol: MAP2K3
  Gene Name: mitogen-activated protein kinase kinase 3
  Uniprot ID: P46734
  ENST ID: ENST00000361818
  CDS Start-End: 95-1051
aaagttctcagttggcccgtgtgaggagaaggccggggcagcggaggcttccggcggaaaatccaagaggaagaaggatctacggatatcctgcatgtccaagccacccgcacccaaccccacacccccccggaacctggactcccggaccttcatcaccattggagacagaaactttgaggtggaggctgatgacttggtgaccatctcagaactgggccgtggagcctatggggtggtagagaaggtgcggcacgcccagagcggcaccatcatggccgtgaagcggatccgggccaccgtgaactcacaggagcagaagcggctgctcatggacctggacatcaacatgcgcacggtcgactgtttctacactgtcaccttctacggggcactattcagagagggagacgtgtggatctgcatggagctcatggacacatccttggacaagttctaccggaaggtgctggataaaaacatgacaattccagaggacatccttggggagattgctgtgtctatcgtgcgggccctggagcatctgcacagcaagctgtcggtgatccacagagatgtgaagccctccaatgtccttatcaacaaggagggccatgtgaagatgtgtgactttggcatcagtggctacttggtggactctgtggccaagacgatggatgccggctgcaagccctacatggcccctgagaggatcaacccagagctgaaccagaagggctacaatgtcaagtccgacgtctggagcctgggcatcaccatgattgagatggccatcctgcggttcccttacgagtcctgggggaccccgttccagcagctgaagcaggtggtggaggagccgtccccccagctcccagccgaccgtttctcccccgagtttgtggacttcactgctcagtgcctgaggaagaaccccgcagagcgtatgagctacctggagctgatggagcaccccttcttcaccttgcacaaaaccaagaagacggacattgctgccttcgtgaaggagatcctgggagaagactcataggggctgggcctcggaccccactccggccctccagagccccacagccccatctgcgggggcagtgctcacccacaccataagctactgccatcctggcccagggcatctgggaggaaccgagggggctgctcccacctggctctgtggcgagccatttgtcccaagtgccaaagaagcagaccattggggctcccagccaggcccttgtcggccccaccagtgcctctccctgctgctcctaggacccgtctccagctgctgagatcctggactgagggggcctggatgccccctgtggatgctgctgcccctgcacagcaggctgccagtgcctgggtggatgggccaccgccttgcccagcctggatgccatccaagttgtatatttttttaatctctcgactgaatggactttgcacactttggcccagggtggccacacctctatcccggctttggtgcggggtacacaagaggggatgagttgtgtgaataccccaagactcccatgagggagatgccatgagccgcccaaggccttcccctggcactggcaaacagggcctctgcggagcacactggctcacccagtcctgcccgccaccgttatcggtgtcattcacctttcgtgttttttttaatttatcctctgttgattttttcttttgctttatgggtttggcttgtttttcttgcatggtttggagctgatcgcttctcccccaccccctagggtaccagcaggcagagccttgccctctgctcaggctggggtccagtgggaggggcccaagatctctgctcagagaagtgcagggggagccttccagctcactctccctgaggactggcttgacaggggctatgggtttgctttggtgttgtttttaaaaaaagaaaatatatttttttgaaaaaacgactgcccatcccgggtcctttccctgatgggttggggcagttacctggttgctgttttaatt

SEQ ID NO: 154927 - DNA, 2401 bp, Homo sapiens
  Payload ID: 10460
  Gene Symbol: MAP2K3
  Gene Name: mitogen-activated protein kinase kinase 3
  ENST ID: ENST00000395491
  CDS Start-End: 250-390
agtcagcgcagttcggccggggtctccccggcgctgcccagtctgtctccggcgccgcccgtcgcggactcgtccttgctgcagtcgccgccgcagtcctcgccgcagtcgccgccgccgccgccgccgccgccgctgctcctccgcctggcctgggccgtctgcccgcagccatgagcgtgctcggccccggtggagcccgcagtcctctagattagtctccaccgccgtccaggacccacttgcagcatggagtcgcccgcctcgagccagcccgccagcatgccccagtccaaagagaggctggtcatatccatggtgaccatttatgggccacaacaggtccccatctgcgcagtgaaccctgtgctgagcaccttgcagacgtgatcttgcttcgtcctgcagcactgtgcggggcaggaaaatccaagaggaagaaggatctacggatatcctgcatgtccaagccacccgcacccaaccccacacccccccggaacctggactcccggaccttcatcaccattggagacagaaactttgaggtggaggctgatgacttggtgaccatctcagaactgggccgtggagcctatggggtggtagagaaggtgcggcacgcccagagcggcaccatcatggccgtgaagcggatccgggccaccgtgaactcacaggagcagaagcggctgctcatggacctggacatcaacatgcgcacggtcgactgtttctacactgtcaccttctacggggcactattcagagagggagacgtgtggatctgcatggagctcatggacacatccttggacaagttctaccggaaggtgctggataaaaacatgacaattccagaggacatccttggggagattgctgtgtctatcgtgcgggccctggagcatctgcacagcaagctgtcggtgatccacagagatgtgaagccctccaatgtccttatcaacaaggagggccatgtgaagatgtgtgactttggcatcagtggctacttggtggactctgtggccaagacgatggatgccggctgcaagccctacatggcccctgagaggatcaacccagagctgaaccagaagggctacaatgtcaagtccgacgtctggagcctgggcatcaccatgattgagatggccatcctgcggttcccttacgagtcctgggggaccccgttccagcagctgaagcaggtggtggaggagccgtccccccagctcccagccgaccgtttctcccccgagtttgtggacttcactgctcagtgcctgaggaagaaccccgcagagcgtatgagctacctggagctgatggagcaccccttcttcaccttgcacaaaaccaagaagacggacattgctgccttcgtgaaggagatcctgggagaagactcataggggctgggcctcggaccccactccggccctccagagccccacagccccatctgcgggggcagtgctcacccacaccataagctactgccatcctggcccagggcatctgggaggaaccgagggggctgctcccacctggctctgtggcgagccatttgtcccaagtgccaaagaagcagaccattggggctcccagccaggcccttgtcggccccaccagtgcctctccctgctgctcctaggacccgtctccagctgctgagatcctggactgagggggcctggatgccccctgtggatgctgctgcccctgcacagcaggctgccagtgcctgggtggatgggccaccgccttgcccagcctggatgccatccaagttgtatatttttttaatctctcgactgaatggactttgcacactttggcccagggtggccacacctctatcccggctttggtgcggggtacacaagaggggatgagttgtgtgaataccccaagactcccatgagggagatgccatgagccgcccaaggccttcccctggcactggcaaacagggcctctgcggagcacactggctcacccagtcctgcccgccaccgttatcggtgtcattcacctttcgtgttttttttaatttatcctctgttgattttttcttttgctttatgggtttggcttgtttttcttgcatggtttggagctgatcgcttctcccccaccccctagggtaccagcaggcagagccttgccctctgctcaggctggggtccagtgggaggggcccaagatctctgctcagagaagtgcagggggagccttccagctcactctccctgaggactggcttgacaggggctatgggtttgctttggtgttgtttttaaaaaaagaaaatatatttttttgaaaaaacgactgcccatcccgggtcctttccctgatgggttggggcagttacctggttgctgttttaatt

SEQ ID NO: 154928 - DNA, 514 bp, Homo sapiens
  Payload ID: 10460
  Gene Symbol: MAP2K3
  Gene Name: mitogen-activated protein kinase kinase 3
  ENST ID: ENST00000529517
  CDS Start-End: 212-514
cagtctgtctccggcgccgcccgtcgcggactcgtccttgctgcagtcgccgccgcagtcctcgccgcagtcgccgccgccgccgccgccgccgccgctgctcctccgcctggcctgggccgtctgcccgcagccatgagcgtgctcggccccggtggagcccgcagtcctctagattagtctccaccgccgtccaggacccacttgcagcatggagtcgcccgcctcgagccagcccgccagcatgccccagtccaaaggaaactctctgtcagccaacccatggcccagcgcccaaagggagcaaagttctcagttggcccgtgtgaggagaaggccggggcagcggaggcttccggcggccggtggatgcagaggccagtccatataccacccaggcctgcgaggagcgtggtccccacccatccagcccatatgtgcaagtgcccttgacagagaggctggtcatatccatggtgaccatttatgggccacaacaggtccccatctgcgc

SEQ ID NO: 154929 - DNA, 575 bp, Homo sapiens
  Payload ID: 10460
  Gene Symbol: MAP2K3
  Gene Name: mitogen-activated protein kinase kinase 3
  ENST ID: ENST00000526076
  CDS Start-End: 95-575
aaagttctcagttggcccgtgtgaggagaaggccggggcagcggaggcttccggcggaaaatccaagaggaagaaggatctacggatatcctgcatgtccaagccacccgcacccaaccccacacccccccggaacctggactcccggaccttcatcaccattggagacagaaactttgaggtggaggctgatgacttggtgaccatctcagaactgggccgtggagcctatggggtggtagagaaggtgcggcacgcccagagcggcaccatcatggccgtgaagcggatccgggccaccgtgaactcacaggagcagaagcggctgctcatggacctggacatcaacatgcgcacggtcgactgtttctacactgtcaccttctacggggcactattcagagagggagacgtgtggatctgcatggagctcatggacacatccttggacaagttctaccggaaggtgctggataaaaacatgacaattccagaggacatccttggggagattgctgtgtctatcgtgcgggccctggagcatctgcacagcaagctgtcggtgatccacagag

SEQ ID NO: 154930 - DNA, 535 bp, Homo sapiens
  Payload ID: 10460
  Gene Symbol: MAP2K3
  Gene Name: mitogen-activated protein kinase kinase 3
  ENST ID: ENST00000527123
  CDS Start-End: 1-411
attgagatggccatcctgcggttcccttacgagtcctgggggaccccgttccagcagctgaagcaggtggtggaggagccgtccccccagctcccagccgaccgtttctcccccgagtttgtggacttcactgctcagtgcctgaggaagaaccccgcagagcgtatgagctacctggagctgatggtgagtatgggcgggaggtgcctgccctgctcttcagggctggctggggctgggtggggctctggggagagggctgcatcctgcacacagatgggtagctcctctggctggccctgtgttctctcctttaggtgctcggtcatttgtttgctcctgcatacctggctccctcctccctccttcctgcatgccaggccctgggaagggtacacaggcagtgtgtgacagaatggggcagaggggccaagggtggcatcagggaaggcttcatggaggaggtaccatttgaactgagcctggaaggatgaataagggttatctcctgatggagaggctgtcccaagcagaa

SEQ ID NO: 154931 - DNA, 511 bp, Homo sapiens
  Payload ID: 10460
  Gene Symbol: MAP2K3
  Gene Name: mitogen-activated protein kinase kinase 3
  ENST ID: ENST00000483928
  CDS Start-End: 211-351
agtctgtctccggcgccgcccgtcgcggactcgtccttgctgcagtcgccgccgcagtcctcgccgcagtcgccgccgccgccgccgccgccgccgctgctcctccgcctggcctgggccgtctgcccgcagccatgagcgtgctcggccccggtggagcccgcagtcctctagattagtctccaccgccgtccaggacccacttgcagcatggagtcgcccgcctcgagccagcccgccagcatgccccagtccaaaggccggtggatgcagaggccagtccatataccacccaggcctgcgaggagcgtggtccccacccatccagcccatatgtgcaagtgcccttgacagagaggctggtcatatccatggtgaccatttatgggccacaacaggtccccatctgcgcagtgaaccctgtgctgagcaccttgcagacgtgatcttgcttcgtcctgcagcactgtgcggggcaggaaaatccaagaggaagaaggatctacggata

SEQ ID NO: 154932 - DNA, 574 bp, Homo sapiens
  Payload ID: 10460
  Gene Symbol: MAP2K3
  Gene Name: mitogen-activated protein kinase kinase 3
  ENST ID: ENST00000479129
  CDS Start-End: 211-351
agtctgtctccggcgccgcccgtcgcggactcgtccttgctgcagtcgccgccgcagtcctcgccgcagtcgccgccgccgccgccgccgccgccgctgctcctccgcctggcctgggccgtctgcccgcagccatgagcgtgctcggccccggtggagcccgcagtcctctagattagtctccaccgccgtccaggacccacttgcagcatggagtcgcccgcctcgagccagcccgccagcatgccccagtccaaaggccggtggatgcagaggccagtccatataccacccaggcctgcgaggagcgtggtccccacccatccagcccatatgtgcaagtgcccttgacaggaaaatccaagaggaagaaggatctacggatatcctgcatgtccaagccacccgcacccaaccccacacccccccggaacctggactcccggaccttcatcaccattggagacagaaactttgaggtggaggctgatgacttggtgaccatctcagaactgggccgtggagcctatggggtggtagagaaggtgcggcacgcccagagcggcaccatcat

SEQ ID NO: 154933 - DNA, 2089 bp, Homo sapiens
  Payload ID: 10460
  Gene Symbol: MAP2K3
  Gene Name: mitogen-activated protein kinase kinase 3
  ENST ID: ENST00000496046
  CDS Start-End: 100-621
gcctgggccgtctgcccgcagccatgagcgtgctcggccccggtggagcccgcagtcctctagattagtctccaccgccgtccaggacccacttgcagcatggagtcgcccgcctcgagccagcccgccagcatgccccagtccaaaggaaaatccaagaggaagaaggatctacggatatcctgcatgtccaagccacccgcacccaaccccacacccccccggaacctggactcccggaccttcatcaccattggagacagaaactttgaggtggaggctgatgacttggtgaccatctcagaactgggccgtggagcctatggggtggtagagaaggtgcggcacgcccagagcggcaccatcatggccgtgaagcggatccgggccaccgtgaactcacaggagcagaagcggctgctcatggacctggacatcaacatgcgcacggtcgactgtttctacactgtcaccttctacggggcactattcagagagggagacgtgtggatctgcatggagctcatggacacatccttggacaagttctaccggaaggtgctggataaaaacatgacaattccagaggacatccttggggagattgctgtgtctatgtgaagccctccaatgtccttatcaacaaggagggccatgtgaagatgtgtgactttggcatcagtggctacttggtggactctgtggccaagacgatggatgccggctgcaagccctacatggcccctgagaggatcaacccagagctgaaccagaagggctacaatgtcaagtccgacgtctggagcctgggcatcaccatgattgagatggccatcctgcggttcccttacgagtcctgggggaccccgttccagcagctgaagcaggtggtggaggagccgtccccccagctcccagccgaccgtttctcccccgagtttgtggacttcactgctcagtgcctgaggaagaaccccgcagagcgtatgagctacctggagctgatggagcaccccttcttcaccttgcacaaaaccaagaagacggacattgctgccttcgtgaaggagatcctgggagaagactcataggggctgggcctcggaccccactccggccctccagagccccacagccccatctgcgggggcagtgctcacccacaccataagctactgccatcctggcccagggcatctgggaggaaccgagggggctgctcccacctggctctgtggcgagccatttgtcccaagtgccaaagaagcagaccattggggctcccagccaggcccttgtcggccccaccagtgcctctccctgctgctcctaggacccgtctccagctgctgagatcctggactgagggggcctggatgccccctgtggatgctgctgcccctgcacagcaggctgccagtgcctgggtggatgggccaccgccttgcccagcctggatgccatccaagttgtatatttttttaatctctcgactgaatggactttgcacactttggcccagggtggccacacctctatcccggctttggtgcggggtacacaagaggggatgagttgtgtgaataccccaagactcccatgagggagatgccatgagccgcccaaggccttcccctggcactggcaaacagggcctctgcggagcacactggctcacccagtcctgcccgccaccgttatcggtgtcattcacctttcgtgttttttttaatttatcctctgttgattttttcttttgctttatgggtttggcttgtttttcttgcatggtttggagctgatcgcttctcccccaccccctagggtaccagcaggcagagccttgccctctgctcaggctggggtccagtgggaggggcccaagatctctgctcagagaagtgcagggggagccttccagctcactctccctgaggactggcttgacaggggctatgggtttgctttggtgttgtttttaaaaaaagaaaatatatttttttgaaaaaacgactgcccatcccgggtcctttccctgatgggttggggcagttacctggttgctgttttaattaaaaaaaaaaaaaaa

SEQ ID NO: 154934 - DNA, 2029 bp, Homo sapiens
  Payload ID: 10460
  Gene Symbol: MAP2K3
  Gene Name: mitogen-activated protein kinase kinase 3
  Uniprot ID: P46734
  ENST ID: ENST00000613338
  CDS Start-End: 338-1294
tggctggcaatggccttgctgacctcgagccgggcccacgtggggacctttggagcacagcctacgatcctggtgcaaggccggtggatgcagaggccagtccatataccacccaggcctgcgaggagcgtggtccccacccatccagcccatatgtgcaagtgcccttgacagagaggctggtcatatccatggtgaccatttatgggccacaacaggtccccatctgcgcagtgaaccctgtgctgagcaccttgcagacgtgatcttgcttcgtcctgcagcactgtgcggggcaggaaaatccaagaggaagaaggatctacggatatcctgcatgtccaagccacccgcacccaaccccacacccccccggaacctggactcccggaccttcatcaccattggagacagaaactttgaggtggaggctgatgacttggtgaccatctcagaactgggccgtggagcctatggggtggtagagaaggtgcggcacgcccagagcggcaccatcatggccgtgaagcggatccgggccaccgtgaactcacaggagcagaagcggctgctcatggacctggacatcaacatgcgcacggtcgactgtttctacactgtcaccttctacggggcactattcagagagggagacgtgtggatctgcatggagctcatggacacatccttggacaagttctaccggaaggtgctggataaaaacatgacaattccagaggacatccttggggagattgctgtgtctatcgtgcgggccctggagcatctgcacagcaagctgtcggtgatccacagagatgtgaagccctccaatgtccttatcaacaaggagggccatgtgaagatgtgtgactttggcatcagtggctacttggtggactctgtggccaagacgatggatgccggctgcaagccctacatggcccctgagaggatcaacccagagctgaaccagaagggctacaatgtcaagtccgacgtctggagcctgggcatcaccatgattgagatggccatcctgcggttcccttacgagtcctgggggaccccgttccagcagctgaagcaggtggtggaggagccgtccccccagctcccagccgaccgtttctcccccgagtttgtggacttcactgctcagtgcctgaggaagaaccccgcagagcgtatgagctacctggagctgatggagcaccccttcttcaccttgcacaaaaccaagaagacggacattgctgccttcgtgaaggagatcctgggagaagactcataggggctgggcctcggaccccactccggccctccagagccccacagccccatctgcgggggcagtgctcacccacaccataagctactgccatcctggcccagggcatctgggaggaaccgagggggctgctcccacctggctctgtggcgagccatttgtcccaagtgccaaagaagcagaccattggggctcccagccaggcccttgtcggccccaccagtgcctctccctgctgctcctaggacccgtctccagctgctgagatcctggactgagggggcctggatgccccctgtggatgctgctgcccctgcacagcaggctgccagtgcctgggtggatgggccaccgccttgcccagcctggatgccatccaagttgtatatttttttaatctctcgactgaatggactttgcacactttggcccagggtggccacacctctatcccggctttggtgcggggtacacaagaggggatgagttgtgtgaataccccaagactcccatgagggagatgccatgagccgcccaaggccttcccctggcactggcaaacagggcctctgcggagcacactggctcacccagtcctgcccgccaccgttatcggtgtcattcacctttcgtgttttttttaatttatcctctgttgattttttcttttgctttatgggtttggcttgtttttcttgcatggtttggagctgatcgcttctcccccaccccctaggg

SEQ ID NO: 154935 - DNA, 351 bp, Homo sapiens
  Payload ID: 10460
  Gene Symbol: MAP2K3
  Gene Name: mitogen-activated protein kinase kinase 3
  ENST ID: ENST00000627447
  CDS Start-End: 211-351
agtctgtctccggcgccgcccgtcgcggactcgtccttgctgcagtcgccgccgcagtcctcgccgcagtcgccgccgccgccgccgccgccgccgctgctcctccgcctggcctgggccgtctgcccgcagccatgagcgtgctcggccccggtggagcccgcagtcctctagattagtctccaccgccgtccaggacccacttgcagcatggagtcgcccgcctcgagccagcccgccagcatgccccagtccaaaggccggtggatgcagaggccagtccatataccacccaggcctgcgaggagcgtggtccccacccatccagcccatatgtgcaagtgcccttga

SEQ ID NO: 154936 - DNA, 3826 bp, Homo sapiens
  Payload ID: 10461
  Gene Symbol: MAP2K4
  Gene Name: mitogen-activated protein kinase kinase 4
  Uniprot ID: P45985
  ENST ID: ENST00000353533
  CDS Start-End: 64-1263
gcgagaggccgagcttgctgcattgcagccgccgcggcgccgctcggctcttcactcccaacaatggcggctccgagcccgagcggcggcggcggctccgggggcggcagcggcagcggcacccccggccccgtagggtccccggcgccaggccacccggccgtcagcagcatgcagggtaaacgcaaagcactgaagttgaattttgcaaatccacctttcaaatctacagcaaggtttactctgaatcccaatcctacaggagttcaaaacccacacatagagagactgagaacacacagcattgagtcatcaggaaaactgaagatctcccctgaacaacactgggatttcactgcagaggacttgaaagaccttggagaaattggacgaggagcttatggttctgtcaacaaaatggtccacaaaccaagtgggcaaataatggcagttaaaagaattcggtcaacagtggatgaaaaagaacaaaaacaacttcttatggatttggatgtagtaatgcggagtagtgattgcccatacattgttcagttttatggtgcactcttcagagagggtgactgttggatctgtatggaactcatgtctacctcgtttgataagttttacaaatatgtatatagtgtattagatgatgttattccagaagaaattttaggcaaaatcactttagcaactgtgaaagcactaaaccacttaaaagaaaacttgaaaattattcacagagatatcaaaccttccaatattcttctggacagaagtggaaatattaagctctgtgacttcggcatcagtggacagcttgtggactctattgccaagacaagagatgctggctgtaggccatacatggcacctgaaagaatagacccaagcgcatcacgacaaggatatgatgtccgctctgatgtctggagtttggggatcacattgtatgagttggccacaggccgatttccttatccaaagtggaatagtgtatttgatcaactaacacaagtcgtgaaaggagatcctccgcagctgagtaattctgaggaaagggaattctccccgagtttcatcaactttgtcaacttgtgccttacgaaggatgaatccaaaaggccaaagtataaagagcttctgaaacatccctttattttgatgtatgaagaacgtgccgttgaggtcgcatgctatgtttgtaaaatcctggatcaaatgccagctactcccagctctcccatgtatgtcgattgatatcgctgctacatcagactctagaaaaaagggctgagaggaagcaagacgtaaagaattttcatcccgtatcacagtgtttttattgctcgcccagacaccatgtgcaataagattggtgttcgtttccatcatgtctgtatactcctgtcacctagaacgtgcatccttgtaatacctgattgatcacacagtgttagtgctggtcagagagacctcatcctgctcttttgtgatgaacatattcatgaaatgtggaagtcagtacgatcaagttgttgactgtgattagatcacatcttaaattcatttctagactcaaaacctggagatgcagctactggaatggtgttttgtcagacttccaaatcctggaaggacacagtgatgaatgtactatgtctgaacatagaaactcgggcttgagtgagaagagcttgcacagccaacgagacacattgccttctggagctgggagacaaaggaggaatttactttcttcaccaagtgcaatagattactgatgtgatattctgttgctttacagttacagttgatgtttggggatcgatgtgctcagccaaatttcctgtttgaaatatcatgttaaattagaatgaatttatctttaccaaaaaccatgttgcgttcaaagaggtgaacattaaaatatagagacaggacagaatgtgttcttttctcctttaccagtcctatttttcaatgggaagactcaggagtctgccacttgtcaaagaaggtgctgatcctaagaatttttcattctcagaattcggtgtgctgccaacttgatgttccacctgccacaaaccaccaggactgaaagaagaaaacagtacagaaggcaaagtttacagatgtttttaattctagtattttatctggaacaacttgtagcagctatatatttccccttggtcccaagcctgatactttagccatcataactcactaacagggagaagtagctagtagcaatgtgccttgattgattagataaagatttctagtaggcagcaaaagaccaaatctcagttgtttgcttcttgccatcactggtccaggtcttcagtttccgaatctctttcccttcccctgtggtctattgtcgctatgtgacttgcgcttaatccaatattttgccttttttctatatcaaaaaacctttacagttagcagggatgttccttaccaaggatttttagccccaaatctctcatattcgctagtgtttaaaaggctaagaatagtggggcccagccgatgtggtaggtgataaagaggcatcttttctagagacacattggaccagatgaggatccgaaacggcagcctttacgttcatcacctgctagaacctctcgtagtccatcaccatttcttggcattggaattctactggaaaaaaatacaaaaagcaaaacaaaaccctcagcactgttacaagaggccatttaagtatcttgtgcttcttcacttacccattagccaggttctcattaggttttgcttgggcctccctggcactgaaccttaggctttgtatgacagtgaagcagcactgtgagtggttcaagcacactggaatataaaacagtcatggcctgagatgcaggtgatgccattacagaaccaaatcgtggcacgtattgctgtgtctcctctcagagtgacagtcataaatactgtcaaacaataaagggagaatggtgctgtttaaagtcacatccctgtaaattgcagaattcaaaagtgattatctctttgatctacttgcctcatttccctatcttctcccccacggtatcctaaactttagacttcccactgttctgaaaggagacattgctctatgtctgccttcgaccacagcaagccatcatcctccattgctcccggggactcaagaggaatctgtttctctgctgtcaacttcccatctggctcagcatagggtcactttgccattatgcaaatggagataaaagcaattctgactgtccaggagctaatctgaccgttctattgtgtggatgaccacataagaaggcaattttagtgtattaatcatagattattataaactataaacttaagggcaaggagtttattacaatgtatctttattaaaacaaaagggtgtatagtgttcacaaactgtgaaaatagtgtaagaactgtacattgtgagctctggttatttttctcttgtaccatagaaaaatgtataaaaattatcaaaaagctaatgtgcagggatattgccttatttgtctgtaaaaaatggagctcagtaacataactgcttcttggagctttggaatattttatcctgtattcttgtttgaattcctcctctatttaagatatatacatggaatcgaagtgtttatgtaatagttctatccttttgcctgcaggtcagttgtaataaatctaggatgtgatgatgactttgtaatttgattttctgaaatcagaccctgagaggggaaaatcttaaagtaaattacattaaattatctgtgcatttcacaccagg

SEQ ID NO: 154937 - DNA, 3856 bp, Homo sapiens
  Payload ID: 10461
  Gene Symbol: MAP2K4
  Gene Name: mitogen-activated protein kinase kinase 4
  Uniprot ID: P45985
  ENST ID: ENST00000415385
  CDS Start-End: 54-1286
gagcttgctgcattgcagccgccgcggcgccgctcggctcttcactcccaacaatggcggctccgagcccgagcggcggcggcggctccgggggcggcagcggcagcggcacccccggccccgtagggtccccggcgccaggccacccggccgtcagcagcatgcagggctttcagataaacttctgtgaaaaggcacaaagtaaacgcaaagcactgaagttgaattttgcaaatccacctttcaaatctacagcaaggtttactctgaatcccaatcctacaggagttcaaaacccacacatagagagactgagaacacacagcattgagtcatcaggaaaactgaagatctcccctgaacaacactgggatttcactgcagaggacttgaaagaccttggagaaattggacgaggagcttatggttctgtcaacaaaatggtccacaaaccaagtgggcaaataatggcagttaaaagaattcggtcaacagtggatgaaaaagaacaaaaacaacttcttatggatttggatgtagtaatgcggagtagtgattgcccatacattgttcagttttatggtgcactcttcagagagggtgactgttggatctgtatggaactcatgtctacctcgtttgataagttttacaaatatgtatatagtgtattagatgatgttattccagaagaaattttaggcaaaatcactttagcaactgtgaaagcactaaaccacttaaaagaaaacttgaaaattattcacagagatatcaaaccttccaatattcttctggacagaagtggaaatattaagctctgtgacttcggcatcagtggacagcttgtggactctattgccaagacaagagatgctggctgtaggccatacatggcacctgaaagaatagacccaagcgcatcacgacaaggatatgatgtccgctctgatgtctggagtttggggatcacattgtatgagttggccacaggccgatttccttatccaaagtggaatagtgtatttgatcaactaacacaagtcgtgaaaggagatcctccgcagctgagtaattctgaggaaagggaattctccccgagtttcatcaactttgtcaacttgtgccttacgaaggatgaatccaaaaggccaaagtataaagagcttctgaaacatccctttattttgatgtatgaagaacgtgccgttgaggtcgcatgctatgtttgtaaaatcctggatcaaatgccagctactcccagctctcccatgtatgtcgattgatatcgctgctacatcagactctagaaaaaagggctgagaggaagcaagacgtaaagaattttcatcccgtatcacagtgtttttattgctcgcccagacaccatgtgcaataagattggtgttcgtttccatcatgtctgtatactcctgtcacctagaacgtgcatccttgtaatacctgattgatcacacagtgttagtgctggtcagagagacctcatcctgctcttttgtgatgaacatattcatgaaatgtggaagtcagtacgatcaagttgttgactgtgattagatcacatcttaaattcatttctagactcaaaacctggagatgcagctactggaatggtgttttgtcagacttccaaatcctggaaggacacagtgatgaatgtactatgtctgaacatagaaactcgggcttgagtgagaagagcttgcacagccaacgagacacattgccttctggagctgggagacaaaggaggaatttactttcttcaccaagtgcaatagattactgatgtgatattctgttgctttacagttacagttgatgtttggggatcgatgtgctcagccaaatttcctgtttgaaatatcatgttaaattagaatgaatttatctttaccaaaaaccatgttgcgttcaaagaggtgaacattaaaatatagagacaggacagaatgtgttcttttctcctttaccagtcctatttttcaatgggaagactcaggagtctgccacttgtcaaagaaggtgctgatcctaagaatttttcattctcagaattcggtgtgctgccaacttgatgttccacctgccacaaaccaccaggactgaaagaagaaaacagtacagaaggcaaagtttacagatgtttttaattctagtattttatctggaacaacttgtagcagctatatatttccccttggtcccaagcctgatactttagccatcataactcactaacagggagaagtagctagtagcaatgtgccttgattgattagataaagatttctagtaggcagcaaaagaccaaatctcagttgtttgcttcttgccatcactggtccaggtcttcagtttccgaatctctttcccttcccctgtggtctattgtcgctatgtgacttgcgcttaatccaatattttgccttttttctatatcaaaaaacctttacagttagcagggatgttccttaccaaggatttttagccccaaatctctcatattcgctagtgtttaaaaggctaagaatagtggggcccagccgatgtggtaggtgataaagaggcatcttttctagagacacattggaccagatgaggatccgaaacggcagcctttacgttcatcacctgctagaacctctcgtagtccatcaccatttcttggcattggaattctactggaaaaaaatacaaaaagcaaaacaaaaccctcagcactgttacaagaggccatttaagtatcttgtgcttcttcacttacccattagccaggttctcattaggttttgcttgggcctccctggcactgaaccttaggctttgtatgacagtgaagcagcactgtgagtggttcaagcacactggaatataaaacagtcatggcctgagatgcaggtgatgccattacagaaccaaatcgtggcacgtattgctgtgtctcctctcagagtgacagtcataaatactgtcaaacaataaagggagaatggtgctgtttaaagtcacatccctgtaaattgcagaattcaaaagtgattatctctttgatctacttgcctcatttccctatcttctcccccacggtatcctaaactttagacttcccactgttctgaaaggagacattgctctatgtctgccttcgaccacagcaagccatcatcctccattgctcccggggactcaagaggaatctgtttctctgctgtcaacttcccatctggctcagcatagggtcactttgccattatgcaaatggagataaaagcaattctgactgtccaggagctaatctgaccgttctattgtgtggatgaccacataagaaggcaattttagtgtattaatcatagattattataaactataaacttaagggcaaggagtttattacaatgtatctttattaaaacaaaagggtgtatagtgttcacaaactgtgaaaatagtgtaagaactgtacattgtgagctctggttatttttctcttgtaccatagaaaaatgtataaaaattatcaaaaagctaatgtgcagggatattgccttatttgtctgtaaaaaatggagctcagtaacataactgcttcttggagctttggaatattttatcctgtattcttgtttgaattcctcctctatttaagatatatacatggaatcgaagtgtttatgtaatagttctatccttttgcctgcaggtcagttgtaataaatctaggatgtgatgatgactttgtaatttgattttctgaaatcagaccctgagaggggaaaatcttaaagtaaattacattaaattatctgtgcatttcacaccagggaaaatg

SEQ ID NO: 154938 - DNA, 551 bp, Homo sapiens
  Payload ID: 10461
  Gene Symbol: MAP2K4
  Gene Name: mitogen-activated protein kinase kinase 4
  ENST ID: ENST00000582183
  CDS Start-End: 59-196
aggccgagcttgctgcattgcagccgccgcggcgccgctcggctcttcactcccaacaatggcggctccgagcccgagcggcggcggcggctccgggggcggcagcggcagcggcacccccggccccgtagggtccccggcgccaggccacccggccgtcagcagcatgcaggagaattcggtcaacagtggatgaaaaagaacaaaaacaacttcttatggatttggatgtagtaatgcggagtagtgattgcccatacattgttcagttttatggtgcactcttcagagagggtgactgttggatctgtatggaactcatgtctacctcgtttgataagttttacaaatatgtatatagtgtattagatgatgttattccagaagaaattttaggcaaaatcactttagcaactgtgaaagcactaaaccacttaaaagaaaacttgaaaattattcacagagatatcaaaccttccaatattcttctggacagaagtggaaatattaagctctgtgacttcggcatcagtggacagcttgtggactct

SEQ ID NO: 154939 - DNA, 925 bp, Homo sapiens
  Payload ID: 10461
  Gene Symbol: MAP2K4
  Gene Name: mitogen-activated protein kinase kinase 4
  ENST ID: ENST00000538465
  CDS Start-End: 1-49
ccacccggccgtcagcagcatgcaggagaattcggtcaacagtggatgaaaaagaacaaaaacaacttcttatggatttggatgtagtaatgcggagtagtgattgcccatacattgttcagttttatggtgcactcttcagagagactgtgaaagcactaaaccacttaaaagaaaacttgaaaattattcacagagatatcaaaccttccaatattcttctggacagaagtggaaatattaagctctgtgacttcggcatcagtggacagcttgtggactctattgccaagacaagagatgctggctgtaggccatacatggcacctgaaagaatagacccaagcgcatcacgacaaggatatgatgtccgctctgatgtctggagtttggggatcacattgccttacgaaggatgaatccaaaaggccaaagtataaagagcttctgaaacatccctttattttgatgtatgaagaacgtgccgttgaggtcgcatgctatgtttgtaaaatcctggatcaaatgccagctactcccagctctcccatgtatgtcgattgatatcgctgctacatcagactctagaaaaaagggctgagaggaagcaagacgtaaagaattttcatcccgtatcacagtgtttttattgctcgcccagacaccatgtgcaataagattggtgttcgtttccatcatgtctgtatactcctgtcacctagaacgtgcatccttgtaatacctgattgatcacacagtgttagtgctggtcagagagacctcatcctgctcttttgtgatgaacatattcatgaaatgtggaagtcagtacgatcaagttgttgactgtgattagatcacatcttaaattcatttctagactcaaaacctggagatgcagctactggaatggtgttttgtcaga

SEQ ID NO: 154940 - DNA, 977 bp, Homo sapiens
  Payload ID: 10461
  Gene Symbol: MAP2K4
  Gene Name: mitogen-activated protein kinase kinase 4
  ENST ID: ENST00000602686
  CDS Start-End: 1-126
atggcggctccgagcccgagcggcggcggcggctccgggggcggcagcggcagcggcacccccggccccgtagggtccccggcgccaggccacccggccgtcagcagcatgcaggagagagactgagaacacacagcattgagtcatcaggaaaactgaagatctcccctgaacaacactgggatttcactgcagaggacttgaaagaccttggagaaattggacgaggagcttatggttctgtcaacaaaatggtccacaaaccaagtgggcaaataatggcagttaaaagaattcggtcaacagtggatgaaaaagaacaaaaacaacttcttatggatttggatgtagtaatgcggagtagtgattgcccatacattgttcagttttatggtgcactcttcagagagactgtgaaagcactaaaccacttaaaagaaaacttgaaaattattcacagagatatcaaaccttccaatattcttctggacagaagtggaaatattaagctctgtgacttcggcatcagtggacagcttgtggactctattgccaagacaagagatgctggctgtaggccatacatggcacctgaaagaatagacccaagcgcatcacgacaaggatatgatgtccgctctgatgtctggagtttggggatcacattgtatgagttggccacaggccgatttccttatccaaagtggaatagtgtatttgatcaactaacacaagtcgtgaaaggagatcctccgcagctgagtaattctgaggaaagggaattctccccgagtttcatcaactttgtcaacttgtgccttacgaaggatgaatccaaaaggccaaagtataaagagcttctgaaacatccctttattttgatgtatgaagaacgtgccgttgaggtcgcatgctatgtttgtaaaatcctggatcaaatgccagctactcccagctctcccatgtatgtcgattga

SEQ ID NO: 154941 - DNA, 1064 bp, Homo sapiens
  Payload ID: 10461
  Gene Symbol: MAP2K4
  Gene Name: mitogen-activated protein kinase kinase 4
  ENST ID: ENST00000602375
  CDS Start-End: 18-296
gctcttcactcccaacaatggcggctccgagcccgagcggcggcggcggctccgggggcggcagcggcagcggcacccccggccccgtagggtccccggcgccaggccacccggccgtcagcagcatgcagggtaaacgcaaagcactgaagttgaattttgcaaatccacctttcaaatctacagcaaggtttactctgaatcccaatcctacaggagttcaaaacccacacatagaattcggtcaacagtggatgaaaaagaacaaaaacaacttcttatggatttggatgtagtaatgcggagtagtgattgcccatacattgttcagttttatggtgcactcttcagagagggtgactgttggatctgtatggaactcatgtctacctcgtttgataagttttacaaatatgtatatagtgtattagatgatgttattccagaagaaattttaggcaaaatcactttagcaactgtgaaagcactaaaccacttaaaagaaaacttgaaaattattcacagagatatcaaaccttccaatattcttctggacagaagtggaaatattaagctctgtgacttcggcatcagtggacagcttgtggactctattgccaagacaagagatgctggctgtaggccatacatggcacctgaaagaatagacccaagcgcatcacgacaaggatatgatgtccgctctgatgtctggagtttggggatcacattgtatgagttggccacaggccgatttccttatccaaagtggaatagtgtatttgatcaactaacacaagtcgtgaaaggagatcctccgcagctgagtaattctgaggaaagggaattctccccgagtttcatcaactttgtcaacttgtgccttacgaaggatgaatccaaaaggccaaagtataaagagcttctgaaacatccctttattttgatgtatgaagaacgtgccgttgaggtcgcatgctatgtttgtaaaatcctggatcaaatgccagctactcccagctctcccatgtatgtcgattgatatcgctgctacatcagactct

SEQ ID NO: 154942 - DNA, 948 bp, Homo sapiens
  Payload ID: 10461
  Gene Symbol: MAP2K4
  Gene Name: mitogen-activated protein kinase kinase 4
  ENST ID: ENST00000602537
  CDS Start-End: 1-126
atggcggctccgagcccgagcggcggcggcggctccgggggcggcagcggcagcggcacccccggccccgtagggtccccggcgccaggccacccggccgtcagcagcatgcaggagagagactgagaacacacagcattgagtcatcaggaaaactgaagatctcccctgaacaacactgggatttcactgcagaggacttgaaagaccttggagaaattggacgaggagcttatggttctgtcaacaaaatggtccacaaaccaagtgggcaaataatggcagttaaaagaattcggtcaacagtggatgaaaaagaacaaaaacaacttcttatggatttggatgtagtaatgcggagtagtgattgcccatacattgttcagttttatggtgcactcttcagagagggtgactgttggatctgtatggaactcatgtctacctcgtttgataagttttacaaatatgtatatagtgtattagatgatgttattccagaagaaattttaggcaaaatcactttagcaactgtgaaagcactaaaccacttaaaagaaaacttgaaaattattcacagagatatcaaaccttccaatattcttctggacagaagtggaaatattaagctctgtgacttcggcatcagtggacagcttgtggactctattgccaagacaagagatgctggctgtaggccatacatggcacctgaaagaatagacccaagcgcatcacgacaaggatatgatgtccgctctgatgtctggagtttggggatcacattgccttacgaaggatgaatccaaaaggccaaagtataaagagcttctgaaacatccctttattttgatgtatgaagaacgtgccgttgaggtcgcatgctatgtttgtaaaatcctggatcaaatgccagctactcccagctctcccatgtatgtcgattga

SEQ ID NO: 154943 - DNA, 1136 bp, Homo sapiens
  Payload ID: 10461
  Gene Symbol: MAP2K4
  Gene Name: mitogen-activated protein kinase kinase 4
  ENST ID: ENST00000602811
  CDS Start-End: 18-143
gctcttcactcccaacaatggcggctccgagcccgagcggcggcggcggctccgggggcggcagcggcagcggcacccccggccccgtagggtccccggcgccaggccacccggccgtcagcagcatgcaggagagagactgagaacacacagcattgagtcatcaggaaaactgaagatctcccctgaacaacactgggatttcactgcagaggacttgaaagaccttggagaaattggacgaggagcttatggttctgtcaacaaaatggtccacaaaccaagtgggcaaataatggcagttaaaagaattcggtcaacagtggatgaaaaagaacaaaaacaacttcttatggatttggatgtagtaatgcggagtagtgattgcccatacattgttcagttttatggtgcactcttcagagagggtgactgttggatctgtatggaactcatgtctacctcgtttgataagttttacaaatatgtatatagtgtattagatgatgttattccagaagaaattttaggcaaaatcactttagcaactgtgaaagcactaaaccacttaaaagaaaacttgaaaattattcacagagatatcaaaccttccaatattcttctggacagaagtggaaatattaagctctgtgacttcggcatcagtggacagcttgtggactctattgccaagacaagagatgctggctgtaggccatacatggcacctgaaagaatagacccaagcgcatcacgacaaggatatgatgtccgctctgatgtctggagtttggggatcacattgtatgagttggccacaggccgatttccttatccaaagtggaatagtgtatttgatcaactaacacaagtcgtgaaaggagatcctccgcagctgagtaattctgaggaaagggaattctccccgagtttcatcaactttgtcaacttgtgccttacgaaggatgaatccaaaaggccaaagtataaagagcttctgaaacatccctttattttgatgtatgaagaacgtgccgttgaggtcgcatgctatgtttgtaaaatcctggatcaaatgccagctactcccagctctcccatgtatgtcgattgatatcgctgctacatcagactct

SEQ ID NO: 154944 - DNA, 961 bp, Homo sapiens
  Payload ID: 10461
  Gene Symbol: MAP2K4
  Gene Name: mitogen-activated protein kinase kinase 4
  ENST ID: ENST00000602305
  CDS Start-End: 18-155
gctcttcactcccaacaatggcggctccgagcccgagcggcggcggcggctccgggggcggcagcggcagcggcacccccggccccgtagggtccccggcgccaggccacccggccgtcagcagcatgcaggagaattcggtcaacagtggatgaaaaagaacaaaaacaacttcttatggatttggatgtagtaatgcggagtagtgattgcccatacattgttcagttttatggtgcactcttcagagagggtgactgttggatctgtatggaactcatgtctacctcgtttgataagttttacaaatatgtatatagtgtattagatgatgttattccagaagaaattttaggcaaaatcactttagcaactgtgaaagcactaaaccacttaaaagaaaacttgaaaattattcacagagatatcaaaccttccaatattcttctggacagaagtggaaatattaagctctgtgacttcggcatcagtggacagcttgtggactctattgccaagacaagagatgctggctgtaggccatacatggcacctgaaagaatagacccaagcgcatcacgacaaggatatgatgtccgctctgatgtctggagtttggggatcacattgtatgagttggccacaggccgatttccttatccaaagtggaatagtgtatttgatcaactaacacaagtcgtgaaaggagatcctccgcagctgagtaattctgaggaaagggaattctccccgagtttcatcaactttgtcaacttgtgccttacgaaggatgaatccaaaaggccaaagtataaagagcttctgaaacatccctttattttgatgtatgaagaacgtgccgttgaggtcgcatgctatgtttgtaaaatcctggatcaaatgccagctactcccagctctcccatgtatgtcgattgatatcgctgctacatcagactct

SEQ ID NO: 154945 - DNA, 2347 bp, Homo sapiens
  Payload ID: 10462
  Gene Symbol: MAP2K5
  Gene Name: mitogen-activated protein kinase kinase 5
  Uniprot ID: Q13163
  ENST ID: ENST00000178640
  CDS Start-End: 628-1974
ctcctcctcctctcgccgctaccgccgtcgccgccgccgcagccgccgccagtccgcgcggcctcgggtggccggagctcagcctgcgcgcgccgcgccctgtgtctccgggtggggcagaagactcgccccttgaacctcccgcggggactctccgtggtgtggcggccctggggctctttcttaatagccccggactgagtcccctccagtcgaggaccctctcctagtccactgacgagcggtggacacctgccgctgtatctcccccaaaccgagtccttgccctgctgcctcctcatacccacacggcggcagagaccttcaccatagcgttcgctcaactccagaaccttccgacctccgctagttcctgcgggcctttgcccgcttcccggtgcaccctccccgggagacacctcagacccccgacagcctgggcaggctcggtgcctgcgggtgcgttcctgatcacccctcccctcttccctccccctcatcctccattcccttgttttcaccctctgtcctctgcccgtcactccccttgtcacctcttggagccccctcctaaccagcggccagtgggtttcccataccccaggatgtgagcctctttaacctgtaatgctgtggctagcccttggcccctttcctgccatggagaaccaggtgctggtaattcgcatcaagatcccaaatagtggcgcggtggactggacagtgcactccgggccgcagttactcttcagggatgtgctggatgtgataggccaggttctgcctgaagcaacaactacagcatttgaatatgaagatgaagatggtgatcgaattacagtgagaagtgatgaggaaatgaaggcaatgctgtcatattattattccacagtaatggaacagcaagtaaatggacagttaatagagcctctgcagatatttccaagagcctgcaagcctcctggggaacggaacatacatggcctgaaggtgaatactcgggccggaccctctcaacacagcagcccagcagtctcagattcacttccaagcaatagcttaaagaagtcttctgctgaactgaaaaaaatactagccaatggccagatgaatgaacaagacatacgatatcgggacactcttggtcatggcaacggaggcacagtctacaaagcatatcatgtcccgagtgggaaaatattagctgtaaaggtcatactactagatattacactggaacttcagaagcaaattatgtctgaattggaaattctttataagtgcgattcatcatatatcattggattttatggagcattttttgtagaaaacaggatttcaatatgtacagaattcatggatgggggatctttggatgtatataggaaaatgccagaacatgtccttggaagaattgcagtagcagttgttaaaggccttacttatttgtggagtttaaagattttacatagagacgtgaagccctccaatatgctagtaaacacaagaggacaggttaagctgtgtgattttggagttagcactcagctggtgaattctatagccaagacgtatgttggaacaaatgcttatatggcgcctgaaaggatttcaggggagcagtatggaattcattctgatgtctggagcttaggaatctcttttatggagcttgctcttgggaggtttccatatcctcagattcagaaaaaccagggatctttaatgcctctccagcttctgcagtgcattgttgatgaggattcgcccgtccttccagttggagagttctcggagccatttgtacatttcatcactcagtgtatgcgaaaacagccaaaagaaaggccagcacctgaagaattgatgggccacccgttcatcgtgcagttcaatgatggaaatgccgccgtggtgtccatgtgggtgtgccgggcgctggaggagaggcggagccagcaggggcccccgtgaggctgccgcagggcactgaaagcccaggaccagtaaccaaggagaacaacccacccgtcgcccttctccgtatgctgcctgcgccagaagagctttgctgggccctggcttccctgccctcgccttcacctctgtcagcaggtggccttgcctggggagccccatgtgtggcccaccccaccaggccatccccataccttctggtttgaaggcgctgacactggcagagaggtaaagggtggggcattgagaatggaggctcccagggtccctgcccacttctgttttcctaatgtttttctctataaagggtcaggcccgtcagcatcactgatgggaataaaagtattaatgctttgtgacagcctctgcc

SEQ ID NO: 154946 - DNA, 1491 bp, Homo sapiens
  Payload ID: 10462
  Gene Symbol: MAP2K5
  Gene Name: mitogen-activated protein kinase kinase 5
  ENST ID: ENST00000340972
  CDS Start-End: 352-1128
aaactgaatcacctgcagggtctgacgcctgcatggaatgatgagggaaatttaattttccaagcaaagtgtgaagtgtgtgccactccagcaaataaacgaagtcatccatgacagcttgtgatgaattgccgtatttatactgtatattttaatagcctcacactaatttaaattgagcacagagtaaattataattcagtcacttgactgcttatatttaacttgacaactcatccttatttgtcctggaggtgtagtggagagcagtggaaatgcaccaaggagatgagggatgcatgctcaaggcagaatgtacatattgagggccagagctagagatgaattttgatggaggactttgaggtcatactactagatattacactggaacttcagaagcaaattatgtctgaattggaaattctttataagtgcgattcatcatatatcattggattttatggagcattttttgtagaaaacaggatttcaatatgtacagaattcatggatgggggatctttggatgtatataggaaaatgccagaacatgtccttggaagaattgcagtagcagttgttaaaggccttacttatttgtggagtttaaagattttacatagagacgtgaagccctccaatatgctagtaaacacaagaggacaggttaagctgtgtgattttggagttagcactcagctggtgaattctatagccaagacgtatgttggaacaaatgcttatatggcgcctgaaaggatttcaggggagcagtatggaattcattctgatgtctggagcttaggaatctcttttatggagcttgctcttgggaggtttccatatcctcagattcagaaaaaccagggatctttaatgcctctccagcttctgcagtgcattgttgatgaggattcgcccgtccttccagttggagagttctcggagccatttgtacatttcatcactcagtgtatgcgaaaacagccaaaagaaaggccagcacctgaagaattgatgggccacccgttcatcgtgcagttcaatgatggaaatgccgccgtggtgtccatgtgggtgtgccgggcgctggaggagaggcggagccagcaggggcccccgtgaggctgccgcagggcactgaaagcccaggaccagtaaccaaggagaacaacccacccgtcgcccttctccgtatgctgcctgcgccagaagagctttgctgggccctggcttccctgccctcgccttcacctctgtcagcaggtggccttgcctggggagccccatgtgtggcccaccccaccaggccatccccataccttctggtttgaaggcgctgacactggcagagaggtaaagggtggggcattgagaatggaggctcccagggtccctgcccacttctgttttcctaatgtttttctctataaagggtcaggcccgtcagcatcactgatgggaataaaagtattaatgctttgtgac

SEQ ID NO: 154947 - DNA, 1783 bp, Homo sapiens
  Payload ID: 10462
  Gene Symbol: MAP2K5
  Gene Name: mitogen-activated protein kinase kinase 5
  Uniprot ID: Q13163
  ENST ID: ENST00000354498
  CDS Start-End: 184-1422
gaagttgcagccactctgctaagtgccctgcttggaaaggctgtgggctccctgctgagaaatactgcgagcggctttgtcagccggctgcctggtgccagttctgctgcagcctgggagggacactgtggcagagctcctggagagaaatgaggtttgcaggccattggagttggactggacatgatggagggtcactttccccagagcgatgtgataggccaggttctgcctgaagcaacaactacagcatttgaatatgaagatgaagatggtgatcgaattacagtgagaagtgatgaggaaatgaaggcaatgctgtcatattattattccacagtaatggaacagcaagtaaatggacagttaatagagcctctgcagatatttccaagagcctgcaagcctcctggggaacggaacatacatggcctgaaggtgaatactcgggccggaccctctcaacacagcagcccagcagtctcagattcacttccaagcaatagcttaaagaagtcttctgctgaactgaaaaaaatactagccaatggccagatgaatgaacaagacatacgatatcgggacactcttggtcatggcaacggaggcacagtctacaaagcatatcatgtcccgagtgggaaaatattagctgtaaaggtcatactactagatattacactggaacttcagaagcaaattatgtctgaattggaaattctttataagtgcgattcatcatatatcattggattttatggagcattttttgtagaaaacaggatttcaatatgtacagaattcatggatgggggatctttggatgtatataggaaaatgccagaacatgtccttggaagaattgcagtagcagttgttaaaggccttacttatttgtggagtttaaagattttacatagagacgtgaagccctccaatatgctagtaaacacaagaggacaggttaagctgtgtgattttggagttagcactcagctggtgaattctatagccaagacgtatgttggaacaaatgcttatatggcgcctgaaaggatttcaggggagcagtatggaattcattctgatgtctggagcttaggaatctcttttatggagcttgctcttgggaggtttccatatcctcagattcagaaaaaccagggatctttaatgcctctccagcttctgcagtgcattgttgatgaggattcgcccgtccttccagttggagagttctcggagccatttgtacatttcatcactcagtgtatgcgaaaacagccaaaagaaaggccagcacctgaagaattgatgggccacccgttcatcgtgcagttcaatgatggaaatgccgccgtggtgtccatgtgggtgtgccgggcgctggaggagaggcggagccagcaggggcccccgtgaggctgccgcagggcactgaaagcccaggaccagtaaccaaggagaacaacccacccgtcgcccttctccgtatgctgcctgcgccagaagagctttgctgggccctggcttccctgccctcgccttcacctctgtcagcaggtggccttgcctggggagccccatgtgtggcccaccccaccaggccatccccataccttctggtttgaaggcgctgacactggcagagaggtaaagggtggggcattgagaatggaggctcccagggtccctgcccacttctgttttcctaatgtttttctctataaagggtcaggcccgtcagcatcactgatgggaataaaagtattaatgctttgtg

SEQ ID NO: 154948 - DNA, 1689 bp, Homo sapiens
  Payload ID: 10462
  Gene Symbol: MAP2K5
  Gene Name: mitogen-activated protein kinase kinase 5
  Uniprot ID: Q13163
  ENST ID: ENST00000395476
  CDS Start-End: 6-1322
ctgtaatgctgtggctagcccttggcccctttcctgccatggagaaccaggtgctggtaattcgcatcaagatcccaaatagtggcgcggtggactggacagtgcactccgggccgcagttactcttcagggatgtgctggatgtgataggccaggttctgcctgaagcaacaactacagcatttgaatatgaagatgaagatggtgatcgaattacagtgagaagtgatgaggaaatgaaggcaatgctgtcatattattattccacagtaatggaacagcaagtaaatggacagttaatagagcctctgcagatatttccaagagcctgcaagcctcctggggaacggaacatacatggcctgaaggtgaatactcgggccggaccctctcaacacagcagcccagcagtctcagattcacttccaagcaatagcttaaagaagtcttctgctgaactgaaaaaaatactagccaatggccagatgaatgaacaagacatacgatatcgggacactcttggtcatggcaacggaggcacagtctacaaagcatatcatgtcccgagtgggaaaatattagctgtaaaggtcatactactagatattacactggaacttcagaagcaaattatgtctgaattggaaattctttataagtgcgattcatcatatatcattggattttatggagcattttttgtagaaaacaggatttcaatatgtacagaattcatggatgggggatctttggatgtatataggaaaatgccagaacatgtccttggaagaattgcagtagcagttgttaaaggccttacttatttgtggagtttaaagattttacatagagacgtgaagccctccaatatgctagtaaacacaagaggacaggttaagctgtgtgattttggagttagcactcagctggtgaattctatagccaagacgtatgttggaacaaatgcttatatggcgcctgaaaggatttcaggggagcagtatggaattcattctgatgtctggagcttaggaatctcttttatggagattcagaaaaaccagggatctttaatgcctctccagcttctgcagtgcattgttgatgaggattcgcccgtccttccagttggagagttctcggagccatttgtacatttcatcactcagtgtatgcgaaaacagccaaaagaaaggccagcacctgaagaattgatgggccacccgttcatcgtgcagttcaatgatggaaatgccgccgtggtgtccatgtgggtgtgccgggcgctggaggagaggcggagccagcaggggcccccgtgaggctgccgcagggcactgaaagcccaggaccagtaaccaaggagaacaacccacccgtcgcccttctccgtatgctgcctgcgccagaagagctttgctgggccctggcttccctgccctcgccttcacctctgtcagcaggtggccttgcctggggagccccatgtgtggcccaccccaccaggccatccccataccttctggtttgaaggcgctgacactggcagagaggtaaagggtggggcattgagaatggaggctcccagggtccctgcccacttctgttttcctaatgtttttctctataaagggtcaggcccgtcagcatcactgatgggaataaaagtattaatgctttgtgacagcc

SEQ ID NO: 154949 - DNA, 429 bp, Homo sapiens
  Payload ID: 10462
  Gene Symbol: MAP2K5
  Gene Name: mitogen-activated protein kinase kinase 5
  ENST ID: ENST00000439036
  CDS Start-End: 1-387
gatcgaattacagtgagaagtgatgaggaaatgaaggcaatgctgtcatattattattccacagtaatggaacagcaagtaaatggacagttaatagagcctctgcagatatttccaagagcctgcaagcctcctggggaacggaacatacatggcctgaaggtgaatactcgggccggaccctctcaacacagcagcccagcagtctcagattcacttccaagcaatagcttaaagaagtcttctgctgaactgaaaaaaatactagccaatggccagatgaatgaacaagacatacgatatcgggacactcttggtcatggcaacggaggcacagtctacaaagcatatcatgtcccgagtgggaaaatattagctgtaaagtgaagtgtgtgccactccagcaaataaacgaagtcatccatgaca

SEQ ID NO: 154950 - DNA, 814 bp, Homo sapiens
  Payload ID: 10462
  Gene Symbol: MAP2K5
  Gene Name: mitogen-activated protein kinase kinase 5
  ENST ID: ENST00000559262
  CDS Start-End: 1-548
cctgcaagcctcctggggaacggaacatacatggcctgaaggtgaatactcgggccggaccctctcaacacagcagcccagcagtctcagattcacttccaagcaatagcttaaagaagtcttctgctgaactgaaaaaaatactagccaatggccagatgaatgaacaagacatacgatatcgggacactcttggtcatggcaacggaggcacagtctacaaagcatatcatgtcccgagtgggaaaatattagctgtaaaggtcatactactagatattacactggaacttcagaagcaaattatgtctgaattggaaattctttataagtgcgattcatcatatatcattggattttatggagcattttttgtagaaaacaggatttcaatatgtacagaattcatggatgggggatctttggatgtatataggaaaatgccagaacatgtccttggaagaattgcagtagcagttgttaaaggccttacttatttgtggagtttaaagattttacatagagcaaacaaagacctgtgcacctgaaaaggggtaagagagtgaccacagtgaccacaaaagcacctgcagaaactatggattatcaatttatttattagtaattagtcatggtaatgagaaatcaagttgtgttttgaggttgattttttaaaacagctttattgatatataatttgcatgccataaaattcatctactcaattcagtgatttttagtaagtttataaagttgtgcaaccataaccataatccagttttagaacattttcatcaccccaaaaaagtgtcct

SEQ ID NO: 154951 - DNA, 412 bp, Homo sapiens
  Payload ID: 10462
  Gene Symbol: MAP2K5
  Gene Name: mitogen-activated protein kinase kinase 5
  ENST ID: ENST00000557869
  CDS Start-End: 1-150
cagtatggaattcattctgatgtctggagcttaggaatctcttttatggagcctctccagcttctgcagtgcattgttgatgaggattcgcccgtccttccagttggagagttctcggagccatttgtacatttcatcactcagtggtgagcccgtttacaaacatgccatgccctcaatgtaaatgatacatgccattaactcggcagctccgtgagaccttatggctctccctgcatccttttggagacaggagggacttcggggccttgggcagatggggcagcaaagctgaagaaattgtttaaattatgtaaacgttatttacacaaagggtcataagcatacttcagagcctttttcctgatttaataaactgctgaaagtcatgatacttctttaagcacaaata

SEQ ID NO: 154952 - DNA, 1851 bp, Homo sapiens
  Payload ID: 10463
  Gene Symbol: MAP2K6
  Gene Name: mitogen-activated protein kinase kinase 6
  ENST ID: ENST00000359094
  CDS Start-End: 152-358
tgaaagtccatctgctgcatcggtcaagagaaactccacttgcatgaagattgcacgcctgcagcttgcatctttgttgcaaaactagctacagaagagaagcaaggcaaagtcttttgtgctcccctcccccatcaaaggaaaggggaaaatgtctcagtcgaaaggcaagaagcgaaaccctggccttaaaattccaaaagaagcatttgaacaacctcagaccagttccacaccacctcgagatttagactccaaggcttgcatttctattggaaatcagaactttgaggtgaaggcagatgacctggagcctataatggaactgggacgagcggatccgagccacagtaaatagccaggaacagaaacggctactgatggatttggatatttccatgaggacggtggactgtccattcactgtcaccttttatggcgcactgtttcgggagggtgatgtgtggatctgcatggagctcatggatacatcactagataaattctacaaacaagttattgataaaggccagacaattccagaggacatcttagggaaaatagcagtttctattgtaaaagcattagaacatttacatagtaagctgtctgtcattcacagagacgtcaagccttctaatgtactcatcaatgctctcggtcaagtgaagatgtgcgattttggaatcagtggctacttggtggactctgttgctaaaacaattgatgcaggttgcaaaccatacatggcccctgaaagaataaacccagagctcaaccagaagggatacagtgtgaagtctgacatttggagtctgggcatcacgatgattgagttggccatccttcgatttccctatgattcatggggaactccatttcagcagctcaaacaggtggtagaggagccatcgccacaactcccagcagacaagttctctgcagagtttgttgactttacctcacagtgcttaaagaagaattccaaagaacggcctacatacccagagctaatgcaacatccatttttcaccctacatgaatccaaaggaacagatgtggcatcttttgtaaaactgattcttggagactaaaaagcagtggacttaatcggttgaccctactgtggattggtgggtttcggggtgaagcaagttcactacagcatcaatagaaagtcatctttgagataatttaaccctgcctctcagagggttttctctcccaattttctttttactccccctcttaagggggccttggaatctatagtatagaatgaactgtctagatggatgaattatgataaaggcttaggacttcaaaaggtgattaaatatttaatgatgtgtcatatgagtcctcaagcttctcagacttctcttattctttacaaaatgaatgcattggccctgacaaaaaggtgctacggtagtgatgaaattataagtagatttgtagtttgtcccatttattattttaatatttatgtttaagtgcttggttgaaaagattccattttatacaagaagggagattcaaaaaaaaaatataaggttgggttagcaatatttatagggcttttattttttaagttcaattgtgtctgtggtccagaagaaattatttaatatgcatctttgagaatattataaaaatatcaaaaaggagctcttcttgtgaaatgtctgttccagctgttgtgactgctgccatttttgcaaacatctgcccaatcctgggtgatcaccacatcttttaggggaagtgacaagatgctctggtcatactctttttcccaactttggaaaacataaaaatcactcatataacagctcaaagagtaaaaca

SEQ ID NO: 154953 - DNA, 632 bp, Homo sapiens
  Payload ID: 10463
  Gene Symbol: MAP2K6
  Gene Name: mitogen-activated protein kinase kinase 6
  ENST ID: ENST00000588110
  CDS Start-End: 249-632
ctgtttctccttgccgaagtgtggtctttggagctaagtgaagaatgacttctgttaggttttcctctgctggtcttccttgcagcctcgaaaacctcaccagagtcgcctctgctggtctcttactgtgctgctctgtcagagatgggcaatagagacaggatttcaccgtgtcggccaggatggtctccatctcctgacctcgtgattcgcccgtctcggcctcccaaagtgctgggactacaggcatgagccaccgcgcctgggcagaaggcaagaagcgaaaccctggccttaaaattccaaaagaagcatttgaacaacctcagaccagttccacaccacctcgagatttagactccaaggcttgcatttctattggaaatcagaactttgaggtgaaggcagatgacctggagcctataatggaactgggacgaggtgcgtacggggtggtggagaagatgcggcacgtgcccagcgggcagatcatggcagtgaagcggatccgagccacagtaaatagccaggaacagaaacggctactgatggatttggatatttccatgaggacggtggactgtccattcactgtcaccttttatggcgcactgtttcgggagggtgatgtg

SEQ ID NO: 154954 - DNA, 669 bp, Homo sapiens
  Payload ID: 10463
  Gene Symbol: MAP2K6
  Gene Name: mitogen-activated protein kinase kinase 6
  ENST ID: ENST00000589295
  CDS Start-End: 417-669
acatagacccacttcccttctcccttcctgaagctgcaatttcctcggaacaatgagcttgcagaggtttgctgcaatccgaacttgaggagggggtggagtctgttcagttctgtttctccttgccgaagtgtggtctttggagctaagtgaagaatgacttctgttaggttttcctctgctggtcttccttgcagcctcgaaaacctcaccagagtcgcctctgctggtctcttactgtgctgctctgtcagagatgggcaagcaagaagcgaaaccctggccttaaaattccaaaagaagcatttgaacaacctcagaccagttccacaccacctcgagatttagactccaaggcttgcatttctattggaaatcagaactttgaggtgaaggcagatgacctggagcctataatggaactgggacgaggtgcgtacggggtggtggagaagatgcggcacgtgcccagcgggcagatcatggcagtgaagcggatccgagccacagtaaatagccaggaacagaaacggctactgatggatttggatatttccatgaggacggtggactgtccattcactgtcaccttttatggcgcactgtttcgggagggtgatgtgtggatctgcatggagctcatggatacatcactagataaattctaca

SEQ ID NO: 154955 - DNA, 1512 bp, Homo sapiens
  Payload ID: 10463
  Gene Symbol: MAP2K6
  Gene Name: mitogen-activated protein kinase kinase 6
  Uniprot ID: P52564
  ENST ID: ENST00000589647
  CDS Start-End: 410-1246
gcagagtgttgctgtgtgtgcttgtgatttgtattttatttgatgtaaacgtgaaggcagagtattttctaacactgtaattcaactaggttttgtgtctcctggatctatttttttttcttgttgttctgaggagctgatatacttggaaatattaggtttaagatatgcagatgtccaacttatatacatagtcaagggtttagagtctggagacaggaggctggcaatttcaactaggaggcagtaaattcagggcaagaagcgaaaccctggccttaaaattccaaaagaagcatttgaacaacctcagaccagttccacaccacctcgagatttagactccaaggcttgcatttctattggaaatcagaactttgaggtgaaggcagatgacctggagcctataatggaactgggacgaggtgcgtacggggtggtggagaagatgcggcacgtgcccagcgggcagatcatggcagtgaagcggatccgagccacagtaaatagccaggaacagaaacggctactgatggatttggatatttccatgaggacggtggactgtccattcactgtcaccttttatggcgcactgtttcgggagggtgatgtgtggatctgcatggagctcatggatacatcactagataaattctacaaacaagttattgataaaggccagacaattccagaggacatcttagggaaaatagcagtttctattgtaaaagcattagaacatttacatagtaagctgtctgtcattcacagagacgtcaagccttctaatgtactcatcaatgctctcggtcaagtgaagatgtgcgattttggaatcagtggctacttggtggactctgttgctaaaacaattgatgcaggttgcaaaccatacatggcccctgaaagaataaacccagagctcaaccagaagggatacagtgtgaagtctgacatttggagtctgggcatcacgatgattgagttggccatccttcgatttccctatgattcatggggaactccatttcagcagctcaaacaggtggtagaggagccatcgccacaactcccagcagacaagttctctgcagagtttgttgactttacctcacagtgcttaaagaagaattccaaagaacggcctacatacccagagctaatgcaacatccatttttcaccctacatgaatccaaaggaacagatgtggcatcttttgtaaaactgattcttggagactaaaaagcagtggacttaatcggttgaccctactgtggattggtgggtttcggggtgaagcaagttcactacagcatcaatagaaagtcatctttgagataatttaaccctgcctctcagagggttttctctcccaattttctttttactccccctcttaagggggccttggaatctatagtatagaatgaactgtctagatggatgaattatgataaaggcttaggacttcaaaaggtgattaaatatttaatgatgtgtcatatgag

SEQ ID NO: 154956 - DNA, 2870 bp, Homo sapiens
  Payload ID: 10463
  Gene Symbol: MAP2K6
  Gene Name: mitogen-activated protein kinase kinase 6
  Uniprot ID: P52564
  ENST ID: ENST00000590474
  CDS Start-End: 288-1292
gttccaagtttggagcttttagctgccagccctggcccatcatgtagctgcagcacagccttccctaacgttgcaactgggggaaaaatcactttccagtctgttttgcaaggtgtgcatttccatcttgattccctgaaagtccatctgctgcatcggtcaagagaaactccacttgcatgaagattgcacgcctgcagcttgcatctttgttgcaaaactagctacagaagagaagcaaggcaaagtcttttgtgctcccctcccccatcaaaggaaaggggaaaatgtctcagtcgaaaggcaagaagcgaaaccctggccttaaaattccaaaagaagcatttgaacaacctcagaccagttccacaccacctcgagatttagactccaaggcttgcatttctattggaaatcagaactttgaggtgaaggcagatgacctggagcctataatggaactgggacgaggtgcgtacggggtggtggagaagatgcggcacgtgcccagcgggcagatcatggcagtgaagcggatccgagccacagtaaatagccaggaacagaaacggctactgatggatttggatatttccatgaggacggtggactgtccattcactgtcaccttttatggcgcactgtttcgggagggtgatgtgtggatctgcatggagctcatggatacatcactagataaattctacaaacaagttattgataaaggccagacaattccagaggacatcttagggaaaatagcagtttctattgtaaaagcattagaacatttacatagtaagctgtctgtcattcacagagacgtcaagccttctaatgtactcatcaatgctctcggtcaagtgaagatgtgcgattttggaatcagtggctacttggtggactctgttgctaaaacaattgatgcaggttgcaaaccatacatggcccctgaaagaataaacccagagctcaaccagaagggatacagtgtgaagtctgacatttggagtctgggcatcacgatgattgagttggccatccttcgatttccctatgattcatggggaactccatttcagcagctcaaacaggtggtagaggagccatcgccacaactcccagcagacaagttctctgcagagtttgttgactttacctcacagtgcttaaagaagaattccaaagaacggcctacatacccagagctaatgcaacatccatttttcaccctacatgaatccaaaggaacagatgtggcatcttttgtaaaactgattcttggagactaaaaagcagtggacttaatcggttgaccctactgtggattggtgggtttcggggtgaagcaagttcactacagcatcaatagaaagtcatctttgagataatttaaccctgcctctcagagggttttctctcccaattttctttttactccccctcttaagggggccttggaatctatagtatagaatgaactgtctagatggatgaattatgataaaggcttaggacttcaaaaggtgattaaatatttaatgatgtgtcatatgagtcctcaagcttctcagacttctcttattctttacaaaatgaatgcattggccctgacaaaaaggtgctacggtagtgatgaaattataagtagatttgtagtttgtcccatttattattttaatatttatgtttaagtgcttggttgaaaagattccattttatacaagaagggagattcaaaaaaaaaatataaggttgggttagcaatatttatagggcttttattttttaagttcaattgtgtctgtggtccagaagaaattatttaatatgcatctttgagaatattataaaaatatcaaaaaggagctcttcttgtgaaatgtctgttccagctgttgtgactgctgccatttttgcaaacatctgcccaatcctgggtgatcaccacatcttttaggggaagtgacaagatgctctggtcatactctttttcccaactttggaaaacataaaaatcactcatataacagctcaaagagtaaaacatttggttcttctgacacttgtggtatagtattagtggaaagtgatttgtaatatgattttatatccacctacctattcatctacctgtgtgtatgtgtgtgtttgtgtgtctatttggcaattcacaagtcctgccaagtggtttctatgagcatctctgtttggtaaggaggacaattgtcagttttgagggggacatgtgttaaatcacagaaaaaaatggtgccttcttctgcgtttgtccctcctgccatgtgtaagttgtaaggattgcctttgtagttaatgtactctttggctttgtttgtttgttttcttcttcagtgaagcagccttactattcatagaagggctagaataggagaaaatgaaaggtagtgagtaattctttgataagatgaggaaataatgggaaaggttgaattaattcctgggcatggactaccagatgaccacaagttgcgttgaggccgcatctttcttcagcagcgtgcaatagctggctcctctataggagatgagcttcattgggagttcctagcaagttgactaaacagcaaaagttctttctcgtgggtaaatatacccacaggttctatgatttgtagctctaggtttcttgatgatcaaggagtgaagtaattgacagggaaaatatagacctatgataaataaccaggaagcattgcttttggacaaggaaggacagagggttttgattttaaaaagaagaaaaaaaaaccttattttttctttcttggcctcaagttcaatatggagaggattgcttccctgaatcctctcttccttccccttttaga

SEQ ID NO: 154957 - DNA, 1509 bp, Homo sapiens
  Payload ID: 10463
  Gene Symbol: MAP2K6
  Gene Name: mitogen-activated protein kinase kinase 6
  Uniprot ID: P52564
  ENST ID: ENST00000613873
  CDS Start-End: 409-1245
gcagagtgttgctgtgtgtgcttgtgatttgtattttatttgatgtaaacgtgaaggcagagtattttctaacactgtaattcaactaggttttgtgtctcctggatctatttttttttcttgttgttctgaggagctgatatacttggaaatattaggtttaagatatgcagatgtccaacttatatacatagtcaagggtttagagtctggagacaggaggctggcaatttcaactaggaggcagtaaattcaggcaagaagcgaaaccctggccttaaaattccaaaagaagcatttgaacaacctcagaccagttccacaccacctcgagatttagactccaaggcttgcatttctattggaaatcagaactttgaggtgaaggcagatgacctggagcctataatggaactgggacgaggtgcgtacggggtggtggagaagatgcggcacgtgcccagcgggcagatcatggcagtgaagcggatccgagccacagtaaatagccaggaacagaaacggctactgatggatttggatatttccatgaggacggtggactgtccattcactgtcaccttttatggcgcactgtttcgggagggtgatgtgtggatctgcatggagctcatggatacatcactagataaattctacaaacaagttattgataaaggccagacaattccagaggacatcttagggaaaatagcagtttctattgtaaaagcattagaacatttacatagtaagctgtctgtcattcacagagacgtcaagccttctaatgtactcatcaatgctctcggtcaagtgaagatgtgcgattttggaatcagtggctacttggtggactctgttgctaaaacaattgatgcaggttgcaaaccatacatggcccctgaaagaataaacccagagctcaaccagaagggatacagtgtgaagtctgacatttggagtctgggcatcacgatgattgagttggccatccttcgatttccctatgattcatggggaactccatttcagcagctcaaacaggtggtagaggagccatcgccacaactcccagcagacaagttctctgcagagtttgttgactttacctcacagtgcttaaagaagaattccaaagaacggcctacatacccagagctaatgcaacatccatttttcaccctacatgaatccaaaggaacagatgtggcatcttttgtaaaactgattcttggagactaaaaagcagtggacttaatcggttgaccctactgtggattggtgggtttcggggtgaagcaagttcactacagcatcaatagaaagtcatctttgagataatttaaccctgcctctcagagggttttctctcccaattttctttttactccccctcttaagggggccttggaatctatagtatagaatgaactgtctagatggatgaattatgataaaggcttaggacttcaaaaggtgattaaatatttaatgatgtgtcatatg

SEQ ID NO: 154958 - DNA, 3361 bp, Homo sapiens
  Payload ID: 10464
  Gene Symbol: MAP2K7
  Gene Name: mitogen-activated protein kinase kinase 7
  Uniprot ID: O14733
  ENST ID: ENST00000397979
  CDS Start-End: 55-1314
ctgccggactgacgggcggccgggcggtgcgcggcggcggtggcggcggggaagatggcggcgtcctccctggaacagaagctgtcccgcctggaagcaaagctgaagcaggagaaccgggaggcccggcggaggatcgacctcaacctggatatcagcccccagcggcccaggcccaccctgcagctcccgctggccaacgatgggggcagccgctcgccatcctcagagagctccccgcagcaccccacgccccccgcccggccccgccacatgctggggctcccgtcaaccctgttcacaccccgcagcatggagagcattgagattgaccagaagctgcaggagatcatgaagcagacgggctacctgaccatcgggggccagcgctaccaggcagaaatcaacgacctggagaacttgggcgagatgggcagcggcacctgcggccaggtgtggaagatgcgcttccggaagaccggccacgtcattgccgttaagcaaatgcggcgctccgggaacaaggaggagaacaagcgcatcctcatggacctggatgtggtgctgaagagccacgactgcccctacatcgtgcagtgctttgggacgttcatcaccaacacggacgtcttcatcgccatggagctcatgggcacctgcgctgagaagctcaagaagcggatgcagggccccatccccgagcgcattctgggcaagatgacagtggcgattgtgaaggcgctgtactacctgaaggagaagcacggtgtcatccaccgcgacgtcaagccctccaacatcctgctggacgagcggggccagatcaagctctgcgacttcggcatcagcggccgcctggtggactccaaagccaagacgcggagcgccggctgtgccgcctacatggcacccgagcgcattgaccccccagaccccaccaagccggactatgacatccgggccgacgtatggagcctgggcatctcgttggtggagctggcaacaggacagtttccctacaagaactgcaagacggactttgaggtcctcaccaaagtcctacaggaagagcccccgcttctgcccggacacatgggcttctcgggggacttccagtccttcgtcaaagactgccttactaaagatcacaggaagagaccaaagtataataagctacttgaacacagcttcatcaagcgctacgagacgctggaggtggacgtggcgtcctggttcaaggatgtcatggcgaagactgagtcaccgcggactagcggcgtcctgagccagccccacctgcccttcttcaggtagctgcttggcggcggccagccccacagggggccaggggcatggccacaggcccccctccccacttggccacccagctgcctgccaggggagacctgggacctggacggccacctaggactgaggacagagagtggggggtgcccacccaccccccccgccccgggcctaccaagcccccgcccttcccaccccggggtcagccggccgtgtgcgtcccccgacagacactgtgaacggaagacagcaggccgcgatcagagtcgctgttcattcagccgcagcctctgggccggggcggcccccaggggccaggagagagccctggagtcccgcagccaccatgcacgctcccagcgtgctgtgtccttcgccactcccacgcgcccgttcctcttccgtcgccctctgtcccctgctctacctctctgtccttgtctggctctcccgtcaccctccctgcctctgtctctcttctggcctgagcctgggcccagccacctcctgacgggtcccctgggtctgcataggtctcccatggcgcaatgagtcagtggcccccagccaggcagtgtgggcattgccactgcggctggacggggctgcgcgctcgcgctctctctctctctctctctctctctttgatctcagggggtcctttttggagtttattgtattttattgtacttggtggggtgtttggggtgggggcggaggagagcttgttctcgtggggttgtcggtaccttcagaaacttttaccaaagtcacgattagctgcttgtggtggggccccaaccgccctcgggcactggggagctgggctggggctgctgctctggggtctccgggggccacagcttggggtgagttgaagacctcaggggatgtggaggggtctgcggggccctggccgcacaggatggccttcagggaaggtggtcttggggcatggtgcagagcaggtgaccggagggaatcggtgacggagcggggccaagggaggggtccggagggagtcagggatggagggcagagggagtggatgtgggggtttgaggacgtgtgacaagctccagcaggggtgggggccgggctgagggtgggggtgcgaggtggtcactcccatcgtgcccctggccgtccctccactcacccacacctggcccagtccacgttgaggtccaggactgggaaggaccgggtgagtgcaccggggacccaggccaggtgccccccggagcctgctggggtggccagagcaggagggggtgtgtttcctttttgtgggtgttgcatgcaaatcaagtggacaagaaaaaataacaaaacaaaaaacaagaaaaaaaaaacacaaaaccccgtaaaatcacaaagaaaatccaacaccaaaggcgcagaagccggctggccgtggtgggggcagcgtaggcgtagcatccctctcctctcacttagcctgttgactcttgttattatcatgatattcacaaaacgccgcatgtttaaaaagtcatagatgtcatcttctctctgcccccagggaggaaagccaccttctcttgccccttggcccctttgtcaggggccaggggtctgccgggtgggggtgccaacaggcctggccctttcctcccctgcatccagccatgggggcctctgcgattgccggaaggttgcatggctggtcccagggccagcacaggcccgaggccgggctgcctggttttatttttatttaactttattttctgttttatgagtgtgtgtccgcccacccccacccccttcagtgttaagtggggagccctgggggagtctctcctgcctcccagcctctcccaagacctcccccctcgtcaccagccatccctctggaccaggcagagggcggaccgggtgggcaggggcctgagggtggctcgggccagcccaccagccaatggacccctcctcaggccgccagtgtcgccctgcccctttttaaaacaaaatgccctcgtttgtaaacccttagacgcttgagaataaaccccttccttttcttcca

SEQ ID NO: 154959 - DNA, 3430 bp, Homo sapiens
  Payload ID: 10464
  Gene Symbol: MAP2K7
  Gene Name: mitogen-activated protein kinase kinase 7
  Uniprot ID: O14733
  ENST ID: ENST00000397981
  CDS Start-End: 103-1383
cggcggctcgacggggtcatccgggcgcaggcgcagtgcggtgtttgtctgccggactgacgggcggccgggcggtgcgcggcggcggtggcggcggggaagatggcggcgtcctccctggaacagaagctgtcccgcctggaagcaaagctgaagcaggagaaccgggaggcccggcggaggatcgacctcaacctggatatcagcccccagcggcccaggcccaccctgcagctcccgctggccaacgatgggggcagccgctcgccatcctcagagagctccccgcagcaccccacgccccccgcccggccccgccacatgctggggctcccgtcaaccctgttcacaccccgcagcatggagagcattgagattgaccagaagctgcaggagatcatgaagcagacgggctacctgaccatcgggggccagcgctaccaggcagaaatcaacgacctggagaacttgggcgagatgggcagcggcacctgcggccaggtgtggaagatgcgcttccggaagaccggccacgtcattgccgttaagcaaatgcggcgctccgggaacaaggaggagaacaagcgcatcctcatggacctggatgtggtgctgaagagccacgactgcccctacatcgtgcagtgctttgggacgttcatcaccaacacggacgtcttcatcgccatggagctcatgggcacctgcgctgagaagctcaagaagcggatgcagggccccatccccgagcgcattctgggcaagatgacagtggcgattgtgaaggcgctgtactacctgaaggagaagcacggtgtcatccaccgcgacgtcaagccctccaacatcctgctggacgagcggggccagatcaagctctgcgacttcggcatcagcggccgcctggtggactccaaagccaagacgcggagcgccggctgtgccgcctacatggcacccgagcgcattgaccccccagaccccaccaagccggactatgacatccgggccgacgtatggagcctgggcatctcgttgccctgcccgtctccctcccaggtggagctggcaacaggacagtttccctacaagaactgcaagacggactttgaggtcctcaccaaagtcctacaggaagagcccccgcttctgcccggacacatgggcttctcgggggacttccagtccttcgtcaaagactgccttactaaagatcacaggaagagaccaaagtataataagctacttgaacacagcttcatcaagcgctacgagacgctggaggtggacgtggcgtcctggttcaaggatgtcatggcgaagactgagtcaccgcggactagcggcgtcctgagccagccccacctgcccttcttcaggtagctgcttggcggcggccagccccacagggggccaggggcatggccacaggcccccctccccacttggccacccagctgcctgccaggggagacctgggacctggacggccacctaggactgaggacagagagtggggggtgcccacccaccccccccgccccgggcctaccaagcccccgcccttcccaccccggggtcagccggccgtgtgcgtcccccgacagacactgtgaacggaagacagcaggccgcgatcagagtcgctgttcattcagccgcagcctctgggccggggcggcccccaggggccaggagagagccctggagtcccgcagccaccatgcacgctcccagcgtgctgtgtccttcgccactcccacgcgcccgttcctcttccgtcgccctctgtcccctgctctacctctctgtccttgtctggctctcccgtcaccctccctgcctctgtctctcttctggcctgagcctgggcccagccacctcctgacgggtcccctgggtctgcataggtctcccatggcgcaatgagtcagtggcccccagccaggcagtgtgggcattgccactgcggctggacggggctgcgcgctcgcgctctctctctctctctctctctctctttgatctcagggggtcctttttggagtttattgtattttattgtacttggtggggtgtttggggtgggggcggaggagagcttgttctcgtggggttgtcggtaccttcagaaacttttaccaaagtcacgattagctgcttgtggtggggccccaaccgccctcgggcactggggagctgggctggggctgctgctctggggtctccgggggccacagcttggggtgagttgaagacctcaggggatgtggaggggtctgcggggccctggccgcacaggatggccttcagggaaggtggtcttggggcatggtgcagagcaggtgaccggagggaatcggtgacggagcggggccaagggaggggtccggagggagtcagggatggagggcagagggagtggatgtgggggtttgaggacgtgtgacaagctccagcaggggtgggggccgggctgagggtgggggtgcgaggtggtcactcccatcgtgcccctggccgtccctccactcacccacacctggcccagtccacgttgaggtccaggactgggaaggaccgggtgagtgcaccggggacccaggccaggtgccccccggagcctgctggggtggccagagcaggagggggtgtgtttcctttttgtgggtgttgcatgcaaatcaagtggacaagaaaaaataacaaaacaaaaaacaagaaaaaaaaaacacaaaaccccgtaaaatcacaaagaaaatccaacaccaaaggcgcagaagccggctggccgtggtgggggcagcgtaggcgtagcatccctctcctctcacttagcctgttgactcttgttattatcatgatattcacaaaacgccgcatgtttaaaaagtcatagatgtcatcttctctctgcccccagggaggaaagccaccttctcttgccccttggcccctttgtcaggggccaggggtctgccgggtgggggtgccaacaggcctggccctttcctcccctgcatccagccatgggggcctctgcgattgccggaaggttgcatggctggtcccagggccagcacaggcccgaggccgggctgcctggttttatttttatttaactttattttctgttttatgagtgtgtgtccgcccacccccacccccttcagtgttaagtggggagccctgggggagtctctcctgcctcccagcctctcccaagacctcccccctcgtcaccagccatccctctggaccaggcagagggcggaccgggtgggcaggggcctgagggtggctcgggccagcccaccagccaatggacccctcctcaggccgccagtgtcgccctgcccctttttaaaacaaaatgccctcgtttgtaaacccttagacgcttgagaataaaccccttccttttcttcca

SEQ ID NO: 154960 - DNA, 3396 bp, Homo sapiens
  Payload ID: 10464
  Gene Symbol: MAP2K7
  Gene Name: mitogen-activated protein kinase kinase 7
  Uniprot ID: O14733
  ENST ID: ENST00000397983
  CDS Start-End: 61-1368
gtttgtctgccggactgacgggcggccgggcggtgcgcggcggcggtggcggcggggaagatggcggcgtcctccctggaacagaagctgtcccgcctggaagcaaagctgaagcaggagaaccgggaggcccggcggaggatcgacctcaacctggatatcagcccccagcggcccaggcccattattgtgatcactctaagccctgctcctgccccgtcccaacgagcagccctgcagctcccgctggccaacgatgggggcagccgctcgccatcctcagagagctccccgcagcaccccacgccccccgcccggccccgccacatgctggggctcccgtcaaccctgttcacaccccgcagcatggagagcattgagattgaccagaagctgcaggagatcatgaagcagacgggctacctgaccatcgggggccagcgctaccaggcagaaatcaacgacctggagaacttgggcgagatgggcagcggcacctgcggccaggtgtggaagatgcgcttccggaagaccggccacgtcattgccgttaagcaaatgcggcgctccgggaacaaggaggagaacaagcgcatcctcatggacctggatgtggtgctgaagagccacgactgcccctacatcgtgcagtgctttgggacgttcatcaccaacacggacgtcttcatcgccatggagctcatgggcacctgcgctgagaagctcaagaagcggatgcagggccccatccccgagcgcattctgggcaagatgacagtggcgattgtgaaggcgctgtactacctgaaggagaagcacggtgtcatccaccgcgacgtcaagccctccaacatcctgctggacgagcggggccagatcaagctctgcgacttcggcatcagcggccgcctggtggactccaaagccaagacgcggagcgccggctgtgccgcctacatggcacccgagcgcattgaccccccagaccccaccaagccggactatgacatccgggccgacgtatggagcctgggcatctcgttggtggagctggcaacaggacagtttccctacaagaactgcaagacggactttgaggtcctcaccaaagtcctacaggaagagcccccgcttctgcccggacacatgggcttctcgggggacttccagtccttcgtcaaagactgccttactaaagatcacaggaagagaccaaagtataataagctacttgaacacagcttcatcaagcgctacgagacgctggaggtggacgtggcgtcctggttcaaggatgtcatggcgaagactgagtcaccgcggactagcggcgtcctgagccagccccacctgcccttcttcaggtagctgcttggcggcggccagccccacagggggccaggggcatggccacaggcccccctccccacttggccacccagctgcctgccaggggagacctgggacctggacggccacctaggactgaggacagagagtggggggtgcccacccaccccccccgccccgggcctaccaagcccccgcccttcccaccccggggtcagccggccgtgtgcgtcccccgacagacactgtgaacggaagacagcaggccgcgatcagagtcgctgttcattcagccgcagcctctgggccggggcggcccccaggggccaggagagagccctggagtcccgcagccaccatgcacgctcccagcgtgctgtgtccttcgccactcccacgcgcccgttcctcttccgtcgccctctgtcccctgctctacctctctgtccttgtctggctctcccgtcaccctccctgcctctgtctctcttctggcctgagcctgggcccagccacctcctgacgggtcccctgggtctgcataggtctcccatggcgcaatgagtcagtggcccccagccaggcagtgtgggcattgccactgcggctggacggggctgcgcgctcgcgctctctctctctctctctctctctctttgatctcagggggtcctttttggagtttattgtattttattgtacttggtggggtgtttggggtgggggcggaggagagcttgttctcgtggggttgtcggtaccttcagaaacttttaccaaagtcacgattagctgcttgtggtggggccccaaccgccctcgggcactggggagctgggctggggctgctgctctggggtctccgggggccacagcttggggtgagttgaagacctcaggggatgtggaggggtctgcggggccctggccgcacaggatggccttcagggaaggtggtcttggggcatggtgcagagcaggtgaccggagggaatcggtgacggagcggggccaagggaggggtccggagggagtcagggatggagggcagagggagtggatgtgggggtttgaggacgtgtgacaagctccagcaggggtgggggccgggctgagggtgggggtgcgaggtggtcactcccatcgtgcccctggccgtccctccactcacccacacctggcccagtccacgttgaggtccaggactgggaaggaccgggtgagtgcaccggggacccaggccaggtgccccccggagcctgctggggtggccagagcaggagggggtgtgtttcctttttgtgggtgttgcatgcaaatcaagtggacaagaaaaaataacaaaacaaaaaacaagaaaaaaaaaacacaaaaccccgtaaaatcacaaagaaaatccaacaccaaaggcgcagaagccggctggccgtggtgggggcagcgtaggcgtagcatccctctcctctcacttagcctgttgactcttgttattatcatgatattcacaaaacgccgcatgtttaaaaagtcatagatgtcatcttctctctgcccccagggaggaaagccaccttctcttgccccttggcccctttgtcaggggccaggggtctgccgggtgggggtgccaacaggcctggccctttcctcccctgcatccagccatgggggcctctgcgattgccggaaggttgcatggctggtcccagggccagcacaggcccgaggccgggctgcctggttttatttttatttaactttattttctgttttatgagtgtgtgtccgcccacccccacccccttcagtgttaagtggggagccctgggggagtctctcctgcctcccagcctctcccaagacctcccccctcgtcaccagccatccctctggaccaggcagagggcggaccgggtgggcaggggcctgagggtggctcgggccagcccaccagccaatggacccctcctcaggccgccagtgtcgccctgcccctttttaaaacaaaatgccctcgtttgtaaacccttagacgcttgagaataa

SEQ ID NO: 154961 - DNA, 7011 bp, Homo sapiens
  Payload ID: 10465
  Gene Symbol: MAP3K1
  Gene Name: mitogen-activated protein kinase kinase kinase 1, E3 ubiquitin protein ligase
  Uniprot ID: Q13233
  ENST ID: ENST00000399503
  CDS Start-End: 1-4539
atggcggcggcggcggggaatcgcgcctcgtcgtcgggattcccgggcgccagggctacgagccctgaggcaggcggcggcggaggagccctcaaggcgagcagcgcgcccgcggctgccgcgggactgctgcgggaggcgggcagcgggggccgcgagcgggcggactggcggcggcggcagctgcgcaaagtgcggagtgtggagctggaccagctgcctgagcagccgctcttccttgccgcctcaccgccggcctcctcgacttccccgtcgccggagcccgcggacgcagcggggagtgggaccggcttccagcctgtggcggtgccgccgccccacggagccgcgagccgcggcggcgcccaccttaccgagtcggtggcggcgccggacagcggcgcctcgagtcccgcagcggccgagcccggggagaagcgggcgcccgccgccgagccgtctcctgcagcggcccccgccggtcgtgagatggagaataaagaaactctcaaagggttgcacaagatggatgatcgtccagaggaacgaatgatcagggagaaactgaaggcaacctgtatgccagcctggaagcacgaatggttggaaaggagaaataggcgagggcctgtggtggtaaaaccaatcccagttaaaggagatggatctgaaatgaatcacttagcagctgagtctccaggagaggtccaggcaagtgcggcttcaccagcttccaaaggccgacgcagtccttctcctggcaactccccatcaggtcgcacagtgaaatcagaatctccaggagtaaggagaaaaagagtttccccagtgccttttcagagtggcagaatcacaccaccccgaagagccccttcaccagatggcttctcaccatatagccctgaggaaacaaaccgccgtgttaacaaagtgatgcgggccagactgtacttactgcagcagatagggcctaactctttcctgattggaggagacagcccagacaataaataccgggtgtttattgggcctcagaactgcagctgtgcacgtggaacattctgtattcatctgctatttgtgatgctccgggtgtttcaactagaaccttcagacccaatgttatggagaaaaactttaaagaattttgaggttgagagtttgttccagaaatatcacagtaggcgtagctcaaggatcaaagctccatctcgtaacaccatccagaagtttgtttcacgcatgtcaaattctcatacattgtcatcatctagtacttctacgtctagttcagaaaacagcataaaggatgaagaggaacagatgtgtcctatttgcttgttgggcatgcttgatgaagaaagtcttacagtgtgtgaagacggctgcaggaacaagctgcaccaccactgcatgtcaatttgggcagaagagtgtagaagaaatagagaacctttaatatgtcccctttgtagatctaagtggagatctcatgatttctacagccacgagttgtcaagtcctgtggattccccttcttccctcagagctgcacagcagcaaaccgtacagcagcagcctttggctggatcacgaaggaatcaagagagcaattttaaccttactcattatggaactcagcaaatccctcctgcttacaaagatttagctgagccatggattcaggtgtttggaatggaactcgttggctgcttattttctagaaactggaatgtgagagagatggccctcaggcgtctttcccatgatgtcagtggggccctgctgttggcaaatggggagagcactggaaattctgggggcagcagtggaagcagcccgagtgggggagccaccagtgggtcttcccagaccagtatctcaggagatgtggtggaggcatgctgcagcgttctgtcaatggtctgtgctgaccctgtctacaaagtgtacgttgctgctttaaaaacattgagagccatgctggtatatactccttgccacagtttagcggaaagaatcaaacttcagagacttctccagccagttgtagacaccatcctagtcaaatgtgcagatgccaatagccgcacaagtcagctgtccatatcaacactgttggaactgtgcaaaggccaagcaggagagttggcagttggcagagaaatactaaaagctggatccattggtattggtggtgttgattatgtcttaaattgtattcttggaaaccaaactgaatcaaacaattggcaagaacttcttggccgcctttgtcttatagatagactgttgttggaatttcctgctgaattttatcctcatattgtcagtactgatgtttcacaagctgagcctgttgaaatcaggtataagaagctgctgtccctcttaacctttgctttgcagtccattgataattcccactcaatggttggcaaactttccagaaggatctacttgagttctgcaagaatggttactacagtaccccatgtgttttcaaaactgttagaaatgctgagtgtttccagttccactcacttcaccaggatgcgtcgccgtttgatggctattgcagatgaggtggaaattgccgaagccatccagttgggcgtagaagacactttggatggtcaacaggacagcttcttgcaggcatctgttcccaacaactatctggaaaccacagagaacagttcccctgagtgcacagtccatttagagaaaactggaaaaggattatgtgctacaaaattgagtgccagttcagaggacatttctgagagactggccagcatttcagtaggaccttctagttcaacaacaacaacaacaacaacaacagagcaaccaaagccaatggttcaaacaaaaggcagaccccacagtcagtgtttgaactcctctcctttatctcatcattcccaattaatgtttccagccttgtcaaccccttcttcttctaccccatctgtaccagctggcactgcaacagatgtctctaagcatagacttcagggattcattccctgcagaataccttctgcatctcctcaaacacagcgcaagttttctctacaattccacagaaactgtcctgaaaacaaagactcagataaactttccccagtctttactcagtcaagacccttgccctccagtaacatacacaggccaaagccatctagacctaccccaggtaatacaagtaaacagggagatccctcaaaaaatagcatgacacttgatctgaacagtagttccaaatgtgatgacagctttggctgtagcagcaatagtagtaatgctgttatacccagtgacgagacagtgttcaccccagtagaggagaaatgcagattagatgtcaatacagagctcaactccagtattgaggaccttcttgaagcatctatgccttcaagtgatacaacagtaacttttaagtcagaagttgctgtcctgtctcctgaaaaggctgaaaatgatgatacctacaaagatgatgtgaatcataatcaaaagtgcaaagagaagatggaagctgaagaagaagaagctttagcaattgccatggcaatgtcagcgtctcaggatgccctccccatagttcctcagctgcaggttgaaaatggagaagatatcatcattattcaacaggatacaccagagactctaccaggacataccaaagcaaaacaaccgtatagagaagacactgaatggctgaaaggtcaacagataggccttggagcattttcttcttgttatcaggctcaagatgtgggaactggaactttaatggctgttaaacaggtgacttatgtcagaaacacatcttctgagcaagaagaagtagtagaagcactaagagaagagataagaatgatgagccatctgaatcatccaaacatcattaggatgttgggagccacgtgtgagaagagcaattacaatctcttcattgaatggatggcagggggatcggtggctcatttgctgagtaaatatggagccttcaaagaatcagtagttattaactacactgaacagttactccgtggcctttcgtatctccatgaaaaccaaatcattcacagagatgtcaaaggtgccaatttgctaattgacagcactggtcagagactaagaattgcagattttggagctgcagccaggttggcatcaaaaggaactggtgcaggagagtttcagggacaattactggggacaattgcatttatggcacctgaggtactaagaggtcaacagtatggaaggagctgtgatgtatggagtgttggctgtgctattatagaaatggcttgtgcaaaaccaccatggaatgcagaaaaacactccaatcatcttgctttgatatttaagattgctagtgcaactactgctccatcgatcccttcacatttgtctcctggtttacgagatgtggctcttcgttgtttagaacttcaacctcaggacagacctccatcaagagagctactgaagcatccagtctttcgtactacatggtagccaattatgcagatcaactacagtagaaacaggatgctcaacaagagaaaaaaaacttgtggggaaccacattgatattctactggccatgatgccactgaacagctatgaacgaggccagtggggaacccttacctaagtatgtgattgacaaatcatgatctgtacctaagctcagtatgcaaaagcccaaactagtgcagaaactgtaaactgtgcctttcaaagaactggccctaggtgaacaggaaaacaatgaagtttgcatgactaaattgcagaagcataattttatttttttggagcactttttcagcaatattagcggctgaggggctcaggatctattttaatatttcaattattcttccatttcatatagtgatcacaagcagggggttctgcaattccgttcaaattttttgtcactggctataaaatcagtatctgcctcttttaggtcagagtatgctatgagtagcaatacatacatatatttttaaaagttgatacttctttatgacccacagttgacctttattttcttaaataccagggcagttgtggctcattgtgcattttactgttggcccattcatttcgtttttggaaattatggttttgtattttcatgtttatttacattcatttttgtttattcagggaaagctgatctttttttcaaaccagaaaaaaaaaatgaactagatatgaagtagagttcattaaatatcttgctattgtcagagtttttaaaatatagacttaattttgtttttttaaattggaatacaataaagtactacctacatttgagtcagtcaccactcttattgtgcaggttaagtacaagttaactaaaaataaactgtcctctctggtgcaactcacaaccaagatcaagattaccttaaaatttatttgaattttttagatgttttggttgtcaaactgtaggaaacttcacaacatttaagtcttactctgtatgtaacaatccatcattcaccttcactactggtagtaacatagagctgccattttccttttaccatgcatcatctctttacagtaggcctggcagatcattttttaaaaagattattcaactaccaatcagtaatgtttttaaacagtacatttgctttgaacttggaaaatgtgttcagaaagaaaaatggaattgaatttcatttatacactaattccttggattttgcacagttacctaacggttttagtctggagttaaattcagatgcatggaatcctgaaggaaaatggtagctttttaatctttttgtgtgtgtgtgagtcttttaaatcaagtactgattaactattaagtacaactttgagattttagttttaactcttcagaagccagtgtgaaatagaattggttattctcaaagactcaggataaactaaataagctatatatagagtacatttaaaatgtacaacacaaattggaaataaaataagttacaagataagtttacagggatatattgcttacaatttttaaaaggcagtttgttttttatgtgaatatgtttcttagtgaaattttacattcctttgttttggaagattggcgatatttgaagagttaaaaatagtacagaaatgtgaagtttggtatctctaaatgtgttgtacttgactttcttttttattttgtttttttttttttttgactacttagaattttcacaattctaataagattgtttccaagtctctcatgtgcaagctttaaaggatgcactcttgccattttatgtactggaagatcattggtcagatgaatactgtgtctgacaaaaatgtaaactgtataaactgaggaacctcagctaatcagtattactttgtagatcaccatgcccaccacatttcaaactcaaactatctgtagatttcaaaatccattgtgtttgagtttgtttgcagttccctcagcttgctggtaattgtggtgttttgttttttgttttgttttcaatgcaaatgtgatgtaatattcttattttctttggatcaaagctggactggaaattgtatcgtgtaattatttttgtgttcttaatgttatttggtactcaagttgtaaataacgtctactactgtttattccagtttctactacctcaggtgtcctatagatttttcttctaccaaagttcactttcacaatgaaattatatttgctgtgtgactatgattcctaagatttccagggcttaagggctaacttctattagcaccttactgtgtaagcaaatgttacaaaaaaaaaaaaaaaaaatctctgggttaagaaaatttggcttaaatgtatcctttgttattttaaatatattgagatattttaattaaaatttttaccccattgaaccgattttatagtatttgtacctattttggtgtttttgtctttatagtaaataaaagtttttgaacaaa

SEQ ID NO: 154962 - DNA, 3436 bp, Homo sapiens
  Payload ID: 10466
  Gene Symbol: MAP3K10
  Gene Name: mitogen-activated protein kinase kinase kinase 10
  Uniprot ID: Q02779
  ENST ID: ENST00000253055
  CDS Start-End: 289-3153
cgcgcggccaggccctcttagccctctgccgtttggggggcacgggtgaacctgccgccccactcccaccccgccccgccccgcccgtacagccaaatcggaagggacgagcctgccctttgaaagggttttttttcttgctcctgcggagggcgccccagccatggccctcaggagctccctagaccccgcagggactgccctccatcccggccgccggggcccgccctctgcatcccgcgggcagcctgtgtgaagcggcctcccgcagcccccggcccctcccccatggaggaggaggagggggcggtggccaaggagtggggcacgacccccgcggggcccgtctggaccgcggtgttcgactacgaggcggcgggcgacgaggagctgaccctgcggaggggcgatcgcgtccaggtgctttcccaagactgtgcggtgtccggcgacgagggctggtggaccgggcagctccccagcggccgcgtgggcgtcttccccagcaactacgtggcccccggcgcccccgctgcacccgcgggcctccagctgccccaggagatccccttccacgagctgcagctagaggagatcatcggtgtggggggctttggcaaggtctatcgggccctgtggcgtggcgaggaggtggcagtcaaggccgcccggctggaccctgagaaggacccggcagtgacagcggagcaggtgtgccaggaagcccggctctttggagccctgcagcaccccaacataattgcccttaggggcgcctgcctcaaccccccacacctctgcctagtgatggagtatgcccggggtggtgcactgagcagggtgctggcaggtcgccgggtgccacctcacgtgctggtcaactgggctgtgcaggtggcccggggcatgaactacctacacaatgatgcccctgtgcccatcatccaccgggacctcaagtccatcaacatcctgatcctggaggccatcgagaaccacaacctcgcagacacggtgctcaagatcacggacttcggcctcgcccgcgagtggcacaagaccaccaagatgagcgctgcggggacctacgcctggatggcgccggaggttatccgtctctccctcttctccaaaagcagtgatgtctggagcttcggggtgctgctgtgggagctgctgacgggggaggtcccctaccgtgagatcgacgccttggccgtggcgtatggcgtggctatgaataagctgacgctgcccattccctccacgtgccccgagccctttgcccgcctcctggaggaatgctgggacccagacccccacgggcggccagatttcggtagcatcttgaagcggcttgaagtcatcgaacagtcagccctgttccagatgccactggagtccttccactcgctgcaggaagactggaagctggagattcagcacatgtttgatgaccttcggaccaaggagaaggagcttcggagccgtgaggaggagctgctgcgggcggcacaggagcagcgcttccaggaggagcagctgcggcggcgggagcaggagctggcagaacgtgagatggacatcgtggaacgggagctgcacctgctcatgtgccagctgagccaggagaagccccgggtccgcaagcgcaagggcaacttcaagcgcagccgcctgctcaagctgcgggaaggcggcagccacatcagcctgccctctggctttgagcataagatcacagtccaggcctctccaactctggataagcggaaaggatccgatggggccagcccccctgcaagccccagcatcatcccccggctgagggccattcgcctgactcccgtggactgtggtggcagcagcagtggcagcagcagtggaggaagtgggacatggagccgcggtgggcccccaaagaaggaagaactggtcgggggcaagaagaagggacgaacgtgggggcccagctccaccctgcagaaggagcgggtgggaggagaggagaggctgaaggggctgggggaaggaagcaaacagtggtcatcaagtgcccccaacctgggcaagtcccccaaacacacacccatcgcccctggctttgccagcctcaatgagatggaggagttcgcggaggcagaggatggaggcagcagcgtgcccccttccccctactcgaccccgtcctacctctcagtgccactgcctgccgagccctccccgggggcgcgggcgccgtgggagccgacgccgtccgcgccccccgctcggtggggacacggcgcccggcggcgctgcgacctggcgctgctaggctgcgccacgctgctgggggctgtgggcctgggcgccgacgtggccgaggcgcgcgcggccgacggtgaggagcagcggcgctggctcgacggcctcttctttccccgcgccggccgcttcccgcggggcctcagcccacccgcgcgtccccacggccgccgcgaagacgtgggccccggcctgggcctggcgccctcggccaccctcgtgtcgctgtcgtccgtgtccgactgcaactccacgcgttcactgctgcgctctgacagtgacgaggccgcaccggccgcgccctccccaccaccctccccgcccgcgcccacacccacgccctcgcccagcaccaaccccctggtggacctggagctggagagcttcaagaaggacccccgccagtcgctcacgcccacccacgtcacggctgcatgcgctgtgagccgcgggcaccggcggacgccatcggacggggcgctggggcagcgggggccgcccgagcccgcgggccatggccctggccctcgtgaccttctggacttcccccgcctgcccgacccccaggccctgttcccagcccgccgccggccccctgagttcccaggccgccccaccaccctgacctttgccccgagacctcggccggctgccagtcgcccccgcttggacccctggaaactggtctccttcggccggacactcaccatctcgcctcccagcaggccagacactccggagagccctgggccccccagcgtgcagcccacactgctggacatggacatggaggggcagaaccaagacagcacagtgcccctgtgcggggcccacggctcccactaaggcctgcccaccaccgcccgcctgggcagccatgaatgtagcgccccaggccctgccccagcccgccatgccacaaggtgggggaggccctgggcaggatgttcactctatttattggggaaggagggaggggggggacacttaacttattcctttgtaccccagggggtggagccctgtgcccaccctgcactggggggagggtgggcagggatactcagggacagggcatcatgggggatttggcacaaaatggagcattaaaggtaacccctgcccccta

SEQ ID NO: 154963 - DNA, 682 bp, Homo sapiens
  Payload ID: 10466
  Gene Symbol: MAP3K10
  Gene Name: mitogen-activated protein kinase kinase kinase 10
  ENST ID: ENST00000594951
  CDS Start-End: 1-202
gaaccacaacctcgcagacacggtgctcaagatcacggacttcggcctcgcccgcgagtggcacaagaccaccaagatgagcgctgcggggacctacgcctggatggcgccggaggttatccgtctctccctcttctccaaaagcagtgatgtctggagaatgctgggacccagacccccacgggcggccagatttcggtagcatcttgaagcggcttgaagtcatcgaacagtcagccctgttccagatgccactggagtccttccactcgctgcaggaagactggaagctggagattcagcacatgtttgatgaccttcggaccaaggagaaggagcttcggagccgtgaggaggagctgctgcgggcggcacaggagcagcgcttccaggaggagcagctgcggcggcgggagcaggagctggcagaacgtgagatggacatcgtggaacgggagctgcacctgctcatgtgccagctgagccaggagaagccccgggtccgcaagcgcaagggcaacttcaagcgcagccgcctgctcaagctgcgggaaggcggcagccacatcagcctgccctctggctttgagcataagatcacagtccaggcctctccaactctggataagcggaaaggatccgatggggccagcccccctgcaagccccagcatcatcccccg

SEQ ID NO: 154964 - DNA, 2104 bp, Homo sapiens
  Payload ID: 10466
  Gene Symbol: MAP3K10
  Gene Name: mitogen-activated protein kinase kinase kinase 10
  ENST ID: ENST00000597986
  CDS Start-End: 1-543
ctcgcccgcgagtggcacaagaccaccaagatgagcgctgcggggacctacgcctggatggcgccggaggttatccgtctctccctcttctccaaaagcagtgatgtctggagcttcggggtgctgctgtgggagctgctgacgggggaggtcccctaccgtgagatcgacgccttggccgtggcgtatggcgtggctatgaataagctgacgctgcccattccctccacgtgccccgagccctttgcccgcctcctggaggaatgctgggacccagacccccacgggcggccagatttcggtagcatcttgaagcggcttgaagtcatcgaacagtcagccctgttccagatgccactggagtccttccactcgctgcaggaagactggaagctggagattcagcacatgtttgatgaccttcggaccaaggagaaggctttgagcataagatcacagtccaggcctctccaactctggataagcggaaaggatccgatggggccagcccccctgcaagccccagcatcatcccccggctgagggccattcgcctgactcccgtggactgtggtggcagcagcagtggcagcagcagtggaggaagtgggacatggagccgcggtgggcccccaaagaaggaagaactggtcgggggcaagaagaagggacgaacgtgggggcccagctccaccctgcagaaggagcgggtgggaggagaggagaggctgaaggggctgggggaaggaagcaaacagtggtcatcaagtgcccccaacctgggcaagtcccccaaacacacacccatcgcccctggctttgccagcctcaatgagatggaggagttcgcggaggcagaggatggaggcagcagcgtgcccccttccccctactcgaccccgtcctacctctcagtgccactgcctgccgagccctccccgggggcgcgggcgccgtgggagccgacgccgtccgcgccccccgctcggtggggacacggcgcccggcggcgctgcgacctggcgctgctaggctgcgccacgctgctgggggctgtgggcctgggcgccgacgtggccgaggcgcgcgcggccgacggtgaggagcagcggcgctggctcgacggcctcttctttccccgcgccggccgcttcccgcggggcctcagcccacccgcgcgtccccacggccgccgcgaagacgtgggccccggcctgggcctggcgccctcggccaccctcgtgtcgctgtcgtccgtgtccgactgcaactccacgcgttcactgctgcgctctgacagtgacgaggccgcaccggccgcgccctccccaccaccctccccgcccgcgcccacacccacgccctcgcccagcaccaaccccctggtggacctggagctggagagcttcaagaaggacccccgccagtcgctcacgcccacccacgtcacggctgcatgcgctgtgagccgcgggcaccggcggacgccatcggacggggcgctggggcagcgggggccgcccgagcccgcgggccatggccctggccctcgtgaccttctggacttcccccgcctgcccgacccccaggccctgttcccagcccgccgccggccccctgagttcccaggccgccccaccaccctgacctttgccccgagacctcggccggctgccagtcgcccccgcttggacccctggaaactggtctccttcggccggacactcaccatctcgcctcccagcaggccagacactccggagagccctgggccccccagcgtgcagcccacactgctggacatggacatggaggggcagaaccaagacagcacagtgcccctgtgcggggcccacggctcccactaaggcctgcccaccaccgcccgcctgggcagccatgaatgtagcgccccaggccctgccccagcccgccatgccacaaggtgggggaggccctgggcaggatgttcactctatttattggggaaggagggaggggggggacacttaacttattcctttgtaccccagggggtggagccctgtgcccaccctgcactggggggagggtgggcagggatactcagggacagggcatcatg

SEQ ID NO: 154965 - DNA, 739 bp, Homo sapiens
  Payload ID: 10466
  Gene Symbol: MAP3K10
  Gene Name: mitogen-activated protein kinase kinase kinase 10
  ENST ID: ENST00000593502
  CDS Start-End: 1-369
caagatcacggacttcggcctcgcccgcgagtggcacaagaccaccaagatgagcgctgcggggacctacgcctggatggcgccggagaatgctgggacccagacccccacgggcggccagatttcggtagcatcttgaagcggcttgaagtcatcgaacagtcagccctgttccagatgccactggagtccttccactcgctgcaggaagactggaagctggagattcagcacatgtttgatgaccttcggaccaaggagaaggctttgagcataagatcacagtccaggcctctccaactctggataagcggaaaggatccgatggggccagcccccctgcaagccccagcatcatcccccggctgagggccattcgcctgactcccgtggactgtggtggcagcagcagtggcagcagcagtggaggaagtgggacatggagccgcggtgggcccccaaagaaggaagaactggtcgggggcaagaagaagggacgaacgtgggggcccagctccaccctgcagaaggagcgggtgggaggagaggagaggctgaaggggctgggggaaggaagcaaacagtggtcatcaagtgcccccaacctgggcaagtcccccaaacacacacccatcgcccctggctttgccagcctcaatgagatgggtaagagcctgggttcttgtaagggggtgggggttccctggccaaaggggtgagcctcctggggctgagcgaa

SEQ ID NO: 154966 - DNA, 3566 bp, Homo sapiens
  Payload ID: 10467
  Gene Symbol: MAP3K11
  Gene Name: mitogen-activated protein kinase kinase kinase 11
  Uniprot ID: Q16584
  ENST ID: ENST00000309100
  CDS Start-End: 487-3030
gaggaggaagaagggagcggggtcggagccgtcggggccaaaggagacggggccaggaacaggcagtctcggcccaactgcggacgctccctccaccccctgcgcaaaaagacccaaccggagttgaggcgctgcccctgaaggccccaccttacacttggcgggggccggagccaggctcccaggactgctccagaaccgagggaagctcgggtccctccaagctagccatggtgaggcgccggaggccccggggccccacccccccggcctgaccacactgccctgggtgccctcctccagaagcccgagatgcggggggccgggagacaacactcctggctccccagagaggcgtgggtctggggctgagggccagggcccggatgcccaggttccgggactagggccttggcagccagcgggggtggggaccacgggcacccagagaaggtcctccacacatcccagcgccggctcccggccatggagcccttgaagagcctcttcctcaagagccctctagggtcatggaatggcagtggcagcgggggtggtgggggcggtggaggaggccggcctgaggggtctccaaaggcagcgggttatgccaacccggtgtggacagccctgttcgactacgagcccagtgggcaggatgagctggccctgaggaagggtgaccgtgtggaggtgctgtcccgggacgcagccatctcaggagacgagggctggtgggcgggccaggtgggtggccaggtgggcatcttcccgtccaactatgtgtctcggggtggcggcccgcccccctgcgaggtggccagcttccaggagctgcggctggaggaggtgatcggcattggaggctttggcaaggtgtacaggggcagctggcgaggtgagctggtggctgtgaaggcagctcgccaggaccccgatgaggacatcagtgtgacagccgagagcgttcgccaggaggcccggctcttcgccatgctggcacaccccaacatcattgccctcaaggctgtgtgcctggaggagcccaacctgtgcctggtgatggagtatgcagccggtgggcccctcagccgagctctggccgggcggcgcgtgcctccccatgtgctggtcaactgggctgtgcagattgcccgtgggatgcactacctgcactgcgaggccctggtgcccgtcatccaccgtgatctcaagtccaacaacattttgctgctgcagcccattgagagtgacgacatggagcacaagaccctgaagatcaccgactttggcctggcccgagagtggcacaaaaccacacaaatgagtgccgcgggcacctacgcctggatggctcctgaggttatcaaggcctccaccttctctaagggcagtgacgtctggagttttggggtgctgctgtgggaactgctgaccggggaggtgccataccgtggcattgactgccttgctgtggcctatggcgtagctgttaacaagctcacactgcccatcccatccacctgccccgagcccttcgcacagcttatggccgactgctgggcgcaggacccccaccgcaggcccgacttcgcctccatcctgcagcagttggaggcgctggaggcacaggtcctacgggaaatgccgcgggactccttccattccatgcaggaaggctggaagcgcgagatccagggtctcttcgacgagctgcgagccaaggaaaaggaactactgagccgcgaggaggagctgacgcgagcggcgcgcgagcagcggtcacaggcggagcagctgcggcggcgcgagcacctgctggcccagtgggagctagaggtgttcgagcgcgagctgacgctgctgctgcagcaggtggaccgcgagcgaccgcacgtgcgccgccgccgcgggacattcaagcgcagcaagctccgggcgcgcgacggcggcgagcgtatcagcatgccactcgacttcaagcaccgcatcaccgtgcaggcctcacccggccttgaccggaggagaaacgtcttcgaggtcgggcctggggattcgcccacctttccccggttccgagccatccagttggagcctgcagagccaggccaggcatggggccgccagtccccccgacgtctggaggactcaagcaatggagagcggcgagcatgctgggcttggggtcccagttcccccaagcctggggaagcccagaatgggaggagaaggtcccgcatggacgaagccacatggtacctggattcagatgactcatcccccttaggatctccttccacacccccagcactcaatggtaaccccccgcggcctagcctggagcccgaggagcccaagaggcctgtccccgcagagcgcggtagcagctctgggacgcccaagctgatccagcgggcgctgctgcgcggcaccgccctgctcgcctcgctgggccttggccgcgacctgcagccgccgggaggcccaggacgcgagcgcggggagtccccgacaacaccccccacgccaacgcccgcgccctgcccgaccgagccgcccccttccccgctcatctgcttctcgctcaagacgcccgactccccgcccactcctgcacccctgttgctggacctgggtatccctgtgggccagcggtcagccaagagcccccgacgtgaggaggagccccgcggaggcactgtctcacccccaccggggacatcacgctctgctcctggcaccccaggcaccccacgttcaccacccctgggcctcatcagccgacctcggccctcgccccttcgcagccgcattgatccctggagctttgtgtcagctgggccacggccttctcccctgccatcaccacagcctgcaccccgccgagcaccctggaccttgttcccggactcagaccccttctgggactccccacctgccaaccccttccaggggggcccccaggactgcagggcacagaccaaagacatgggtgcccaggccccgtgggtgccggaagcggggccttgagtgggccaggccactcccccgagctccagctgccttaggaggagtcacagcatacactggaacaggagctgggtcagcctctgcagctgcctcagtttccccagggaccccacccccctttgggggtcaggaacactacactgcacaggaagccttcacactggaagggggacctgcgcccccacatctgaaacctgtaggtccccccagctcacctgccctactggggcccaacactgtacccagctggttgggaggaccagagcctgtctcagggaattgcctgctggggtgatgcagggaggaggggaggtgcagggaagaggggccggcctcagctgtcaccagcacttttgaccaagtcctgctactgcggcccctgccctagggcttagagcatggacctcctgccctgggggtcatctggggccagggctctctggatgccttcctgctgccccagccagggttggagtcttagcctcgggatccagtgaagccagaagccaaataaactcaaaagctgtctccccaca

SEQ ID NO: 154967 - DNA, 2139 bp, Homo sapiens
  Payload ID: 10467
  Gene Symbol: MAP3K11
  Gene Name: mitogen-activated protein kinase kinase kinase 11
  ENST ID: ENST00000524848
  CDS Start-End: 1-648
gacgacatggagcacaagaccctgaagatcaccgactttggcctggcccgagagtggcacaaaaccacacaaatgagtgccgcgggcacctacgcctggatggctcctgaggttatcaaggcctccaccttctctaagggcagtgacgtctggagttttggggtgctgctgtgggaactgctgaccggggaggtgccataccgtggcattgactgccttgctgtggcctatggcgtagctgttaacaagctcacactgcccatcccatccacctgccccgagcccttcgcacagcttatggccggaaggctggaagcgcgagatccagggtctcttcgacgagctgcgagccaaggaaaaggaactactgagccgcgaggaggagctgacgcgagcggcgcgcgagcagcggtcacaggcggagcagctgcggcggcgcgagcacctgctggcccagtgggagctagaggtgttcgagcgcgagctgacgctgctgctgcagcaggtggaccgcgagcgaccgcacgtgcgccgccgccgcgggacattcaagcgcagcaagctccgggcgcgcgacggcggcgagcgtatcagcatgccactcgacttcaagcaccgcatcaccgtgcaggcctcacccggccttgaccggaggagaaacgtcttcgaggtcgggcctggggattcgcccacctttccccggttccgagccatccagttggagcctgcagagccaggccaggcatggggccgccagtccccccgacgtctggaggactcaagcaatggagagcggcgagcatgctgggcttggggtcccagttcccccaagcctggggaagcccagaatgggaggagaaggtcccgcatggacgaagccacatggtacctggattcagatgactcatcccccttaggatctccttccacacccccagcactcaatggtaaccccccgcggcctagcctggagcccgaggagcccaagaggcctgtccccgcagagcgcggtagcagctctgggacgcccaagctgatccagcgggcgctgctgcgcggcaccgccctgctcgcctcgctgggccttggccgcgacctgcagccgccgggaggcccaggacgcgagcgcggggagtccccgacaacaccccccacgccaacgcccgcgccctgcccgaccgagccgcccccttccccgctcatctgcttctcgctcaagacgcccgactccccgcccactcctgcacccctgttgctggacctgggtatccctgtgggccagcggtcagccaagagcccccgacgtgaggaggagccccgcggcaccccacgttcaccacccctgggcctcatcagccgacctcggccctcgccccttcgcagccgcattgatccctggagctttgtgtcagctgggccacggccttctcccctgccatcaccacagcctgcaccccgccgagcaccctggaccttgttcccggactcagaccccttctgggactccccacctgccaaccccttccaggggggcccccaggactgcagggcacagaccaaagacatgggtgcccaggccccgtgggtgccggaagcggggccttgagtgggccaggccactcccccgagctccagctgccttaggaggagtcacagcatacactggaacaggagctgggtcagcctctgcagctgcctcagtttccccagggaccccacccccctttgggggtcaggaacactacactgcacaggaagccttcacactggaagggggacctgcgcccccacatctgaaacctgtaggtccccccagctcacctgccctactggggcccaacactgtacccagctggttgggaggaccagagcctgtctcagggaattgcctgctggggtgatgcagggaggaggggaggtgcagggaagaggggccggcctcagctgtcaccagcacttttgaccaagtcctgctactgcggcccctgccctagggcttagagcatggacctcctgccctgggggtcatctggggccagggctctctggatgccttcctgctgccccagccagggttggagtcttagcctcgggatccagtgaagccagaagccaaataaactcaaaagctgtctcccc

SEQ ID NO: 154968 - DNA, 1812 bp, Homo sapiens
  Payload ID: 10467
  Gene Symbol: MAP3K11
  Gene Name: mitogen-activated protein kinase kinase kinase 11
  ENST ID: ENST00000532507
  CDS Start-End: 486-1277
agtgggcggggccggccggcgccagggcatctccgactcagacgagtagctttccttatccagacccaggggctcaagaaagcagtgaggctggtcacagtctcacagccatcgtgccgctccctatgtggcctgggagctggccttgggcccctgcaggttggggtcctggctctacttcatcacaaacctgaaccctgctccccccaacccaaatcccagacttcaagcaccgcatcaccgtgcaggcctcacccggccttgaccggaggagaaacgtcttcgaggtcgggcctggggattcgcccacctttccccggttccgagccatccagttggagcctgcagagccaggccaggcatggggccgccagtccccccgacgtctggaggactcaagcaatggagagcggcgagcatgctgggcttggggtcccagttcccccaagcctggggaagcccagaatgggaggagaaggtcccgcatggacgaagccacatggtacctggattcagatgactcatcccccttaggatctccttccacacccccagcactcaatggtaaccccccgcggcctagcctggagcccgaggagcccaagaggcctgtccccgcagagcgcggtagcagctctgggacgcccaagctgatccagcgggcgctgctgcgcggcaccgccctgctcgcctcgctgggccttggccgcgacctgcagccgccgggaggcccaggacgcgagcgcggggagtccccgacaacaccccccacgccaacgcccgcgccctgcccgaccgagccgcccccttccccgctcatctgcttctcgctcaagacgcccgactccccgcccactcctgcacccctgttgctggacctgggtatccctgtgggccagcggtcagccaagagcccccgacgtgaggaggagccccgcggaggcactgtctcacccccaccggggacatcacgctctgctcctggcaccccaggcaccccacgttcaccacccctgggcctcatcagccgacctcggccctcgccccttcgcagccgcattgatccctggagctttgtgtcagctgggccacggccttctcccctgccatcaccacagcctgcaccccgccgagcaccctggaccttgttcccggactcagaccccttctgggactccccacctgccaaccccttccaggggggcccccaggactgcagggcacagaccaaagacatgggtgcccaggccccgtgggtgccggaagcggggccttgagtgggccaggccactcccccgagctccagctgccttaggaggagtcacagcatacactggaacaggagctgggtcagcctctgcagctgcctcagtttccccagggaccccacccccctttgggggtcaggaacactacactgcacaggaagccttcacactggaagggggacctgcgcccccacatctgaaacctgtaggtccccccagctcacctgccctactggggcccaacactgtacccagctggttgggaggaccagagcctgtctcagggaattgcctgctggggtgatgcagggaggaggggaggtgcagggaagaggggccggcctcagctgtcaccagcacttttgaccaagtcctgctactgcggcccctgccctagggcttagagcatggacctcctgccctgggggtcatctggggccagggctctctggatgccttcctgctgccccagccagggttggagtcttagcctcgggatccagtgaagccagaagccaaataaactcaaaagctgtctccccac

SEQ ID NO: 154969 - DNA, 2830 bp, Homo sapiens
  Payload ID: 10467
  Gene Symbol: MAP3K11
  Gene Name: mitogen-activated protein kinase kinase kinase 11
  Uniprot ID: Q16584
  ENST ID: ENST00000530153
  CDS Start-End: 523-2295
attctccaggcccacgagtcacaggactgaccagccagcccggcctgggcctgacctcccccagttctccccaaaaggactccccctcccaagtgggagacctggcccaggcctcccagaaaggagaagtagggaccacgggaggaaagcggaagaggtgtgagctgcccaggccactcccaagccccacagaggccagcccagggagggagctggtggccaggtccctatcagaggccagggagccctaaaggggcactgagagcttcccccagtttcggggtctctggcccattctcctctgggtgacccctgacctcccatgcctgggatctacatcagacaccagaacagcagttcgagttgggacagttgaaagcacagagaggagcttggagagaaagcagaggatggggcttagcagctggcagagccaggagcggggaggtagcagaaagaccacaagtacaaagaagtcctgaaactttggttttgctgctgcagcccattgagagtgacgacatggagcacaagaccctgaagatcaccgactttggcctggcccgagagtggcacaaaaccacacaaatgagtgccgcgggcacctacgcctggatggctcctgaggttatcaaggcctccaccttctctaagggcagtgacgtctggagttttggggtgctgctgtgggaactgctgaccggggaggtgccataccgtggcattgactgccttgctgtggcctatggcgtagctgttaacaagctcacactgcccatcccatccacctgccccgagcccttcgcacagcttatggccgactgctgggcgcaggacccccaccgcaggcccgacttcgcctccatcctgcagcagttggaggcgctggaggcacaggtcctacgggaaatgccgcgggactccttccattccatgcaggaaggctggaagcgcgagatccagggtctcttcgacgagctgcgagccaaggaaaaggaactactgagccgcgaggaggagctgacgcgagcggcgcgcgagcagcggtcacaggcggagcagctgcggcggcgcgagcacctgctggcccagtgggagctagaggtgttcgagcgcgagctgacgctgctgctgcagcaggtggaccgcgagcgaccgcacgtgcgccgccgccgcgggacattcaagcgcagcaagctccgggcgcgcgacggcggcgagcgtatcagcatgccactcgacttcaagcaccgcatcaccgtgcaggcctcacccggccttgaccggaggagaaacgtcttcgaggtcgggcctggggattcgcccacctttccccggttccgagccatccagttggagcctgcagagccaggccaggcatggggccgccagtccccccgacgtctggaggactcaagcaatggagagcggcgagcatgctgggcttggggtcccagttcccccaagcctggggaagcccagaatgggaggagaaggtcccgcatggacgaagccacatggtacctggattcagatgactcatcccccttaggatctccttccacacccccagcactcaatggtaaccccccgcggcctagcctggagcccgaggagcccaagaggcctgtccccgcagagcgcggtagcagctctgggacgcccaagctgatccagcgggcgctgctgcgcggcaccgccctgctcgcctcgctgggccttggccgcgacctgcagccgccgggaggcccaggacgcgagcgcggggagtccccgacaacaccccccacgccaacgcccgcgccctgcccgaccgagccgcccccttccccgctcatctgcttctcgctcaagacgcccgactccccgcccactcctgcacccctgttgctggacctgggtatccctgtgggccagcggtcagccaagagcccccgacgtgaggaggagccccgcggaggcactgtctcacccccaccggggacatcacgctctgctcctggcaccccaggcaccccacgttcaccacccctgggcctcatcagccgacctcggccctcgccccttcgcagccgcattgatccctggagctttgtgtcagctgggccacggccttctcccctgccatcaccacagcctgcaccccgccgagcaccctggaccttgttcccggactcagaccccttctgggactccccacctgccaaccccttccaggggggcccccaggactgcagggcacagaccaaagacatgggtgcccaggccccgtgggtgccggaagcggggccttgagtgggccaggccactcccccgagctccagctgccttaggaggagtcacagcatacactggaacaggagctgggtcagcctctgcagctgcctcagtttccccagggaccccacccccctttgggggtcaggaacactacactgcacaggaagccttcacactggaagggggacctgcgcccccacatctgaaacctgtaggtccccccagctcacctgccctactggggcccaacactgtacccagctggttgggaggaccagagcctgtctcagggaattgcctgctggggtgatgcagggaggaggggaggtgcagggaagaggggccggcctcagctgtcaccagcacttttgaccaagtcctgctactgcggcccctgccctagggcttagagcatggacctcctgccctgggggtcatctggggccagggctctctggatgccttcctgctgccccagccagggttggagtcttagcctcgggatccagtgaagccagaagccaaataaactcaaaagctgtctccccac

SEQ ID NO: 154970 - DNA, 561 bp, Homo sapiens
  Payload ID: 10467
  Gene Symbol: MAP3K11
  Gene Name: mitogen-activated protein kinase kinase kinase 11
  ENST ID: ENST00000529839
  CDS Start-End: 272-561
caaagggaggaggaagaagggagcggggtcggagccgtcggggccaaaggagacggggccaggaacaggcagtctcggcccaactgcggacgctccctccaccccctgcgcaaaaagacccaaccggagttgaggcgctgcccctgaaggccccaccttacacttggcgggggccggagccaggctcccaggactgctccagaaccgagggaagctcgggtccctccaagctagccatgttttgctgctgcagcccattgagagtgacgacatggagcacaagaccctgaagatcaccgactttggcctggcccgagagtggcacaaaaccacacaaatgagtgccgcgggcacctacgcctggatggctcctgaggttatcaaggcctccaccttctctaagggcagtgacgtctggagttttggggtgctgctgtgggaactgctgaccggggaggtgccataccgtggcattgactgccttgctgtggcctatggcgtagctgttaacaagctcacactgcccatcccatccacctgccccgagcccttcgcacagct

SEQ ID NO: 154971 - DNA, 571 bp, Homo sapiens
  Payload ID: 10467
  Gene Symbol: MAP3K11
  Gene Name: mitogen-activated protein kinase kinase kinase 11
  ENST ID: ENST00000526293
  CDS Start-End: 238-571
acaaagggaggaggaagaagggagcggggtcggagccgtcggggccaaaggagacggggccaggaacaggcagtctcggcccaactgcggacgctccctccaccccctgcgcaaaaagacccaaccggagttgaggcgctgcccctgaaggccccaccttacacttggcgggggccggagccaggctcccaggactgctccagaaccgagggaagctcgggtccctccaagctagccatgcccattgagagtgacgacatggagcacaagaccctgaagatcaccgactttggcctggcccgagagtggcacaaaaccacacaaatgagtgccgcgggcacctacgcctggatggctcctgaggttatcaaggcctccaccttctctaagggcagtgacgtctggagttttggggtgctgctgtgggaactgctgaccggggaggtgccataccgtggcattgactgccttgctgtggcctatggcgtagctgttaacaagctcacactgcccatcccatccacctgccccgagcccttcgcacagcttatggccgactgctgggcgcagg

SEQ ID NO: 154972 - DNA, 4319 bp, Homo sapiens
  Payload ID: 10468
  Gene Symbol: MAP3K12
  Gene Name: mitogen-activated protein kinase kinase kinase 12
  Uniprot ID: Q12852
  ENST ID: ENST00000267079
  CDS Start-End: 227-2806
agaaagctgaagctgacacccgtgcatccggacaccgcacgagcatcgcctgtgacagcgccccgggtccggtggagggcagcggggggaggagggaaggaggaggagaaggaggaggaggcgggagcagcatccggagcggagctgcagcagcgccgccttttgtgctgcggccgcggagcccccgagggcccagtgttcaccatcataccaggggccagaggcgatggcttgcctccatgagacccgaacaccctctccttcctttgggggctttgtgtctaccctaagtgaggcatccatgcgcaagctggacccagacacttctgactgcactcccgagaaggacctgacgcctacccatgtcctgcagctacatgagcaggatgcagggggcccagggggagcagctgggtcacctgagagtcgggcatccagagttcgagctgacgaggtgcgactgcagtgccagagtggcagtggcttccttgagggcctctttggctgcctgcgccctgtctggaccatgattggcaaagcctactccactgagcacaagcagcagcaggaagacctttgggaggtcccctttgaggaaatcctggacctgcagtgggtgggctcaggggcccagggtgctgtcttcctggggcgcttccacggggaggaggtggctgtgaagaaggtgcgagacctcaaagaaaccgacatcaagcacttgcgaaagctgaagcaccccaacatcatcactttcaagggtgtgtgcacccaggctccctgctactgcatcctcatggagttctgcgcccagggccagctgtatgaggtactgcgggctggccgccctgtcaccccctccttactggttgactggtccatgggcatcgctggtggcatgaactacctgcacctgcacaagattatccacagggatctcaagtcacccaacatgctaatcacctacgacgatgtggtgaagatctcagattttggcacttccaaggagctgagtgacaagagcaccaagatgtcctttgcagggacagtagcctggatggcccctgaggtgatccgcaatgaacctgtgtctgagaaggtcgacatctggtcctttggcgtggtgctatgggaactgctgactggtgagatcccctacaaagacgtagattcctcagccattatctggggtgtgggaagcaacagtctccatctgcccgtgccctccagttgcccagatggtttcaagatcctgcttcgccagtgctggaatagcaaaccacgaaatcgcccatcattccgacagatcctgctgcatctggacattgcctcagctgatgtactctccacaccccaggagacttactttaagtcccaggcagagtggcgggaagaagtaaaactgcactttgaaaagattaagtcagaagggacctgtctgcaccgcctagaagaggaactggtgatgaggaggagggaggagctcagacacgccctggacatcagggagcactatgaaaggaagctggagagagccaacaacctgtatatggaacttaatgccctcatgttgcagctggaactcaaggagagggagctgctcaggcgagagcaagctttagagcggaggtgcccaggcctgctgaagccacacccttcccggggcctcctgcatggaaacacaatggagaagcttatcaagaagaggaatgtgccacagaagctgtcaccccatagcaaaaggccagatatcctcaagacggagtctttgctccctaaactagatgcagccctgagtggggtggggcttcctgggtgtcctaagggccccccctcaccaggacggagtcgccgtggcaagacccgtcaccgcaaggccagcgccaaggggagctgtggggacctgcctgggcttcgtacagctgtgccaccccatgaacctggaggaccaggaagcccagggggcctaggagggggaccctcagcctgggaggcctgccctcccgccctccgtgggcttcatcatgacctcctgctccgcaaaatgtcttcatcgtccccagacctgctgtcagcagcactagggtcccggggccggggggccacaggcggagctggggatcctggctcaccacctccggcccggggtgacaccccaccaagtgagggctcagcccctggctccaccagcccagattcacctgggggagccaaaggggaaccacctcctccagtagggcctggtgaaggtgtggggcttctgggaactggaagggaagggacctcaggccggggaggaagccgggctgggtcccagcacttgaccccagctgcactgctgtacagggctgccgtcacccgaagtcagaaacgtggcatctcatcggaagaggaggaaggagaggtagacagtgaagtagagctgacatcaagccagaggtggcctcagagcctgaacatgcgccagtcactatctaccttcagctcagagaatccatcagatggggaggaaggcacagctagtgaaccttcccccagtggcacacctgaagttggcagcaccaacactgatgagcggccagatgagcggtctgatgacatgtgctcccagggctcagaaatcccactggacccacctccttcagaggtcatccctggccctgaacccagctccctgcccattccacaccaggaacttctcagagagcggggccctcccaattctgaggactcagactgtgacagcactgaattggacaactccaacagcgttgatgccttgcggcccccagcttccctccctccatgaaagccactcgtattccttgtacatagagaaatatttatataaattatatatatatacatatatatatatatatgcgccacataatcaacagaaagatggggctgtcccagccgtaagtcaggctcgagggagactgatcccctgaccaattcacctgataaactctagggacactggcagctgtggaaatgaatgaggcacagccgtagagctgtggctaagggcaagccccttcctgccccaccccattccttatattcagcaagcaacaaggcaatagaaaagccagggttgtctttatattctttatccccaaataatagggggtggggggaggggcggtgggaggggcaggagagaaaaccacttagactgcacttttctgttccgtttactctgtttacacattttgcacttgggaggagggaggctaaggctgggtcctcccctctgaggtttctcaggtggcaatgtaactcatttttttgtcccaccatttatcttctctgcccaagccctgtcttaaggcccagggggaggttaggagactgatagcatgtgatggctcaggctgaagaaccggggtgctgtttaagtccctgcttttatcctggtgcctgattggggtggggactgtcctactgtaacccctgtgaaaaaccttgaaatataacactccatgcaggcccagctgttgagggttttcttgatgaatgaatggggtaccatacatggttaagataaagccttgggctccggactttatctgaggtgtctggagaagttctcctgcccctccacttttttgcatctactctcactaaatgagtataatgtcaagccccaactttctaaaattataggaataaatggtagcagatacatccttctaacttgttatggaggactataaatgaagttactaaaaacaatagactgaaatttttagtttaaaatatgcaagcctgaacaaggggaccaacattcccaagaaactggaacccagtcagacatatgatcaactgcttaatgtgtatgccatgtatgtcatgtgtcattcctttcccccaccccctccctagtggaagtgcttgcctactcccctaggacaggtaagtcctcggaaagtctaatcctcaatcttttgggcacaagttttataagggccaaccaagcatggagtcagggaaaaataggatcgagggccacaaaaaaagatggaagtggtaaaatagaagaaaacatcttaaccggaataaaggcttccattcaaaacccaagaagggtcctttgagggataaaaggtacaaaaataacagcaagacaagaggaataaaacccacatgaatcactgtggcatccagtttctattcacaaagaaaaagctccagtccatcttttaatttttttgaaaaattcctgacattacagaactaaactgaaatgtattaatattccactcttacatttccatgacaaacagaaaaattcatgagccaaaaaaaaaaaacca

SEQ ID NO: 154973 - DNA, 3109 bp, Homo sapiens
  Payload ID: 10468
  Gene Symbol: MAP3K12
  Gene Name: mitogen-activated protein kinase kinase kinase 12
  ENST ID: ENST00000552365
  CDS Start-End: 519-1700
gaggtctaggtgttactattgtgtgcctgaggttgaccccgaggtaaaggtgtaaatgtgagacccttctgatacctgtgtgtgcctgtgagtctcgggtgaaaaaaatgtgctgcagcaatgaattagtcatcttacagggagaagggaactcatctgttaccattactcttgaatttgagacatattttaccagtgtgtacccacgtggggctgttacctgagaatgatactcaggtacgatacctgtctacctattacttgccttactaacatgcctgagaggaagcccaagtgtatcagatttcctaagatggctcaaggtgcaatttggagggccatgggaaacggagccacaagtgttacctccagcggggctactgtgaacccagcaccccagtctgtgcctctgggataagtgtcctgagcaggcagtcctggggctttaacagcccagcccctccttccttcattcccacagggcccagtgttcaccatcataccaggggccagaggcgatggcttgcctccatgagacccgaacaccctctccttcctttgggggctttgtgtctaccctaagtgaggcatccatgcgcaagctggacccagacacttctgactgcactcccgagaaggacctgacgcctacccatgtcctgcagctacatgagcaggatgcagggggcccagggggagcagctgggtcacctgagagtcgggcatccagagttcgagctgacgaggtgcgactgcagtgccagagtggcagtggcttccttgagggcctctttggctgcctgcgccctgtctggaccatgattggcaaagcctactccactgagcacaagcagcagcaggaagacctttgggaggtcccctttgaggaaatcctggacctgcagtgggtgggctcaggggcccagggtgctgtcttcctggggcgcttccacggggaggaggtggctgtgaagaaggtgcgagacctcaaagaaaccgacatcaagcacttgcgaaagctgaagcaccccaacatcatcactttcaagggtgtgtgcacccaggctccctgctactgcatcctcatggagttctgcgcccagggccagctgtatgaggtactgcgggctggccgccctgtcaccccctccttactggttgactggtccatgggcatcgctggtggcatgaactacctgcacctgcacaagattatccacagggatctcaagtcacccaacatgctaatcacctacgacgatgtggtgaagatctcagattttggcacttccaaggagctgagtgacaagagcaccaagatgtcctttgcagggacagtagcctggatggcccctgaggtgatccgcaatgaacctgtgtctgagaaggtcgacatctggtcctttggcgtggtgctatgggaactgctgactggtgagatcccctacaaagacgtagattcctcagccattatctggggtgtgggaagcaacagtctccatctgcccgtgccctccagttgcccagatggtttcaagatcctgcttcgccagtgctggaatagcaaaccacgaaatcgcccatcattccgacagatcctgctgcatctggacattgcctcagctgatgtactctccacaccccaggagacttactttaagtcccaggtgtgctgtgggcagagtggcgggaagaagtaaaactgcactttgaaaagattaagtcagaagggacctgtctgcaccgcctagaagaggaactggtgatgaggaggagggaggagctcagacacgccctggacatcagggagcactatgaaaggaagctggagagagccaacaacctgtatatggaacttaatgccctcatgttgcagctggaactcaaggagagggagctgctcaggcgagagcaagctttagagcggaggtgcccaggcctgctgaagccacacccttcccggggcctcctgcatggaaacacaatggagaagcttatcaagaagaggaatgtgccacagaagctgtcaccccatagcaaaaggccagatatcctcaagacggagtctttgctccctaaactagatgcagccctgagtggggtggggcttcctgggtgtcctaagggccccccctcaccaggacggagtcgccgtggcaagacccgtcaccgcaaggccagcgccaaggggagctgtggggacctgcctgggcttcgtacagctgtgccaccccatgaacctggaggaccaggaagcccagggggcctaggagggggaccctcagcctgggaggcctgccctcccgccctccgtgggcttcatcatgacctcctgctccgcaaaatgtcttcatcgtccccagacctgctgtcagcagcactagggtcccggggccggggggccacaggcggagctggggatcctggctcaccacctccggcccggggtgacaccccaccaagtgagggctcagcccctggctccaccagcccagattcacctgggggagccaaaggggaaccacctcctccagtagggcctggtgaaggtgtggggcttctgggaactggaagggaagggacctcaggccggggaggaagccgggctgggtcccagcacttgaccccagctgcactgctgtacagggctgccgtcacccgaagtcagaaacgtggcatctcatcggaagaggaggaaggagaggtagacagtgaagtagagctgacatcaagccagaggtggcctcagagcctgaacatgcgccagtcactatctaccttcagctcagagaatccatcagatggggaggaaggcacagctagtgaaccttcccccagtggcacacctgaagttggcagcaccaacactgatgagcggccagatgagcggtctgatgacatgtgctcccagggctcagaaatcccactggacccacctccttcagaggtcatccctggccctgaacccagctccctgcccattccacaccaggaacttctcagagagcggggccctcccaattctgaggactcagactgtgacagcactgaattggacaactccaacagcgttgatgccttgcggcccccagcttccctccctccatga

SEQ ID NO: 154974 - DNA, 2944 bp, Homo sapiens
  Payload ID: 10468
  Gene Symbol: MAP3K12
  Gene Name: mitogen-activated protein kinase kinase kinase 12
  Uniprot ID: Q12852
  ENST ID: ENST00000547035
  CDS Start-End: 206-2884
ccccagctgctggccctggataccagaagggcctctggggaagcctggtgaactggagggaggctcggctggctgcaagtgtctctgagcatgtcaccctttctatgcctaaaccacctagtcgtcaaacaaccagatgacggctgaaaaattcctttaaaaagccagggcccagtgttcaccatcataccaggggccagaggcgatggcttgcctccatgagacccgaacaccctctccttcctttgggggctttgtgtctaccctaagtgaggcatccatgcgcaagctggacccagacacttctgactgcactcccgagaaggacctgacgcctacccagtgtgtacttcgagatgtggtaccccttggtgggcagggtgggggagggcccagcccctccccaggtggagagccgccccctgagccttttgccaacagtgtcctgcagctacatgagcaggatgcagggggcccagggggagcagctgggtcacctgagagtcgggcatccagagttcgagctgacgaggtgcgactgcagtgccagagtggcagtggcttccttgagggcctctttggctgcctgcgccctgtctggaccatgattggcaaagcctactccactgagcacaagcagcagcaggaagacctttgggaggtcccctttgaggaaatcctggacctgcagtgggtgggctcaggggcccagggtgctgtcttcctggggcgcttccacggggaggaggtggctgtgaagaaggtgcgagacctcaaagaaaccgacatcaagcacttgcgaaagctgaagcaccccaacatcatcactttcaagggtgtgtgcacccaggctccctgctactgcatcctcatggagttctgcgcccagggccagctgtatgaggtactgcgggctggccgccctgtcaccccctccttactggttgactggtccatgggcatcgctggtggcatgaactacctgcacctgcacaagattatccacagggatctcaagtcacccaacatgctaatcacctacgacgatgtggtgaagatctcagattttggcacttccaaggagctgagtgacaagagcaccaagatgtcctttgcagggacagtagcctggatggcccctgaggtgatccgcaatgaacctgtgtctgagaaggtcgacatctggtcctttggcgtggtgctatgggaactgctgactggtgagatcccctacaaagacgtagattcctcagccattatctggggtgtgggaagcaacagtctccatctgcccgtgccctccagttgcccagatggtttcaagatcctgcttcgccagtgctggaatagcaaaccacgaaatcgcccatcattccgacagatcctgctgcatctggacattgcctcagctgatgtactctccacaccccaggagacttactttaagtcccaggcagagtggcgggaagaagtaaaactgcactttgaaaagattaagtcagaagggacctgtctgcaccgcctagaagaggaactggtgatgaggaggagggaggagctcagacacgccctggacatcagggagcactatgaaaggaagctggagagagccaacaacctgtatatggaacttaatgccctcatgttgcagctggaactcaaggagagggagctgctcaggcgagagcaagctttagagcggaggtgcccaggcctgctgaagccacacccttcccggggcctcctgcatggaaacacaatggagaagcttatcaagaagaggaatgtgccacagaagctgtcaccccatagcaaaaggccagatatcctcaagacggagtctttgctccctaaactagatgcagccctgagtggggtggggcttcctgggtgtcctaagggccccccctcaccaggacggagtcgccgtggcaagacccgtcaccgcaaggccagcgccaaggggagctgtggggacctgcctgggcttcgtacagctgtgccaccccatgaacctggaggaccaggaagcccagggggcctaggagggggaccctcagcctgggaggcctgccctcccgccctccgtgggcttcatcatgacctcctgctccgcaaaatgtcttcatcgtccccagacctgctgtcagcagcactagggtcccggggccggggggccacaggcggagctggggatcctggctcaccacctccggcccggggtgacaccccaccaagtgagggctcagcccctggctccaccagcccagattcacctgggggagccaaaggggaaccacctcctccagtagggcctggtgaaggtgtggggcttctgggaactggaagggaagggacctcaggccggggaggaagccgggctgggtcccagcacttgaccccagctgcactgctgtacagggctgccgtcacccgaagtcagaaacgtggcatctcatcggaagaggaggaaggagaggtagacagtgaagtagagctgacatcaagccagaggtggcctcagagcctgaacatgcgccagtcactatctaccttcagctcagagaatccatcagatggggaggaaggcacagctagtgaaccttcccccagtggcacacctgaagttggcagcaccaacactgatgagcggccagatgagcggtctgatgacatgtgctcccagggctcagaaatcccactggacccacctccttcagaggtcatccctggccctgaacccagctccctgcccattccacaccaggaacttctcagagagcggggccctcccaattctgaggactcagactgtgacagcactgaattggacaactccaacagcgttgatgccttgcggcccccagcttccctccctccatgaaagccactcgtattccttgtacatagagaaatatttatataaattatatatatatacata

SEQ ID NO: 154975 - DNA, 2807 bp, Homo sapiens
  Payload ID: 10468
  Gene Symbol: MAP3K12
  Gene Name: mitogen-activated protein kinase kinase kinase 12
  Uniprot ID: Q12852
  ENST ID: ENST00000547488
  CDS Start-End: 68-2746
cttttgtgctgcggccgcggagcccccgagggcccagtgttcaccatcataccaggggccagaggcgatggcttgcctccatgagacccgaacaccctctccttcctttgggggctttgtgtctaccctaagtgaggcatccatgcgcaagctggacccagacacttctgactgcactcccgagaaggacctgacgcctacccagtgtgtacttcgagatgtggtaccccttggtgggcagggtgggggagggcccagcccctccccaggtggagagccgccccctgagccttttgccaacagtgtcctgcagctacatgagcaggatgcagggggcccagggggagcagctgggtcacctgagagtcgggcatccagagttcgagctgacgaggtgcgactgcagtgccagagtggcagtggcttccttgagggcctctttggctgcctgcgccctgtctggaccatgattggcaaagcctactccactgagcacaagcagcagcaggaagacctttgggaggtcccctttgaggaaatcctggacctgcagtgggtgggctcaggggcccagggtgctgtcttcctggggcgcttccacggggaggaggtggctgtgaagaaggtgcgagacctcaaagaaaccgacatcaagcacttgcgaaagctgaagcaccccaacatcatcactttcaagggtgtgtgcacccaggctccctgctactgcatcctcatggagttctgcgcccagggccagctgtatgaggtactgcgggctggccgccctgtcaccccctccttactggttgactggtccatgggcatcgctggtggcatgaactacctgcacctgcacaagattatccacagggatctcaagtcacccaacatgctaatcacctacgacgatgtggtgaagatctcagattttggcacttccaaggagctgagtgacaagagcaccaagatgtcctttgcagggacagtagcctggatggcccctgaggtgatccgcaatgaacctgtgtctgagaaggtcgacatctggtcctttggcgtggtgctatgggaactgctgactggtgagatcccctacaaagacgtagattcctcagccattatctggggtgtgggaagcaacagtctccatctgcccgtgccctccagttgcccagatggtttcaagatcctgcttcgccagtgctggaatagcaaaccacgaaatcgcccatcattccgacagatcctgctgcatctggacattgcctcagctgatgtactctccacaccccaggagacttactttaagtcccaggcagagtggcgggaagaagtaaaactgcactttgaaaagattaagtcagaagggacctgtctgcaccgcctagaagaggaactggtgatgaggaggagggaggagctcagacacgccctggacatcagggagcactatgaaaggaagctggagagagccaacaacctgtatatggaacttaatgccctcatgttgcagctggaactcaaggagagggagctgctcaggcgagagcaagctttagagcggaggtgcccaggcctgctgaagccacacccttcccggggcctcctgcatggaaacacaatggagaagcttatcaagaagaggaatgtgccacagaagctgtcaccccatagcaaaaggccagatatcctcaagacggagtctttgctccctaaactagatgcagccctgagtggggtggggcttcctgggtgtcctaagggccccccctcaccaggacggagtcgccgtggcaagacccgtcaccgcaaggccagcgccaaggggagctgtggggacctgcctgggcttcgtacagctgtgccaccccatgaacctggaggaccaggaagcccagggggcctaggagggggaccctcagcctgggaggcctgccctcccgccctccgtgggcttcatcatgacctcctgctccgcaaaatgtcttcatcgtccccagacctgctgtcagcagcactagggtcccggggccggggggccacaggcggagctggggatcctggctcaccacctccggcccggggtgacaccccaccaagtgagggctcagcccctggctccaccagcccagattcacctgggggagccaaaggggaaccacctcctccagtagggcctggtgaaggtgtggggcttctgggaactggaagggaagggacctcaggccggggaggaagccgggctgggtcccagcacttgaccccagctgcactgctgtacagggctgccgtcacccgaagtcagaaacgtggcatctcatcggaagaggaggaaggagaggtagacagtgaagtagagctgacatcaagccagaggtggcctcagagcctgaacatgcgccagtcactatctaccttcagctcagagaatccatcagatggggaggaaggcacagctagtgaaccttcccccagtggcacacctgaagttggcagcaccaacactgatgagcggccagatgagcggtctgatgacatgtgctcccagggctcagaaatcccactggacccacctccttcagaggtcatccctggccctgaacccagctccctgcccattccacaccaggaacttctcagagagcggggccctcccaattctgaggactcagactgtgacagcactgaattggacaactccaacagcgttgatgccttgcggcccccagcttccctccctccatgaaagccactcgtattccttgtacatagagaaatatttatataaattatatatatatacatat

SEQ ID NO: 154976 - DNA, 150 bp, Homo sapiens
  Payload ID: 10468
  Gene Symbol: MAP3K12
  Gene Name: mitogen-activated protein kinase kinase kinase 12
  ENST ID: ENST00000548565
  CDS Start-End: 74-150
ggaggaggatggggcctagagccgagtgaattccaaggcccagtgttcaccatcataccaggggccagaggcgatggcttgcctccatgagacccgaacaccctctccttcctttgggggctttgtgtctaccctaagtgaggcatccat

SEQ ID NO: 154977 - DNA, 9876 bp, Homo sapiens
  Payload ID: 10469
  Gene Symbol: MAP3K13
  Gene Name: mitogen-activated protein kinase kinase kinase 13
  Uniprot ID: O43283
  ENST ID: ENST00000265026
  CDS Start-End: 335-3235
ccctcttttttttttcatgacacacaccacagcgaagtctgtgcggaatcctaaaccagcccaatttacatccattcatgaatctgtgacgtcagcaagcctttgggctcctttgcggtgggctggaggattgtgtgggtggaatccccctcccctttatttttccaattctgcaaggcttttaaaattcaccttacatcttttcaaagcaagaaaatggaacagcatgtgtaggaattcttcgttgttgttttggagccctctcttaagtcagaactctgtcccaaaaatcttctgagtgtcatctcaggactttggttatactcatggcacgatggccaactttcaggagcacctgagctgctcctcttctccacacttacccttcagtgaaagcaaaaccttcaatggactacaagatgagctcacagctatggggaaccacccttctcccaagctgctcgaggaccagcaggaaaaggggatggtacgaacagagctaatcgagagcgtgcacagccccgtcaccacaacagtgttgacgagcgtaagtgaggattccagggaccagtttgagaacagcgttcttcagctaagggaacacgatgaatcagagacggcggtgtctcaggggaacagcaacacggtggacggagagagcacaagcggaactgaagacataaagattcagttcagcaggtcaggcagtggcagtggtgggtttcttgaaggactatttggatgcttaaggcctgtatggaatatcattgggaaggcatattccactgattacaaattgcagcagcaagatacttgggaagtgccatttgaggagatctcagagctgcagtggctgggtagtggagcccaaggagcggtcttcttgggcaagttccgggcggaagaggtggccatcaagaaagtgagagaacagaatgagacggatatcaagcatttgaggaagttgaagcaccctaacatcatcgcattcaagggtgtttgtactcaggccccatgttattgtattatcatggaatactgtgcccatggacaactctacgaggtcttacgagctggcaggaagatcacacctcgattgctagtagactggtccacaggaattgcaagtggaatgaattatttgcacctccataaaattattcatcgtgatctcaaatcacctaatgttttagtgacccacacagatgcggtaaaaatttcagattttggtacatctaaggaactcagtgacaaaagtaccaagatgtcatttgctggcacggtcgcatggatggcgccagaggtgatacggaatgaacctgtctctgaaaaagttgatatatggtcttttggagtggtgctttgggagctgctgacaggagagatcccttacaaagatgtagattcttcagccattatctggggtgttggaagcaacagcctccaccttccagttccttccacttgccctgatggattcaaaatccttatgaaacagacgtggcagagtaaacctcgaaaccgaccttcttttcggcagacactcatgcatttagacattgcctctgcagatgtacttgccaccccacaagaaacttacttcaagtctcaggctgaatggagagaagaagtgaaaaaacattttgagaagatcaaaagtgaaggaacttgtatacaccggttagatgaagaactgattcgaaggcgcagagaagagctcaggcatgcgctggatattcgtgaacactatgagcggaagcttgagcgggcgaataatttatacatggaattgagtgccatcatgctgcagctagaaatgcgggagaaggagctcattaagcgtgagcaagcagtggaaaagaagtatcctgggacctacaaacgacaccctgttcgtcctatcatccatcccaatgccatggagaaactcatgaaaaggaaaggagtgcctcacaaatctgggatgcagaccaaacggccagacttgttgagatcagaagggatccccaccacagaagtggctcccactgcatcccctttgtccggaagtcccaaaatgtccacttctagcagcaagagccgatatcgaagcaaaccacgccaccgccgagggaatagcagaggcagccatagtgactttgccgcaatcttgaaaaaccagccagcccaggaaaattcaccccatcccacttacctgcaccaagctcaatcccaatacccttctcttcatcaccataattctctgcagcagcaataccagcagccccctcctgccatgtcccagagtcaccatcccagactcaatatgcacggacaggacatagcaacctgcgccaacaacctgaggtatttcggcccagcagcagccctgcggagcccactcagcaaccatgctcagagacagctgcccggctcgagccctgacctcatctccacagccatggctgcagactgctggagaagttctgagcctgacaagggccaagctggtccctggggctgttgccaggctgacgcttatgacccctgccttcagtgcaggccagaacagtatgggtccttagacataccctctgctgagccagtggggaggagccctgacctttccaagtcaccagcacataatcctctcttggaaaacgcccagagttctgagaaaacggaagaaaatgaattcagcggctgtaggtctgagtcatccctcggcacctctcatctcggcacccctccagcgctacctcgaaaaacaaggcctctgcagaagagtggagatgactcctcagaagaggaagaaggggaagtagatagtgaagttgaatttccacgaagacagaggccccatcgctgtatcagcagctgccagtcatattcaacctttagctctgagaatttctctgtgtctgatggagaagagggaaataccagtgaccactcaaacagtcctgatgagttagctgataaacttgaagaccgcttggcagagaagctagacgacctgctgtcccagacgccagagattcccattgacatatcctcacactcggatgggctctctgacaaggagtgtgccgtgcgccgtgtgaagactcagatgtctctgggcaagctgtgtgtggaggaacgtggctatgagaaccccatgcagtttgaagaatcggactgtgactcttcagatggggagtgttctgatgccacagttaggaccaataaacactacagctctgctacctggtaatgaaggaatacacatcctgaagatctcgtgactatactggcatttcagatccaccccacccccagactcatcccactctctcccagcattttgtctgggaagagagactaccccatctttaccaccccctagaaatgagctgcaataacaggaacatgagacttcgcaaatctctggaaaataatatccaaatgaaattaagtctcactgaacatttcaatcaagaatggcagggatctattttattgaatattctagctactgtaacattgatatttatttttgtttgacattttaacactttgtactgcaaagagtgaactatatatgagatagagagacaataatttcttgcaaaaaaaaaaagagataaaagaaagaacagaaaaaaagaaataagtggaatttaagagcaacatccttgggaatttgtggggccgggaggtattattgctgcttgaacaggggaccaggtcttttggccataagtgactaaagaagagccagagcaagacattgaacattttagaacacaaagaacagcaaaagaaaagcaattccaggcaacttgtgaacagaccatattcacttcaaccagcttgtccaggtggcttacggaaatgacctagaaaagtctggtgaccagatacttgcacccaatgtcttcaagggcatgtgcttcctctaggagggaaaaacagacaaacaaacaaacaaacaaacctgtgtatgtggaagctggtttcatttttaaatgtttaagcagcagttggtagtgaggtttacagatagtgtcaaatcttgtttttggcaaatacgtccctttttagtgctgtcactgtcattaccttggcaaatgtgctaccttgacccaacgtgttgatctttcatactcaagtgccatttccttgtagctcatttcctttctgcctgctgaccacttcctgtaggaacaaaggttggggggcagtactgaggaggagaaaagggtgagagaggaagaacatctacagtggtgttaggaaaacgaacgtggaatttataaaactccattctcaggatcactcagttcagctacgaggagaagatggaaccacccctctctggagccaggttgcttgtctacttgagtcatattgattcaagcaggagaacagactttgaaggcagctaggatgtatgtgtgtctatacaatgtctgagcccaaaccatccctttgtttttattcaataactcattctatcttagaagttcttttttttttttttttttttgacagagttttgctctttttgcccaggctagagtgcaatggcacaatctcagttcactgcaacctccatctcccaggttcaagcgattctcctgcctcagcctcccgagtagctgggattacaggcgcccgcaaccacgcctggctaattttgtatttttagtagacacggggtttcaccatgttggccaggcttgtctcaaactcctgacctcaggtgatccgcctgcctcggcctcccaaagtgctgggattacaggcatcagccactgtgcccggcctatcttagaagtcttaatgactggctaccactgtcagaataaaagcaaaaacaagcagcttgcaaaaggcaactcctctcccagcacaatagcatttttgttcaatgctacttgtaaaatatcttttacttcactccaaatcaatgcagttttaaataactggatttgaacatttgtggaaagaacaagggatgctgagcagggataggaaggatttttacattgccaaaagcatgaggtcctgcctgtctccagggtcatgggctctgaaaagcattccaaggtacttcatggtgccttggccttaaggaaaaatttttttagaattttatgtacaaataggtgttgacctagtacctgtccctgtctccaagacagattaccgtcaaacaacctctctagattcactggactctttgacactgcatcatgttggacgttaggaaatacttgcacagacagctgttaaaccatttccaatgcacatgaaaatgttgccgctcctctgggttttactgattgcatcagccaaaaaggaaaggcaggagggaatttagagttccttttgcttgtttgatccatttgtttacactttatgttgatacattgatttaaaatgtagtgtctgtgatttatagctcttaggatgaaggaaaatgtttaatttatacaaagagcagtattgtttgcattaatttattccattttgtaaaaattctgtagctggactacatgaaagatcttaagttatggcattattatcattgttattttattttataatattatcattctcattttctgtcgatcagaaggtgtgatttatgatgtggcacaatggttgtgtttattgctaaccaggaattattatggattttatgattttaatgaaggaatgaaaatggaattcccatttgggagctccctggtattgatcttagctgtgttccctaattttctgtgtacaacaatcatctgaggacgcatgttctgccctgaagcccaatggatacattgtgattttgacttgatcatgaaagctcctgggtgggccgatgacccccaggatgtcaaatagtggatggacatatagttaaaaagctgtaaactttctaaagtttcttaggaaataaattcatgggactatattagaaataaaaagagaatgatttaatgtcctgagaggaacagacctagagggtttccgcacagggctcatggattcgtttcaagaattgacaacatagtttgcaatctccttcctgccagacccctttgttctcccacctttattctcctagtggagagtagcagggagactaaaaaaagaaatggtatacagtagtcccctcttacccatggcttcattttcatggtttcagttacgctcaacagcagtccaaaaatatttgatggaacattccagaaataaacaattcataaattttaattgcacagcattctgaggagcatgatgagatcttgccccttgctgccctggaggtgatcctccctctgtccagcatattcatgctgctcatccattagtcacttagtagcagtctcggtgatcagatcgactgtctcggttatcagatgactgtatcgcagtgcttgtgttcaagtacccctatttaattaataatagccccaaagggcaagagtgctgtgcctaatttacaaattaaattttatcatagatatgtaagtatagaaaaaaaaacatagtatatatagggtttggtactatcagagtttttaggcatccactgggggtcttggaatgtatcccccagaaataagggaggactaccgtatatacatgtagggcatgacataaaatgcctaactgtgatgtcatcctagaacaagactaaagaactttaagaaggaggcctggtcacttagaggaccaacgactggaaaaaaattcttgaaaggctatattttccatcctcttgacttcagatctcactgtactgtaaatctctctggttcattattccttggaacagagatgctacaactctatgtcttctttctatccaacataaaacactggcagttttgtccaattcttgcccacctttagtggcaacagagaaacatgagggtcagcttttatcttacatctttcagtgatggtcttcctagaaaacctacccctgatacctcgtaattttgatcagttttttttgaattctcatcttgattatctgttatgctattgtcatcatacaccttatgtggattaactgttatgagtatgttagggtagtacgtagtggctgaatctcagtcattcattgtatagtcgagagttgaataaagtccatattgaacacatttttttaagtagaattgactagaggtttcagaggagaataaggtccttagtggaggttaaaaagggaaataccttctctagcccagcctggtccttcgctgcctgccttgtgataaccgggaaaatcttgaattgatgtatgtttctttgagaacgactccacagtcatctgaagagtgttgaatcaagagctcagggaagttatgagctaattcttcagtcctgacaagtgtgttacaacagtgcttccaggaacctcacaagactgtgatttcaagctgcttcattgatggaaagtttcaccatcttgggatgaatgtccatgttccgttagcgtctgtttttaactgactgcaagatgatgagttttaatttgggttgcagatgagcatttggttctgattttcatctatttcaagatcatatcctctggataacagttccttttaaaattgctttgcagaggggctgagaagcctgcatctactttgaaattataatggaccttaccaccacttaagtttagacctgtttgcaagatggtggggagctcctactgagaaagatgaagatgctagctctattgtaaactggcgtcttcatctagctacttgaagttgagatactatattttaaaatgttggcatcaaacaaatctatccttctagaagtaaagacattttgagtaggatttagtaagtactggacatctcctgtagagcttcatcatgctaaattattcccctctccttttctaaataatagatgtgcttgggtttgggatttacctggcaccaacccagactttttttgggggggggtgagggcgcaggatctcactctgtcaccaggttggagtacagtggcatgattatggctcactgcagcctcaacctcctgggctcaagtgatcctcccacctcagcctcctgagtagctgggaccacaggtgtgtgccaccatgcacaacaattttttttttttttttgtagagatgggcgtctccctgtgttgcccaggctggtatcgaactctgggctctagcgatcctcctgctttggcctcccaaagtactgggattacaaacgtgagctgccatgcccagcctccagactattttaaatgccctctcccactgtggaacattggcatcctttaagaataaatgcatcctttttgatcaaatgatttactctttttttcttcaatgtcctcatgtctcaatttttttttccttttcttaaaacagtcccacttgaacttcctggaactgaattctccagaacataatatttataatccatagaattcctgccctgctctgcagtagagtgtgctatgttttgttttcccactgagccagaagccgaaatattatactaccacttaccaccatctaccacctccaagaccaagaccaacattatgtattgagcatcgtatctttcctactgagcctagacacagcctcagaacctctcaacatagcacttggagcaacaattgccgcttgattggaattgccatttgagcttgagttagccccaatggcagaacgacaggctcgcactagtgtccacctgtggctgtcaggggcggtaccacagaaaggggaaaggccacttgcctctacccactgcccttttggacaacaattccaattgaaggaacaccaatcactgatggatcccattccaaaatgtctcttcattcacatcatttaattctgttgaatgaatatgttcctccctcaccttttataaacagaaaattaatataagtcccagttacttgcttcttagactctgtgagactcatgtaccaaaacaatgtgacattcttttcgagactttgacttgtacggtcagtatgaatttagtgcctttccaggcagcaaaatgtttcttctttgctgatttcataggacaaatatcctagcatactcacaccaccagtgtcccaccctcacagactggcacattagaatcatattaatctgcttgtttgcatgttacaactgatactgcaaaagcctattcaagtcggactgaactaggctaagcagaggacccttgtggaacctggagcatttctcagggacaggtggctaaagaggggagctctaaaatcactgctctgagaaacaggaggtgggttaaggcttttgttaactgtcatgtggccagggtacgatggcaggacttcacagagcagagccctaagcagatggcaaggccactgtaaggaagctcccggcagcatcccaggtctgctctccagagccacttcacagcactcagggatcgctggctcccggccctaggctgctgtccagtgaccaggtggacagggtcctccagtgactgcaggccaagggaaccccagccagcatgtgcaagctattaggaagatgtcccatcttgcccatatcaccccagtggctcttcaccttcagagtgaccacttcccagactctggaagtgggaagaccctctttgacgctttattacagtaatttgagctcctatcgacttggagcgaatgaatttctcttttgtggttaggtctccaaatgaacctccttacctggctcccctctggtctcctgtactgtcagtccccagctcccagtgttgttttctgatgccggctccctctctgtattgaacggcaatgggaacaagaatgactatcaaagcaaacaaatgcatggaattaaacaaaaagtgtacttcactg

SEQ ID NO: 154978 - DNA, 618 bp, Homo sapiens
  Payload ID: 10469
  Gene Symbol: MAP3K13
  Gene Name: mitogen-activated protein kinase kinase kinase 13
  ENST ID: ENST00000447637
  CDS Start-End: 280-618
gtggagggtgacgccatgggtggggcggagcgtctgggatgcgctgggagcctaggatccccgacagttttgcagaacactgaaatctatggactctaaaatggacttcatttaaagaaacccacggaccattaatggacaaaaacatgagtcaatatgtattgtggcattcaaatcctagcactctgggagaggttttggagccctctcttaagtcagaactctgtcccaaaaatcttctgagtgtcatctcaggactttggttatactcatggcacgatggccaactttcaggagcacctgagctgctcctcttctccacacttacccttcagtgaaagcaaaaccttcaatggactacaagatgagctcacagctatggggaaccacccttctcccaagctgctcgaggaccagcaggaaaaggggatggtacgaacagagctaatcgagagcgtgcacagccccgtcaccacaacagtgttgacgagcgtaagtgaggattccagggaccagtttgagaacagcgttcttcagctaagggaacacgatgaatcagagacggcggtgtctcaggggaacagcaacacggtggacggagagagcacaagcggaact

SEQ ID NO: 154979 - DNA, 1460 bp, Homo sapiens
  Payload ID: 10469
  Gene Symbol: MAP3K13
  Gene Name: mitogen-activated protein kinase kinase kinase 13
  Uniprot ID: O43283
  ENST ID: ENST00000433092
  CDS Start-End: 154-540
agtttagtctgtgaggaaactggcggctgctggtagttccatgctgtctgttcagacttcagcttggtgttttggagccctctcttaagtcagaactctgtcccaaaaatcttctgagtgtcatctcaggactttggttatactcatggcacgatggccaactttcaggagcacctgagctgctcctcttctccacacttacccttcagtgaaagcaaaaccttcaatggactacaagatgagctcacagctatggggaaccacccttctcccaagctgctcgaggaccagcaggaaaaggggatggtacgaacagagctaatcgagagcgtgcacagccccgtcaccacaacagtgttgacgagcgtaagtgaggattccagggaccagtttgagaacagcgttcttcagctaagggaacacgatgaatcagagacggcggtgtctcaggggaacagcaacacggtggacggagagagcacaagcggaactgaagacataaagattcagttcagcagatacttgggaagtgccatttgaggagatctcagagctgcagtggctgggtagtggagcccaaggagcggtcttcttgggcaagttccgggcggaagaggtggccatcaagaaagtgagagaacagaatgagacggatatcaagcatttgaggaagttgaagcaccctaacatcatcgcattcaagggtgtttgtactcaggccccatgttattgtattatcatggaatactgtgcccatggacaactctacgaggtcttacgagctggcaggaagatcacacctcgattgctagtagactggtccacaggaattgcaagtggaatgaattatttgcacctccataaaattattcatcgtgatctcaaatcacctaatgttttagtgacccacacagatgcggtaaaaatttcagattttggtacatctaaggaactcagtgacaaaagtaccaagatgtcatttgctggcacggtcgcatggatggcgccagaggtgatacggaatgaacctgtctctgaaaaagttgatatatggtcttttggagtggtgctttgggagctgctgacaggagagatcccttacaaagatgtagattcttcagccattatctggggtgttggaagcaacagcctccaccttccagttccttccacttgccctgatggattcaaaatccttatgaaacagacgtggcagagtaaacctcgaaaccgaccttcttttcggcagacactcatgcatttagacattgcctctgcagatgtacttgccaccccacaagaaacttacttcaagtctcaggtaagttgggaaacttcctaccaggtgctactaaacagatagagaactctcaatgaaacagagtaactcttagaagggcccattgtgtttgttataatagttatataactccattcattgtgacacaataaatatgata

SEQ ID NO: 154980 - DNA, 388 bp, Homo sapiens
  Payload ID: 10469
  Gene Symbol: MAP3K13
  Gene Name: mitogen-activated protein kinase kinase kinase 13
  ENST ID: ENST00000438798
  CDS Start-End: 214-336
gttcaatgtgatgtccactaaattttggacatctaaatgtctgtgtagtataacttttattcataatgagttggtatctcagtggtaccttaggtctgtacattgacattcttgaggtttttagttttgcagaacactgaaatctatggactctaaaatggacttcatttaaagaaacccacggaccattaatggacaaaaacatgagtcaatatgtattgtggcattcaaatcctagcactctgggagagcatcaagtaccacgtttttgaagaccatggcctatcatcattatgcattcaagatttgagtttgaataacctcatcaagacttagatcttcttcagaagcttcaagtctcatctgcattaaagctctccattgaacc

SEQ ID NO: 154981 - DNA, 1681 bp, Homo sapiens
  Payload ID: 10469
  Gene Symbol: MAP3K13
  Gene Name: mitogen-activated protein kinase kinase kinase 13
  ENST ID: ENST00000448876
  CDS Start-End: 177-299
acgggaggcggtacctggttgtggagggtgacgccatgggtggggcggagcgtctgggatgcgctgggagcctaggatccccgacagttttgcagaacactgaaatctatggactctaaaatggacttcatttaaagaaacccacggaccattaatggacaaaaacatgagtcaatatgtattgtggcattcaaatcctagcactctgggagagcatcaagtaccacgtttttgaagaccatggcctatcatcattatgcattcaagatttgagtttgaataacctcatcaagacttagatcttcttcagaagcttcaagtctcatctgcattaaagctctccattgaaccctctcacaaaagtacaagcttaaaggggctaaaatccattaatacattccattttatatcccttcctctgacttctcttcaatttccttggcctctagggtccttcatattgcttacgttcctttagactagagccaaggagacagtgctttccaaaaaaaaaaaaaaaaaaaatgtgttctgtggccataagttttcattgatagagaagcataaatttggtgaatttagaattaggtcttttatcatatcctataaaaagttgagttaacaggctgggcacggtggctcatgcctgtaatcccagcactttgggaggccaaggcagctggatgccccaaggtcaggcatttgagaccagcctggccaacatggcgaaaccccatctctactaaaaatacaaaaattagccaggcatggtggcaggcgcctgtaatcccagctactcgagagactgaggcaggagaatcacttgaaaccaggaggcgggggctgcagtgagccaagatcacgccactgcattccagcctgggtgacagagcgagactccgtctaaaaaaaaaaaaaaagttgaattaacaataaggaaatgaggatgaagcggtaaaaatgttttgggttacattatactctcagaagctatgtggtttagagaaaagggcccccaaccacaaaagttagtggttcttattctgtctgcttcgtactaggtatatggtaactgagaaagtcacttaacctctctgaaccttaacttcgtcatctataaagtgaatctaacattttccccccggcctacctcacagggttgttgtgaggatcaaatgaaataatgtacatgaaaagacatatataaaatgtataatacagacaaagggtcctgttacacagttggaagtcattccctcagattttgggcctaggaaggtaggtgatttaaactcactgaaagcatgtaccatgtccaggttggatacatggcaacaaggctatgttaaattttttttctctgagttgagtccctaaaatactatcatgggctaattctaagaaggagcacgaatatatattcccctaaaattatagcttagcattgtcaatgctttagagcagttatgggagttatagattataacatattagtgatttgtgaaacttttttactaaaatgtgaccctcatttttctttacatgaaagaacatagaatatttcacaatgcatcccacgtggtaagaataaaaaattgttttagttatatgtacaaatgtgtgtgtgtgaacgtgtgtgtacttggtcattaaataaaatgtacttttttttttcctgtga

SEQ ID NO: 154982 - DNA, 3156 bp, Homo sapiens
  Payload ID: 10469
  Gene Symbol: MAP3K13
  Gene Name: mitogen-activated protein kinase kinase kinase 13
  Uniprot ID: O43283
  ENST ID: ENST00000424227
  CDS Start-End: 256-3156
tgggtggggcggagcgtctgggatgcgctgggagcctaggatccccgacagaacactgaaatctatggactctaaaatggacttcatttaaagaaacccacggaccattaatggacaaaaacatgagtcaatatgtattgtggcattcaaatcctagcactctgggagaggttttggagccctctcttaagtcagaactctgtcccaaaaatcttctgagtgtcatctcaggactttggttatactcatggcacgatggccaactttcaggagcacctgagctgctcctcttctccacacttacccttcagtgaaagcaaaaccttcaatggactacaagatgagctcacagctatggggaaccacccttctcccaagctgctcgaggaccagcaggaaaaggggatggtacgaacagagctaatcgagagcgtgcacagccccgtcaccacaacagtgttgacgagcgtaagtgaggattccagggaccagtttgagaacagcgttcttcagctaagggaacacgatgaatcagagacggcggtgtctcaggggaacagcaacacggtggacggagagagcacaagcggaactgaagacataaagattcagttcagcaggtcaggcagtggcagtggtgggtttcttgaaggactatttggatgcttaaggcctgtatggaatatcattgggaaggcatattccactgattacaaattgcagcagcaagatacttgggaagtgccatttgaggagatctcagagctgcagtggctgggtagtggagcccaaggagcggtcttcttgggcaagttccgggcggaagaggtggccatcaagaaagtgagagaacagaatgagacggatatcaagcatttgaggaagttgaagcaccctaacatcatcgcattcaagggtgtttgtactcaggccccatgttattgtattatcatggaatactgtgcccatggacaactctacgaggtcttacgagctggcaggaagatcacacctcgattgctagtagactggtccacaggaattgcaagtggaatgaattatttgcacctccataaaattattcatcgtgatctcaaatcacctaatgttttagtgacccacacagatgcggtaaaaatttcagattttggtacatctaaggaactcagtgacaaaagtaccaagatgtcatttgctggcacggtcgcatggatggcgccagaggtgatacggaatgaacctgtctctgaaaaagttgatatatggtcttttggagtggtgctttgggagctgctgacaggagagatcccttacaaagatgtagattcttcagccattatctggggtgttggaagcaacagcctccaccttccagttccttccacttgccctgatggattcaaaatccttatgaaacagacgtggcagagtaaacctcgaaaccgaccttcttttcggcagacactcatgcatttagacattgcctctgcagatgtacttgccaccccacaagaaacttacttcaagtctcaggctgaatggagagaagaagtgaaaaaacattttgagaagatcaaaagtgaaggaacttgtatacaccggttagatgaagaactgattcgaaggcgcagagaagagctcaggcatgcgctggatattcgtgaacactatgagcggaagcttgagcgggcgaataatttatacatggaattgagtgccatcatgctgcagctagaaatgcgggagaaggagctcattaagcgtgagcaagcagtggaaaagaagtatcctgggacctacaaacgacaccctgttcgtcctatcatccatcccaatgccatggagaaactcatgaaaaggaaaggagtgcctcacaaatctgggatgcagaccaaacggccagacttgttgagatcagaagggatccccaccacagaagtggctcccactgcatcccctttgtccggaagtcccaaaatgtccacttctagcagcaagagccgatatcgaagcaaaccacgccaccgccgagggaatagcagaggcagccatagtgactttgccgcaatcttgaaaaaccagccagcccaggaaaattcaccccatcccacttacctgcaccaagctcaatcccaatacccttctcttcatcaccataattctctgcagcagcaataccagcagccccctcctgccatgtcccagagtcaccatcccagactcaatatgcacggacaggacatagcaacctgcgccaacaacctgaggtatttcggcccagcagcagccctgcggagcccactcagcaaccatgctcagagacagctgcccggctcgagccctgacctcatctccacagccatggctgcagactgctggagaagttctgagcctgacaagggccaagctggtccctggggctgttgccaggctgacgcttatgacccctgccttcagtgcaggccagaacagtatgggtccttagacataccctctgctgagccagtggggaggagccctgacctttccaagtcaccagcacataatcctctcttggaaaacgcccagagttctgagaaaacggaagaaaatgaattcagcggctgtaggtctgagtcatccctcggcacctctcatctcggcacccctccagcgctacctcgaaaaacaaggcctctgcagaagagtggagatgactcctcagaagaggaagaaggggaagtagatagtgaagttgaatttccacgaagacagaggccccatcgctgtatcagcagctgccagtcatattcaacctttagctctgagaatttctctgtgtctgatggagaagagggaaataccagtgaccactcaaacagtcctgatgagttagctgataaacttgaagaccgcttggcagagaagctagacgacctgctgtcccagacgccagagattcccattgacatatcctcacactcggatgggctctctgacaaggagtgtgccgtgcgccgtgtgaagactcagatgtctctgggcaagctgtgtgtggaggaacgtggctatgagaaccccatgcagtttgaagaatcggactgtgactcttcagatggggagtgttctgatgccacagttaggaccaataaacactacagctctgctacctggtaa

SEQ ID NO: 154983 - DNA, 2882 bp, Homo sapiens
  Payload ID: 10469
  Gene Symbol: MAP3K13
  Gene Name: mitogen-activated protein kinase kinase kinase 13
  Uniprot ID: O43283
  ENST ID: ENST00000438053
  CDS Start-End: 213-695
ctggaggattgtgtgggtggaatccccctcccctttatttttccaattctgcaaggcttttaaaattcaccttacatcttttcaaagcaagaaaatggaacagcatgtgtaggaattcttcgttgttgttttggagccctctcttaagtcagaactctgtcccaaaaatcttctgagtgtcatctcaggactttggttatactcatggcacgatggccaactttcaggagcacctgagctgctcctcttctccacacttacccttcagtgaaagcaaaaccttcaatggactacaagatgagctcacagctatggggaaccacccttctcccaagctgctcgaggaccagcaggaaaaggggatggtacgaacagagctaatcgagagcgtgcacagccccgtcaccacaacagtgttgacgagcgtaagtgaggattccagggaccagtttgagaacagcgttcttcagctaagggaacacgatgaatcagagacggcggtgtctcaggggaacagcaacacggtggacggagagagcacaagcggaactgaagacataaagattcagttcagcaggtcaggcagtggcagtggtgggtttcttgaaggactatttggatgcttaaggcctgtatggaatatcattgggaaggcatattccactgattacaaattgcagcagcaagtgttttagtgacccacacagatgcggtaaaaatttcagattttggtacatctaaggaactcagtgacaaaagtaccaagatgtcatttgctggcacggtcgcatggatggcgccagaggtgatacggaatgaacctgtctctgaaaaagttgatatatggtcttttggagtggtgctttgggagctgctgacaggagagatcccttacaaagatgtagattcttcagccattatctggggtgttggaagcaacagcctccaccttccagttccttccacttgccctgatggattcaaaatccttatgaaacagacgtggcagagtaaacctcgaaaccgaccttcttttcggcagacactcatgcatttagacattgcctctgcagatgtacttgccaccccacaagaaacttacttcaagtctcaggctgaatggagagaagaagtgaaaaaacattttgagaagatcaaaagtgaaggaacttgtatacaccggttagatgaagaactgattcgaaggcgcagagaagagctcaggcatgcgctggatattcgtgaacactatgagcggaagcttgagcgggcgaataatttatacatggaattgagtgccatcatgctgcagctagaaatgcgggagaaggagctcattaagcgtgagcaagcagtggaaaagaagtatcctgggacctacaaacgacaccctgttcgtcctatcatccatcccaatgccatggagaaactcatgaaaaggaaaggagtgcctcacaaatctgggatgcagaccaaacggccagacttgttgagatcagaagggatccccaccacagaagtggctcccactgcatcccctttgtccggaagtcccaaaatgtccacttctagcagcaagagccgatatcgaagcaaaccacgccaccgccgagggaatagcagaggcagccatagtgactttgccgcaatcttgaaaaaccagccagcccaggaaaattcaccccatcccacttacctgcaccaagctcaatcccaatacccttctcttcatcaccataattctctgcagcagcaataccagcagccccctcctgccatgtcccagagtcaccatcccagactcaatatgcacggacaggacatagcaacctgcgccaacaacctgaggtatttcggcccagcagcagccctgcggagcccactcagcaaccatgctcagagacagctgcccggctcgagccctgacctcatctccacagccatggctgcagactgctggagaagttctgagcctgacaagggccaagctggtccctggggctgttgccaggctgacgcttatgacccctgccttcagtgcaggccagaacagtatgggtccttagacataccctctgctgagccagtggggaggagccctgacctttccaagtcaccagcacataatcctctcttggaaaacgcccagagttctgagaaaacggaagaaaatgaattcagcggctgtaggtctgagtcatccctcggcacctctcatctcggcacccctccagcgctacctcgaaaaacaaggcctctgcagaagagtggagatgactcctcagaagaggaagaaggggaagtagatagtgaagttgaatttccacgaagacagaggccccatcgctgtatcagcagctgccagtcatattcaacctttagctctgagaatttctctgtgtctgatggagaagagggaaataccagtgaccactcaaacagtcctgatgagttagctgataaacttgaagaccgcttggcagagaagctagacgacctgctgtcccagacgccagagattcccattgacatatcctcacactcggatgggctctctgacaaggagtgtgccgtgcgccgtgtgaagactcagatgtctctgggcaagctgtgtgtggaggaacgtggctatgagaaccccatgcagtttgaagaatcggactgtgactcttcagatggggagtgttctgatgccacagttaggaccaataaacactacagctctgctacctggtaatgaaggaatacacatcctgaagatctcgtgactatactggcatttcagatccaccccacccccagactcatcccactctctcccagcattttgtctgggaagagagactaccccatctttaccaccccctagaaatgagctgcaa

SEQ ID NO: 154984 - DNA, 573 bp, Homo sapiens
  Payload ID: 10469
  Gene Symbol: MAP3K13
  Gene Name: mitogen-activated protein kinase kinase kinase 13
  ENST ID: ENST00000428617
  CDS Start-End: 161-573
aaagtttagtttagtctgtgaggaaactggcggctgctggtagttccatgctgtctgttcagacttcagcttggtgttttggagccctctcttaagtcagaactctgtcccaaaaatcttctgagtgtcatctcaggactttggttatactcatggcacgatggccaactttcaggagcacctgagctgctcctcttctccacacttacccttcagtgaaagcaaaaccttcaatggactacaagatgagctcacagctatggggaaccacccttctcccaagctgctcgaggaccagcaggaaaaggggatggtacgaacagagctaatcgagagcgtgcacagccccgtcaccacaacagtgttgacgagcgtaagtgaggattccagggaccagtttgagaacagcgttcttcagctaagggaacacgatgaatcagagacggcggtgtctcaggggaacagcaacacggtggacggagagagcacaagcggaactgaagacataaagattcagttcagcaggtcaggcagtggcagtggtgggtttcttgaaggactatttggatgctt

SEQ ID NO: 154985 - DNA, 982 bp, Homo sapiens
  Payload ID: 10469
  Gene Symbol: MAP3K13
  Gene Name: mitogen-activated protein kinase kinase kinase 13
  ENST ID: ENST00000455188
  CDS Start-End: 157-279
gtggagggtgacgccatgggtggggcggagcgtctgggatgcgctgggagcctaggatccccgacagttttgcagaacactgaaatctatggactctaaaatggacttcatttaaagaaacccacggaccattaatggacaaaaacatgagtcaatatgtattgtggcattcaaatcctagcactctgggagagcatcaagtaccacgtttttgaagaccatggcctatcatcattatgcattcaagatttgagtttgaataacctcatcaagacttagatcttcttcagaagcttcaagtctcatctgcattaaagctctccattgaaccctctcacaaaagaacatatgggaaagaaatcccctcggaaaccaaagcccagccatcggagattttaagatttttcaggctttccttataatcttccttacatttgtctctttaaacacatttaagtcgacctttgagaagttgctgataagcagttatcaaacaagagttagagtaacaaaccctcccacctcgctgtgttggttggtagcttccaaggccactgtaaatgtgtatcagtgtgaacctgatccagaaacagccaggaagggagcaaagtttagtttagtctgtgaggaaactggcggctgctggtagttccatgctgtctgttcagacttcagcttggtgtaagtagttttttttaaaaaaaactattatgacattttcatataaaaaggattgtaagaataatttccatcaaagattaaatcaagtttctacctggctctaaatcttagggattagaactactgaaaagaaagtttcagcactcagcagtagttttatttttttttaatggaaaagaaagccgtgaggtgtatcagcaagtgtgctgctaaaacaggtcccgtgtgcacgaaatgatttctaatgtcttatgttgagtgcaagtgtttacagttagaaaataaaagtgagtatgtacct

SEQ ID NO: 154986 - DNA, 911 bp, Homo sapiens
  Payload ID: 10469
  Gene Symbol: MAP3K13
  Gene Name: mitogen-activated protein kinase kinase kinase 13
  ENST ID: ENST00000439882
  CDS Start-End: 86-670
gttttggagccctctcttaagtcagaactctgtcccaaaaatcttctgagtgtcatctcaggactttggttatactcatggcacgatggccaactttcaggagcacctgagctgctcctcttctccacacttacccttcagtgaaagcaaaaccttcaatggactacaagatgagctcacagctatggggaaccacccttctcccaagctgctcgaggaccagcaggaaaaggggatggtacgaacagagctaatcgagagcgtgcacagccccgtcaccacaacagtgttgacgagcgtaagtgaggattccagggaccagtttgagaacagcgttcttcagctaagggaacacgatgaatcagagacggcggtgtctcaggggaacagcaacacggtggacggagagagcacaagcggaactgaagacataaagattcagttcagcaggtcaggcagtggcagtggtgggtttcttgaaggactatttggatgcttaaggcctgtatggaatatcattgggaaggcatattccactgattacaaattgcagcagcaaggggtgtttgtactcaggccccatgttattgtattatcatggaatactgtgcccatggacaactctacgaggtcttacgagctggcaggaagatcacacctcgattgctagtagactggtccacaggaattgcaagtggaatgaattatttgcacctccataaaattattcatcgtgatctcaaatcacctaatgttttagtgacccacacagatgcggtaaaaatttcagattttggtacatctaaggaactcagtgacaaaagtaccaagatgtcatttgctggcacggtcgcatggatggcgccagaggtgatacggaatgaacctgtctctgaaaaagttgatatatg

SEQ ID NO: 154987 - DNA, 3025 bp, Homo sapiens
  Payload ID: 10469
  Gene Symbol: MAP3K13
  Gene Name: mitogen-activated protein kinase kinase kinase 13
  Uniprot ID: O43283
  ENST ID: ENST00000443863
  CDS Start-End: 202-2670
agtttagtctgtgaggaaactggcggctgctggtagttccatgctgtctgttcagacttcagcttggtggattagaactactgaaaagaaagtttcagcactcagcagtagttttatttttttttaatggaaaagaaagccgtgaggtgtatcagcaagtgtgctgctaaaacaggtcccgtgtgcacgaaatgatttctaatgtcttatgttgagtgcaagtgtttacagttagaaaataaaaatacttgggaagtgccatttgaggagatctcagagctgcagtggctgggtagtggagcccaaggagcggtcttcttgggcaagttccgggcggaagaggtggccatcaagaaagtgagagaacagaatgagacggatatcaagcatttgaggaagttgaagcaccctaacatcatcgcattcaagggtgtttgtactcaggccccatgttattgtattatcatggaatactgtgcccatggacaactctacgaggtcttacgagctggcaggaagatcacacctcgattgctagtagactggtccacaggaattgcaagtggaatgaattatttgcacctccataaaattattcatcgtgatctcaaatcacctaatgttttagtgacccacacagatgcggtaaaaatttcagattttggtacatctaaggaactcagtgacaaaagtaccaagatgtcatttgctggcacggtcgcatggatggcgccagaggtgatacggaatgaacctgtctctgaaaaagttgatatatggtcttttggagtggtgctttgggagctgctgacaggagagatcccttacaaagatgtagattcttcagccattatctggggtgttggaagcaacagcctccaccttccagttccttccacttgccctgatggattcaaaatccttatgaaacagacgtggcagagtaaacctcgaaaccgaccttcttttcggcagacactcatgcatttagacattgcctctgcagatgtacttgccaccccacaagaaacttacttcaagtctcaggctgaatggagagaagaagtgaaaaaacattttgagaagatcaaaagtgaaggaacttgtatacaccggttagatgaagaactgattcgaaggcgcagagaagagctcaggcatgcgctggatattcgtgaacactatgagcggaagcttgagcgggcgaataatttatacatggaattgagtgccatcatgctgcagctagaaatgcgggagaaggagctcattaagcgtgagcaagcagtggaaaagaagtatcctgggacctacaaacgacaccctgttcgtcctatcatccatcccaatgccatggagaaactcatgaaaaggaaaggagtgcctcacaaatctgggatgcagaccaaacggccagacttgttgagatcagaagggatccccaccacagaagtggctcccactgcatcccctttgtccggaagtcccaaaatgtccacttctagcagcaagagccgatatcgaagcaaaccacgccaccgccgagggaatagcagaggcagccatagtgactttgccgcaatcttgaaaaaccagccagcccaggaaaattcaccccatcccacttacctgcaccaagctcaatcccaatacccttctcttcatcaccataattctctgcagcagcaataccagcagccccctcctgccatgtcccagagtcaccatcccagactcaatatgcacggacaggacatagcaacctgcgccaacaacctgaggtatttcggcccagcagcagccctgcggagcccactcagcaaccatgctcagagacagctgcccggctcgagccctgacctcatctccacagccatggctgcagactgctggagaagttctgagcctgacaagggccaagctggtccctggggctgttgccaggctgacgcttatgacccctgccttcagtgcaggccagaacagtatgggtccttagacataccctctgctgagccagtggggaggagccctgacctttccaagtcaccagcacataatcctctcttggaaaacgcccagagttctgagaaaacggaagaaaatgaattcagcggctgtaggtctgagtcatccctcggcacctctcatctcggcacccctccagcgctacctcgaaaaacaaggcctctgcagaagagtggagatgactcctcagaagaggaagaaggggaagtagatagtgaagttgaatttccacgaagacagaggccccatcgctgtatcagcagctgccagtcatattcaacctttagctctgagaatttctctgtgtctgatggagaagagggaaataccagtgaccactcaaacagtcctgatgagttagctgataaacttgaagaccgcttggcagagaagctagacgacctgctgtcccagacgccagagattcccattgacatatcctcacactcggatgggctctctgacaaggagtgtgccgtgcgccgtgtgaagactcagatgtctctgggcaagctgtgtgtggaggaacgtggctatgagaaccccatgcagtttgaagaatcggactgtgactcttcagatggggagtgttctgatgccacagttaggaccaataaacactacagctctgctacctggtaatgaaggaatacacatcctgaagatctcgtgactatactggcatttcagatccaccccacccccagactcatcccactctctcccagcattttgtctgggaagagagactaccccatctttaccaccccctagaaatgagctgcaataacaggaacatgagacttcgcaaatctctggaaaataatatccaaatgaaattaagtctcactgaacatttcaatcaagaatggcagggatctattttattgaatattctagctactgtaacattgatatttatttttgtttgacattttaacactttgtactgcaaagagtgaactatatatgagatagagagacaataatttcttgc

SEQ ID NO: 154988 - DNA, 2737 bp, Homo sapiens
  Payload ID: 10469
  Gene Symbol: MAP3K13
  Gene Name: mitogen-activated protein kinase kinase kinase 13
  Uniprot ID: O43283
  ENST ID: ENST00000446828
  CDS Start-End: 165-2444
acctggttgtggagggtgacgccatgggtggggcggagcgtctgggatgcgctgggagcctaggatccccgacagttttgcagaacactgaaatctatggactctaaaatggacttcatttaaagaaacccacggaccattaatggacaaaaacatgagtcaatatgtattgtggcattcaaatcctagcactctgggagaggggtgtttgtactcaggccccatgttattgtattatcatggaatactgtgcccatggacaactctacgaggtcttacgagctggcaggaagatcacacctcgattgctagtagactggtccacaggaattgcaagtggaatgaattatttgcacctccataaaattattcatcgtgatctcaaatcacctaatgttttagtgacccacacagatgcggtaaaaatttcagattttggtacatctaaggaactcagtgacaaaagtaccaagatgtcatttgctggcacggtcgcatggatggcgccagaggtgatacggaatgaacctgtctctgaaaaagttgatatatggtcttttggagtggtgctttgggagctgctgacaggagagatcccttacaaagatgtagattcttcagccattatctggggtgttggaagcaacagcctccaccttccagttccttccacttgccctgatggattcaaaatccttatgaaacagacgtggcagagtaaacctcgaaaccgaccttcttttcggcagacactcatgcatttagacattgcctctgcagatgtacttgccaccccacaagaaacttacttcaagtctcaggctgaatggagagaagaagtgaaaaaacattttgagaagatcaaaagtgaaggaacttgtatacaccggttagatgaagaactgattcgaaggcgcagagaagagctcaggcatgcgctggatattcgtgaacactatgagcggaagcttgagcgggcgaataatttatacatggaattgagtgccatcatgctgcagctagaaatgcgggagaaggagctcattaagcgtgagcaagcagtggaaaagaagtatcctgggacctacaaacgacaccctgttcgtcctatcatccatcccaatgccatggagaaactcatgaaaaggaaaggagtgcctcacaaatctgggatgcagaccaaacggccagacttgttgagatcagaagggatccccaccacagaagtggctcccactgcatcccctttgtccggaagtcccaaaatgtccacttctagcagcaagagccgatatcgaagcaaaccacgccaccgccgagggaatagcagaggcagccatagtgactttgccgcaatcttgaaaaaccagccagcccaggaaaattcaccccatcccacttacctgcaccaagctcaatcccaatacccttctcttcatcaccataattctctgcagcagcaataccagcagccccctcctgccatgtcccagagtcaccatcccagactcaatatgcacggacaggacatagcaacctgcgccaacaacctgaggtatttcggcccagcagcagccctgcggagcccactcagcaaccatgctcagagacagctgcccggctcgagccctgacctcatctccacagccatggctgcagactgctggagaagttctgagcctgacaagggccaagctggtccctggggctgttgccaggctgacgcttatgacccctgccttcagtgcaggccagaacagtatgggtccttagacataccctctgctgagccagtggggaggagccctgacctttccaagtcaccagcacataatcctctcttggaaaacgcccagagttctgagaaaacggaagaaaatgaattcagcggctgtaggtctgagtcatccctcggcacctctcatctcggcacccctccagcgctacctcgaaaaacaaggcctctgcagaagagtggagatgactcctcagaagaggaagaaggggaagtagatagtgaagttgaatttccacgaagacagaggccccatcgctgtatcagcagctgccagtcatattcaacctttagctctgagaatttctctgtgtctgatggagaagagggaaataccagtgaccactcaaacagtcctgatgagttagctgataaacttgaagaccgcttggcagagaagctagacgacctgctgtcccagacgccagagattcccattgacatatcctcacactcggatgggctctctgacaaggagtgtgccgtgcgccgtgtgaagactcagatgtctctgggcaagctgtgtgtggaggaacgtggctatgagaaccccatgcagtttgaagaatcggactgtgactcttcagatggggagtgttctgatgccacagttaggaccaataaacactacagctctgctacctggtaatgaaggaatacacatcctgaagatctcgtgactatactggcatttcagatccaccccacccccagactcatcccactctctcccagcattttgtctgggaagagagactaccccatctttaccaccccctagaaatgagctgcaataacaggaacatgagacttcgcaaatctctggaaaataatatccaaatgaaattaagtctcactgaacatttcaatcaagaatggcagggatctattttattgaatattctagctactgtaacattgatatttatttttgtttgacat

SEQ ID NO: 154989 - DNA, 526 bp, Homo sapiens
  Payload ID: 10469
  Gene Symbol: MAP3K13
  Gene Name: mitogen-activated protein kinase kinase kinase 13
  ENST ID: ENST00000454237
  CDS Start-End: 184-306
aggtaacctgcgggcggatctgaacggggggcgagggtggcagctggagttgatggcctagatcgctcggggccctaagcgcgggtggacacagttttgcagaacactgaaatctatggactctaaaatggacttcatttaaagaaacccacggaccattaatggacaaaaacatgagtcaatatgtattgtggcattcaaatcctagcactctgggagagcatcaagtaccacgtttttgaagaccatggcctatcatcattatgcattcaagatttgagtttgaataacctcatcaagacttagatcttcttcagaagcttcaagtctcatctgcattaaagctctccattgaaccctctcacaaaagtacaagcttaaaggggctaaaatccattaatacattccattttatatcccttcctctgacttctcttcaatttccttggcctctagggtccttcatattgcttacgttcctttagactagagccaaggagacagtgctttccaaaaaaaaaaaaaa

SEQ ID NO: 154990 - DNA, 740 bp, Homo sapiens
  Payload ID: 10469
  Gene Symbol: MAP3K13
  Gene Name: mitogen-activated protein kinase kinase kinase 13
  ENST ID: ENST00000420577
  CDS Start-End: 1-740
gtggccatcaagaaagtgagagaacagaatgagacggatatcaagcatttgaggaagttgaagcaccctaacatcatcgcattcaatgttttagtgacccacacagatgcggtaaaaatttcagattttggtacatctaaggaactcagtgacaaaagtaccaagatgtcatttgctggcacggtcgcatggatggcgccagaggtgatacggaatgaacctgtctctgaaaaagttgatatatggtcttttggagtggtgctttgggagctgctgacaggagagatcccttacaaagatgtagattcttcagccattatctggggtgttggaagcaacagcctccaccttccagttccttccacttgccctgatggattcaaaatccttatgaaacagacgtggcagagtaaacctcgaaaccgaccttcttttcggcagacactcatgcatttagacattgcctctgcagatgtacttgccaccccacaagaaacttacttcaagtctcaggctgaatggagagaagaagtgaaaaaacattttgagaagatcaaaagtgaaggaacttgtatacaccggttagatgaagaactgattcgaaggcgcagagaagagctcaggcatgcgctggatattcgtgaacactatgagcggaagcttgagcgggcgaataatttatacatggaattgagtgccatcatgctgcagctagaaatgcgggagaaggagctcattaa

SEQ ID NO: 154991 - DNA, 4460 bp, Homo sapiens
  Payload ID: 10470
  Gene Symbol: MAP3K14
  Gene Name: mitogen-activated protein kinase kinase kinase 14
  Uniprot ID: Q99558
  ENST ID: ENST00000344686
  CDS Start-End: 102-2945
agcggtcggcggccggcggcgggagatcgcgggcgagcggagcgcaacactcgcttggttggggagatcggcgcttggccggatgagcacaagcctgggagatggcagtgatggaaatggcctgcccaggtgcccctggctcagcagtggggcagcagaaggaactccccaaagccaaggagaagacgccgccactggggaagaaacagagctccgtctacaagcttgaggccgtggagaagagccctgtgttctgcggaaagtgggagatcctgaatgacgtgattaccaagggcacagccaaggaaggctccgaggcagggccagctgccatctctatcatcgcccaggctgagtgtgagaatagccaagagttcagccccaccttttcagaacgcattttcatcgctgggtccaaacagtacagccagtccgagagtcttgatcagatccccaacaatgtggcccatgctacagagggcaaaatggcccgtgtgtgttggaagggaaagcgtcgcagcaaagcccggaagaaacggaagaagaagagctcaaagtccctggctcatgcaggagtggccttggccaaacccctccccaggacccctgagcaggagagctgcaccatcccagtgcaggaggatgagtctccactcggcgccccatatgttagaaacaccccgcagttcaccaagcctctgaaggaaccaggccttgggcaactctgttttaagcagcttggcgagggcctacggccggctctgcctcgatcagaactccacaaactgatcagccccttgcaatgtctgaaccacgtgtggaaactgcaccacccccaggacggaggccccctgcccctgcccacgcaccccttcccctatagcagactgcctcatcccttcccattccaccctctccagccctggaaacctcaccctctggagtccttcctgggcaaactggcctgtgtagacagccagaaacccttgcctgacccacacctgagcaaactggcctgtgtagacagtccaaagcccctgcctggcccacacctggagcccagctgcctgtctcgtggtgcccatgagaagttttctgtggaggaatacctagtgcatgctctgcaaggcagcgtgagctcaggccaggcccacagcctgaccagcctggccaagacctgggcagcaaggggctccagatcccgggagcccagccccaaaactgaggacaacgagggtgtcctgctcactgagaaactcaagccagtggattatgagtaccgagaagaagtccactgggccacgcaccagctccgcctgggcagaggctccttcggagaggtgcacaggatggaggacaagcagactggcttccagtgcgctgtcaaaaaggtgcggctggaagtatttcgggcagaggagctgatggcatgtgcaggattgacctcacccagaattgtccctttgtatggagctgtgagagaagggccttgggtcaacatcttcatggagctgctggaaggtggctccctgggccagctggtcaaggagcagggctgtctcccagaggaccgggccctgtactacctgggccaggccctggagggtctggaatacctccactcacgaaggattctgcatggggacgtcaaagctgacaacgtgctcctgtccagcgatgggagccacgcagccctctgtgactttggccatgctgtgtgtcttcaacctgatggcctgggaaagtccttgctcacaggggactacatccctggcacagagacccacatggctccggaggtggtgctgggcaggagctgcgacgccaaggtggatgtctggagcagctgctgtatgatgctgcacatgctcaacggctgccacccctggactcagttcttccgagggccgctctgcctcaagattgccagcgagcctccgcctgtgagggagatcccaccctcctgcgcccctctcacagcccaggccatccaagaggggctgaggaaagagcccatccaccgcgtgtctgcagcggagctgggagggaaggtgaaccgggcactacagcaagtgggaggtctgaagagcccttggaggggagaatataaagaaccaagacatccaccgccaaatcaagccaattaccaccagaccctccatgcccagccgagagagctttcgccaagggccccagggccccggccagctgaggagacaacaggcagagcccctaagctccagcctcctctcccaccagagcccccagagccaaacaagtctcctcccttgactttgagcaaggaggagtctgggatgtgggaacccttacctctgtcctccctggagccagcccctgccagaaaccccagctcaccagagcggaaagcaaccgtcccggagcaggaactgcagcagctggaaatagaattattcctcaacagcctgtcccagccattttctctggaggagcaggagcaaattctctcgtgcctcagcatcgacagcctctccctgtcggatgacagtgagaagaacccatcaaaggcctctcaaagctcgcgggacaccctgagctcaggcgtacactcctggagcagccaggccgaggctcgaagctccagctggaacatggtgctggcccgggggcggcccaccgacaccccaagctatttcaatggtgtgaaagtccaaatacagtctcttaatggtgaacacctgcacatccgggagttccaccgggtcaaagtgggagacatcgccactggcatcagcagccagatcccagctgcagccttcagcttggtcaccaaagacgggcagcctgttcgctacgacatggaggtgccagactcgggcatcgacctgcagtgcacactggcccctgatggcagcttcgcctggagctggagggtcaagcatggccagctggagaacaggccctaaccctgccctccaccgccggctccacactgccggaagcagccttcctgctcggtgcacgatgctgccctgaaacacaggctcagccgttcccagggatctgccagcccccggctcagcagtgggaccagggcctcgcagcagcaaggtgggggcaagcagaatgcctcccaggatttcacacctgagccctgccccaccctgctgagaaaacactccgccacgtgaagagacagaggaggatggcaggagttacctcgggaaacaaacaggatcttctctgccctgctccagtcgagttggcctgacccgcttggatcagtgaccatttgctggcagacaggggagagcagcttccagcctgggtcagaaggggtgggcgagcccctcggcccctcaccctccaggctgctgtgagagtgtcaagtgtgtaagggcccaaactcaggttcagtgcagaaccaggtcagcaggtatgcccgcccgtaggttaagggggccctctaaaccccttgcctggcctcacctggccagctcaccccttttgggtgtaggggaaaagaatgcctgaccctgggaaggctccctggtagaatacaccacacttttcaggttgttgcaacacaggtcctgagttgacctctggttcagccaaggaccaaagaaggtgtgtaagtgaagtggttctcagtccccagacatgtgcccctttgctgctggctaccactcttccccagagcagcaggccccgagccccttcaggcccagcactgccccagactcgctggcactcagttccctcatctgtaaaggtgaagggtgatgcaggatatgcctgacaggaacagtctgtggatggacatgatcagtgctaaggaaagcagcagagagagacgctccggcgccccagccccactatcagtgtccagcgtgctggttccccagagcacagctcagcatcacactgacactcaccctgccctgcccctggccagagggtactgccgacggcactttgcactctgatgacctcaaagcactttcatggctgccctctggcagggcagggcagggcagtgacactgtaggagcatagcaagccaggagatggggtgaagggacacagtcttgagctgtccacatgcatgtgactcctcaaacctcttccagatttctctaagaatagcacccccttccccattgccccagcttagcctcttctcccaggggagctactcaggactcacgtagcattaaatcagctgtgaatcgtcagggggtgtctgctagcctcaacctcctggggcaggggacgccgagactccgtgggagaagctcattcccacatcttgccaagacagcctttgtccagctgtccacattgagtcagactgctcccggggagagagccccggcccccagcacataaagaactgcagccttggtactgcagagtctgggttgtagagaactctttgtaagcaataaagtttggggtgatgacaaatgtttccaggc

SEQ ID NO: 154992 - DNA, 1049 bp, Homo sapiens
  Payload ID: 10470
  Gene Symbol: MAP3K14
  Gene Name: mitogen-activated protein kinase kinase kinase 14
  ENST ID: ENST00000617331
  CDS Start-End: 79-552
agatcgcgggcgagcggagcgcaacactcgcttggttggggagatcggcgcttggccggatgagcacaagcctgggagatggcagtgatggaaatggcctgcccaggtgcccctggctcagcagtggggcagcagaaggaactccccaaagccaaggagaagacgccgccactggggaagaaacagagctccgtctacaagcttgaggccgtggagaagagccctgtgttctgcggaaagtgggagatcctgaatgacgtgattaccaagggcacagccaaggaaggctccgaggcagggccagctgccatctctatcatcgcccaggctgagtgtgagaatagccaagagttcagccccaccttttcagaacgcattttcatcgctgggtccaaacagtacagccagtccgagagtcttgatcagatccccaacaatgtggcccatgctacagagggcaaaatggcccgtgtgtgttggaagggaaagcgtcgcagcaaagcccggaagaaacggaagaagaagagctcaaaaccagcctgggcaacatagcgagatcgcatgtctacaaaagagtaaaaaatagaaataaaaaagaaatttcaaaagtctaaaaagatatctgtcaaagggcagttacctctgagaataggactggggaatggagacttttgctttttttggtatcatttgcattcttttataatgagcctatatttgtttgcaattaaaagtaagatcagggccgagcacggtggctcacacctgtaatcccagcactttgggaggctgaggcaggtggatcacaaggttaggagttcaagaccagcctctggccaagatggtgaaaccccatctctactaaaaatacaaatattagccgggtgtggtggcaggtgcctgtaatcccagctactcaggaggctgaggcagagaattgcttgaacctgggaggcggaggttgcagtgagccaagatcacgccacagcactccagcctgggtgacagagcaagactcagtctcaaaaaaaaaaaaaaaaaaaaaagaa

SEQ ID NO: 154993 - DNA, 4583 bp, Homo sapiens
  Payload ID: 10470
  Gene Symbol: MAP3K14
  Gene Name: mitogen-activated protein kinase kinase kinase 14
  Uniprot ID: Q99558
  ENST ID: ENST00000376926
  CDS Start-End: 232-3075
accgggggactgtgccgtgtggaacgtgtagctgttgagaggtggactctgttaccattgaggatgtttggaggatgagtatgtgtggcagaggcacacataaacaggcagagaccctttgcccctgcctttctcccccaacccaaggctgacctgtgttctcccaggtctgggattctaagtgacctgctctgtgtttggtctctctcaggatgagcacaagcctgggagatggcagtgatggaaatggcctgcccaggtgcccctggctcagcagtggggcagcagaaggaactccccaaagccaaggagaagacgccgccactggggaagaaacagagctccgtctacaagcttgaggccgtggagaagagccctgtgttctgcggaaagtgggagatcctgaatgacgtgattaccaagggcacagccaaggaaggctccgaggcagggccagctgccatctctatcatcgcccaggctgagtgtgagaatagccaagagttcagccccaccttttcagaacgcattttcatcgctgggtccaaacagtacagccagtccgagagtcttgatcagatccccaacaatgtggcccatgctacagagggcaaaatggcccgtgtgtgttggaagggaaagcgtcgcagcaaagcccggaagaaacggaagaagaagagctcaaagtccctggctcatgcaggagtggccttggccaaacccctccccaggacccctgagcaggagagctgcaccatcccagtgcaggaggatgagtctccactcggcgccccatatgttagaaacaccccgcagttcaccaagcctctgaaggaaccaggccttgggcaactctgttttaagcagcttggcgagggcctacggccggctctgcctcgatcagaactccacaaactgatcagccccttgcaatgtctgaaccacgtgtggaaactgcaccacccccaggacggaggccccctgcccctgcccacgcaccccttcccctatagcagactgcctcatcccttcccattccaccctctccagccctggaaacctcaccctctggagtccttcctgggcaaactggcctgtgtagacagccagaaacccttgcctgacccacacctgagcaaactggcctgtgtagacagtccaaagcccctgcctggcccacacctggagcccagctgcctgtctcgtggtgcccatgagaagttttctgtggaggaatacctagtgcatgctctgcaaggcagcgtgagctcaggccaggcccacagcctgaccagcctggccaagacctgggcagcaaggggctccagatcccgggagcccagccccaaaactgaggacaacgagggtgtcctgctcactgagaaactcaagccagtggattatgagtaccgagaagaagtccactgggccacgcaccagctccgcctgggcagaggctccttcggagaggtgcacaggatggaggacaagcagactggcttccagtgcgctgtcaaaaaggtgcggctggaagtatttcgggcagaggagctgatggcatgtgcaggattgacctcacccagaattgtccctttgtatggagctgtgagagaagggccttgggtcaacatcttcatggagctgctggaaggtggctccctgggccagctggtcaaggagcagggctgtctcccagaggaccgggccctgtactacctgggccaggccctggagggtctggaatacctccactcacgaaggattctgcatggggacgtcaaagctgacaacgtgctcctgtccagcgatgggagccacgcagccctctgtgactttggccatgctgtgtgtcttcaacctgatggcctgggaaagtccttgctcacaggggactacatccctggcacagagacccacatggctccggaggtggtgctgggcaggagctgcgacgccaaggtggatgtctggagcagctgctgtatgatgctgcacatgctcaacggctgccacccctggactcagttcttccgagggccgctctgcctcaagattgccagcgagcctccgcctgtgagggagatcccaccctcctgcgcccctctcacagcccaggccatccaagaggggctgaggaaagagcccatccaccgcgtgtctgcagcggagctgggagggaaggtgaaccgggcactacagcaagtgggaggtctgaagagcccttggaggggagaatataaagaaccaagacatccaccgccaaatcaagccaattaccaccagaccctccatgcccagccgagagagctttcgccaagggccccagggccccggccagctgaggagacaacaggcagagcccctaagctccagcctcctctcccaccagagcccccagagccaaacaagtctcctcccttgactttgagcaaggaggagtctgggatgtgggaacccttacctctgtcctccctggagccagcccctgccagaaaccccagctcaccagagcggaaagcaaccgtcccggagcaggaactgcagcagctggaaatagaattattcctcaacagcctgtcccagccattttctctggaggagcaggagcaaattctctcgtgcctcagcatcgacagcctctccctgtcggatgacagtgagaagaacccatcaaaggcctctcaaagctcgcgggacaccctgagctcaggcgtacactcctggagcagccaggccgaggctcgaagctccagctggaacatggtgctggcccgggggcggcccaccgacaccccaagctatttcaatggtgtgaaagtccaaatacagtctcttaatggtgaacacctgcacatccgggagttccaccgggtcaaagtgggagacatcgccactggcatcagcagccagatcccagctgcagccttcagcttggtcaccaaagacgggcagcctgttcgctacgacatggaggtgccagactcgggcatcgacctgcagtgcacactggcccctgatggcagcttcgcctggagctggagggtcaagcatggccagctggagaacaggccctaaccctgccctccaccgccggctccacactgccggaagcagccttcctgctcggtgcacgatgctgccctgaaacacaggctcagccgttcccagggatctgccagcccccggctcagcagtgggaccagggcctcgcagcagcaaggtgggggcaagcagaatgcctcccaggatttcacacctgagccctgccccaccctgctgagaaaacactccgccacgtgaagagacagaggaggatggcaggagttacctcgggaaacaaacaggatcttctctgccctgctccagtcgagttggcctgacccgcttggatcagtgaccatttgctggcagacaggggagagcagcttccagcctgggtcagaaggggtgggcgagcccctcggcccctcaccctccaggctgctgtgagagtgtcaagtgtgtaagggcccaaactcaggttcagtgcagaaccaggtcagcaggtatgcccgcccgtaggttaagggggccctctaaaccccttgcctggcctcacctggccagctcaccccttttgggtgtaggggaaaagaatgcctgaccctgggaaggctccctggtagaatacaccacacttttcaggttgttgcaacacaggtcctgagttgacctctggttcagccaaggaccaaagaaggtgtgtaagtgaagtggttctcagtccccagacatgtgcccctttgctgctggctaccactcttccccagagcagcaggccccgagccccttcaggcccagcactgccccagactcgctggcactcagttccctcatctgtaaaggtgaagggtgatgcaggatatgcctgacaggaacagtctgtggatggacatgatcagtgctaaggaaagcagcagagagagacgctccggcgccccagccccactatcagtgtccagcgtgctggttccccagagcacagctcagcatcacactgacactcaccctgccctgcccctggccagagggtactgccgacggcactttgcactctgatgacctcaaagcactttcatggctgccctctggcagggcagggcagggcagtgacactgtaggagcatagcaagccaggagatggggtgaagggacacagtcttgagctgtccacatgcatgtgactcctcaaacctcttccagatttctctaagaatagcacccccttccccattgccccagcttagcctcttctcccaggggagctactcaggactcacgtagcattaaatcagctgtgaatcgtcagggggtgtctgctagcctcaacctcctggggcaggggacgccgagactccgtgggagaagctcattcccacatcttgccaagacagcctttgtccagctgtccacattgagtcagactgctcccggggagagagccccggcccccagcacataaagaactgcagccttggtactgcagagtctgggttgtagagaactctttgtaagcaataaagtttggggtgatgacaaatgtt

SEQ ID NO: 154994 - DNA, 4012 bp, Homo sapiens
  Payload ID: 10471
  Gene Symbol: MAP3K15
  Gene Name: mitogen-activated protein kinase kinase kinase 15
  Uniprot ID: Q6ZN16
  ENST ID: ENST00000338883
  CDS Start-End: 1-3942
atggagagcggcggtgggaatgctccggccggggccctcggggcggcgagcgagtcccctcagtgcccgccgccgccgggggtggagggcgcggccgggccggcggagcccgacggggcggcggagggcgcggcaggcggcagcggcgagggcgagagtgggggcgggccgcggcgggctctgcgggcagtatacgtgcgcagtgagagctcccagggcggcgcggccggcggcccggaggctggggcgcggcagtgcctgctgcgggcctgcgaggccgagggcgctcacctcacctccgtgcccttcggggagctggacttcggggagacggccgtgctcgacgccttctacgacgcagatgttgctgtggtagacatgagcgatgtctccagacagccttccctcttctaccatcttggagtccgagaaagctttgacatggccaataatgtgatcttgtaccatgacaccgatgccgacactgctctctctttgaaggacatggtaactcaaaaaaacacagcatccagtggaaattattatttcatcccatacatcgtgacaccgtgcgctgattatttttgctgcgagagtgatgcccagagacgagcctccgagtacatgcagcccaactgggacaacatcctgggcccgctgtgcatgcctttggtggacaggttcattagcctccttaaggacatccacgtgacctcatgtgtttattacaaagaaaccttgttaaatgacatccggaaagccagagagaaataccaaggtgaggaactggcgaaggagctagctcggatcaagctccgcatggataatactgaggttctgacctcagacatcatcattaacttactcctgtcctaccgtgatatccaggactatgatgcgatggtgaagctggtggaaacactggagatgctgcctacgtgtgatttggccgatcagcataacattaaattccactatgcgtttgcactgaataggagaaacagcacaggtgaccgtgagaaggctctgcagatcatgctccaggttctgcagagctgtgatcacccgggccccgacatgttctgcctgtgtgggaggatctacaaggacatcttcttggattcagactgcaaagatgacaccagccgcgacagcgccattgagtggtatcgcaaagggtttgaactccagtcatccctctattcgggaattaatcttgcagttttgctgattgttgctggacaacaatttgaaacttccttggaactaaggaaaataggtgtccggctgaacagtttgttgggaagaaaagggagcttggagaaaatgaacaattactgggatgtgggtcagttcttcagcgtcagcatgctggcccatgatgtcgggaaagccgtccaggcagcagagaggttgttcaaactgaaacctccagtctggtacctgcgatcattagttcagaacttgttactaattcggcgcttcaagaaaaccattattgaacactcgcccaggcaagagcggctgaacttctggttagatataatttttgaggcaacaaatgaagtcactaatggactcagatttccagttctggtcatagagccaaccaaagtgtaccagccttcttatgtttccataaacaatgaagccgaggagagaacagtttctttatggcatgtctcacccacagaaatgaaacagatgcacgaatggaattttacagcctcttccataaagggaataagcctatcaaagtttgatgaaaggtgttgttttctttatgtccatgataattctgatgactttcaaatctacttttccaccgaagagcagtgcagtagatttttctctttggtcaaagagatgataaccaatacagcaggcagtacggtggagctggagggagagaccgatggagacaccttggagtatgagtatgaccatgatgcaaatggtgagagagttgtcttggggaaaggcacgtatgggattgtgtatgctggccgagatctgagcaatcaagtgcgaatagccatcaaagaaatcccggagagagatagcaggtattctcagcctctgcacgaggagatagccctgcacaagtaccttaagcaccgcaatatcgttcagtacctgggctctgtttcagagaacggctacattaagatatttatggagcaggtgcctggaggaagcctttctgctcttctgcgatccaaatgggggccgatgaaggaaccgacaatcaagttttacaccaaacagatcctggagggccttaagtatcttcatgaaaaccagatcgtgcacagagacataaagggcgataatgttctggtgaacacctacagcggagtggtgaaaatctccgattttggaacctcgaaacgtcttgcgggtgtgaacccctgcacagagacttttactggcaccctgcagtacatggcacctgagataattgaccaagggcctcgcggatatggtgccccagccgatatctggtccctgggctgcaccatcattgagatggccaccagcaagcctccgttccatgagcttggtgagccgcaggcagccatgttcaaagtgggcatgtttaagatccaccctgagattccagaagccctttcagctgaagcccgagccttcattttatcctgtttcgagcctgacccccacaaacgtgccaccactgctgagctactgagagagggtttcttaaggcaggtgaacaagggcaagaagaaccgaattgccttcaagccctcagaaggtccccgcggtgtcgtcctggccctgcccacacagggagagcccatggccaccagcagcagcgagcacggctctgtctccccagactccgacgcccagcctgacgcactctttgagaggacccgggcgcccaggcaccaccttggccacctcctcagtgttccagacgagagctcagccttggaagaccggggcttggcctcgtccccggaggacagggaccagggcctcttcctgctacgcaaggacagtgagcgccgtgccatcctgtacaaaatcctctgggaggagcagaaccaggtggcttccaacctgcaggagtgtgtggcccagagttccgaagagttgcatctctcagttggacacatcaagcaaatcattgggatcctgagggacttcatccgctccccagagcaccgggtgatggcgaccacaatatcaaagctcaaggtggacctggactttgacagctcgtccatcagtcagattcacctggtgctgttcggatttcaggatgccgtaaataaaattttgaggaaccacttaattaggccccactggatgttcgcgatggacaacatcatccgccgagcggtgcaggccgcggtcaccattctcatcccagagctccgagcccactttgagcctacctgtgagactgaaggggtagataaggacatggatgaagcggaagagggctatcccccagccaccggacctggccaggaggcccagccccaccagcagcacctgagcctccagctgggtgagctcagacaggagaccaacagacttttggaacacctagttgaaaaagagagagagtaccagaatcttctgcggcaaactctagaacagaaaactcaagaattgtatcaccttcagttaaaattaaaatcgaattgtattacagagaacccagcaggcccctacgggcagagaacagataaagagcttatagactggttgcggctgcaaggagctgatgcaaagacaattgaaaagattgttgaagagggttatacactttcggatattcttaatgagatcactaaggaagatctaagataccttcgactacggggtggtctcctctgcagactctggagtgcggtctcccagtacagaagggctcaggaggcctcagaaaccaaagacaaggcttgataccaatcagctaagctgtggcagagtgtcccaccacgctacatgttttgttaaagcttctgttagtgta

SEQ ID NO: 154995 - DNA, 3961 bp, Homo sapiens
  Payload ID: 10471
  Gene Symbol: MAP3K15
  Gene Name: mitogen-activated protein kinase kinase kinase 15
  ENST ID: ENST00000359173
  CDS Start-End: 1-851
atgacatccggaaagccagagagaaataccaaggtgaggaactggcgaaggagctagctcggatcaagctccgcatggataatactgaggttctgacctcagacatcatcattaacttactcctgtcctaccgtgatatccaggactatgatgcgatggtgaagctggtggaaacactggagatgctgcctacgtgtgatttggccgatcagcataacattaaattccactatgcgtttgcactgaataggagaaacagcacaggtgaccgtgagaaggctctgcagatcatgctccaggttctgcagagctgtgatcacccgggccccgacatgttctgcctgtgtgggaggatctacaaggacatcttcttggattcagactgcaaagatgacaccagccgcgacagcgccattgagtggtatcgcaaagggtttgaactccagtcatccctctattcgggaattaatcttgcagttttgctgattgttgctggacaacaatttgaaacttccttggaactaaggaaaataggtgtccggctgaacagtttgttgggaagaaaagggagcttggagaaaatgaacaattactgggatgtgggtcagttcttcagcgtcagcatgctggcccatgatgtcgggaaagccgtccaggcagcagagaggttgttcaaactgaaacctccagtctggtacctgcgatcattagttcagaacttgttactaattcggcgcttcaagaaaaccattattgaacactcgcccaggcaagagcggctgaacttctggttagatataatttttgaggcaacaaatgaagtcactaatggactcagatttccattatgaaatatttcaaacctactgaaaggtacaaaaaaataatggagcagacaaccgcgtaatctctaaccaggttctggtcatagagccaaccaaagtgtaccagccttcttatgtttccataaacaatgaagccgaggagagaacagtttctttatggcatgtctcacccacagaaatgaaacagatgcacgaatggaattttacagcctcttccataaagggaataagcctatcaaagtttgatgaaaggtgttgttttctttatgtccatgataattctgatgactttcaaatctacttttccaccgaagagcagtgcagtagatttttctctttggtcaaagagatgataaccaatacagcaggcagtacggtggagctggagggagagaccgatggagacaccttggagtatgagtatgaccatgatgcaaatggtgagagagttgtcttggggaaaggcacgtatgggattgtgtatgctggccgagatctgagcaatcaagtgcgaatagccatcaaagaaatcccggagagagatagcaggtattctcagcctctgcacgaggagatagccctgcacaagtaccttaagcaccgcaatatcgttcagtacctgggctctgtttcagagaacggctacattaagatatttatggagcaggtgcctggaggaagcctttctgctcttctgcgatccaaatgggggccgatgaaggaaccgacaatcaagttttacaccaaacagatcctggagggccttaagtatcttcatgaaaaccagatcgtgcacagagacataaagggcgataatgttctggtgaacacctacagcggagtggtgaaaatctccgattttggaacctcgaaacgtcttgcgggtgtgaacccctgcacagagacttttactggcaccctgcagtacatggcacctgagataattgaccaagggcctcgcggatatggtgccccagccgatatctggtccctgggctgcaccatcattgagatggccaccagcaagcctccgttccatgagcttggtgagccgcaggcagccatgttcaaagtgggcatgtttaagatccaccctgagattccagaagccctttcagctgaagcccgagccttcattttatcctgtttcgagcctgacccccacaaacgtgccaccactgctgagctactgagagagggtttcttaaggcaggtgaacaagggcaagaagaaccgaattgccttcaagccctcagaaggtccccgcggtgtcgtcctggccctgcccacacagggagagcccatggccaccagcagcagcgagcacggctctgtctccccagactccgacgcccagcctgacgcactctttgagaggacccgggcgcccaggcaccaccttggccacctcctcagtgttccagacgagagctcagccttggaagaccggggcttggcctcgtccccggaggacagggaccagggcctcttcctgctacgcaaggacagtgagcgccgtgccatcctgtacaaaatcctctgggaggagcagaaccaggtggcttccaacctgcaggagtgtgtggcccagagttccgaagagttgcatctctcagttggacacatcaagcaaatcattgggatcctgagggacttcatccgctccccagagcaccgggtgatggcgaccacaatatcaaagctcaaggtggacctggactttgacagctcgtccatcagtcagattcacctggtgctgttcggatttcaggatgccgtaaataaaattttgaggaaccacttaattaggccccactggatgttcgcgatggacaacatcatccgccgagcggtgcaggccgcggtcaccattctcatcccagagctccgagcccactttgagcctacctgtgagactgaaggggtagataaggacatggatgaagcggaagagggctatcccccagccaccggacctggccaggaggcccagccccaccagcagcacctgagcctccagctgggtgagctcagacaggagaccaacagacttttggaacacctagttgaaaaagagagagagtaccagaatcttctgcggcaaactctagaacagaaaactcaagaattgtatcaccttcagttaaaattaaaatcgaattgtattacagagaacccagcaggcccctacgggcagagaacagataaagagcttatagactggttgcggctgcaaggagctgatgcaaagacaattgaaaagattgttgaagagggttatacactttcggatattcttaatgagatcactaaggaagatctaagataccttcgactacggggtggtctcctctgcagactctggagtgcggtctcccagtacagaagggctcaggaggcctcagaaaccaaagacaaggcttgataccaatcagctaagctgtggcagagtgtcccaccacgctacatgttttgttaaagcttctgttagtgtatacacgaattccgctgtgtttacatatttaaaaatgccattgttcaattaatagtttaagaacttgttttaaatactgtcctgagtttcttttgaaacctgttatttataaacatagaactgtgtgtattgtgaaaacagtgagccttggttttgacctcccggaatattaggaaattcacttgtagtcccagctatgcaggaggctgaggtgggaggattgcttgagcccaggaggtgtggaggctgcagtgagccatgatcacaccactgcactccagcctgggcaacagagcccgaccctgtctcaaaaaaagtacacccttcagcacttgctggaatggtgaaacaaacaaggggtatttaacaaacatggaagctgggacactgcctcagaactggtatggtacttcaatttgagaaacacaaaactgatacgaatgtgccttgtagttaatgtttgatatgaacagaaaatagcttcatatttatactgaatgtgtaagtagagaaaactaagttatgtggcctttgaaatgattacaaaattggaatgattacaaaagtcttattttaaaatggaactgtcctcttgcctgataataaatattgtatcttgtag

SEQ ID NO: 154996 - DNA, 3719 bp, Homo sapiens
  Payload ID: 10472
  Gene Symbol: MAP3K19
  Gene Name: mitogen-activated protein kinase kinase kinase 19
  Uniprot ID: Q56UN5
  ENST ID: ENST00000358371
  CDS Start-End: 32-3679
ttcaaagaaacagcagcttttggacattttaatgagttctatgccaaaaccagaaagacatgctgagtcattgcttgacatttgtcatgatacaaactcttctccaactgatttgatgacagttaccaaaaatcaaaacatcatcttgcaaagcatcagcagaagtgaggagttcgaccaagatggtgactgcagtcattccacactggttaatgaagaagaagatcccagtggtggtagacaggactggcaacccaggacagaagagttttcgacctctcatatgaagtacagtggccgaagcatcaagttccttctgccaccactgtcactcttgcccacgcgatctggtgtccttactatcccccaaaatcacaagtttccaaaagaaaaagaaagaaacattccaagtctcacatcttttgtgcctaagctctcagtgtctgttcgtcaatctgatgagctcagcccatcaaacgagcctccgggagccctagttaagtcgttgatggatccgactctcaggtcttctgatggcttcatttggtcaagaaacatgtgctcttttcctaagactaaccatcacaggcaatgcctggagaaggaggaaaactggaaatccaaggaaatagaagaatgtaacaaaattgaaatcactcactttgaaaaagggcagtctttggtgtcttttgagaatttgaaggaaggcaatattcctgcagttagggaagaggatattgactgccatggtagtaaaacgcgaaaacctgaagaagagaactctcaatatctttcatcaagaaagaatgagagttcagtagccaaaaactatgaacaagatccagaaatagtatgtaccattccaagcaagttccaagaaacccagcattcagaaataactccaagccaggatgaagagatgagaaataataaagctgcttcaaaaagagtttcattacataaaaatgaagcaatggaaccaaacaatattttagaagagtgtactgtacttaaaagcttatccagtgtagtctttgatgaccccattgataaactcccagaaggttgtagcagcatggagacaaacataaaaatatcaatagcagaaagagccaaaccagaaatgagtaggatggtgcctcttatccacatcaccttccctgtggatggaagccccaaggaaccagtgatagccaaaccaagcctccaaacaagaaagggaaccattcataacaaccatagtgtcaacatacctgtacaccaagaaaatgacaagcataagatgaattcccataggagtaagttggattcaaagaccaagacaagtaagaagacacctcagaattttgtgatttctactgaaggtcccattaagcctaccatgcataaaaccagcataaaaacacaaattttcccggctttgggacttgtggaccccaggccttggcaattgcccaggtttcaaaagaaaatgccacagatagcaaagaagcaatcaactcaccggactcagaaacctaaaaagcaatcatttccttgcatctgtaaaaatccaggaacacagaagtcatgtgttcctctctctgttcaaccgacagagccaagactaaattacctagatcttaagtatagtgatatgttcaaagaaatcaattcaactgctaatggacctggaatctatgaaatgtttgggacccctgtttattgtcatgtgcgagagactgaaagggatgaaaacacgtattaccgtgagatatgttcggctccatcaggcagacgtatcaccaataaatgtcgatcttcacacagtgagaggaagagcaatatcagaacaagactttctcagaaaaaaacacatatgaaatgcccaaagacttcatttggcattaaacaagagcacaaagtcttaatttctaaagaaaagagttccaaggctgtacatagcaacctacatgacattgaaaatggtgatggtatttcagaaccagactggcagataaagtcttcaggaaatgagtttctatcttccaaagatgaaattcatcccatgaacttggctcagacacctgagcagtccatgaaacagaatgaattccctcctgtctcagatttatccattgttgaagaagtttctatggaagagtctactggtgatagagacatttctaacaatcaaatactcaccacaagcctcagagatctgcaagaacttgaagagctacatcaccagatcccatttatcccttcagaagacagctgggcagtgcccagtgagaagaattctaacaagtatgtacagcaagaaaagcagaatacagcatctcttagtaaagtaaatgccagccgaattttaactaatgatctagagtttgatagtgtttcagatcactctaaaacacttacaaatttctctttccaagcaaaacaagaaagtgcatcttcccagacatatcaatattgggtacattatttggatcatgatagtttagcaaataagtcaatcacatatcaaatgtttggaaaaaccttaagtggcacaaattcaatttcccaagaaattatggactctgtaaataatgaagaattgacagatgaactattaggttgtctagctgcagaattattagctcttgatgagaaagataacaactcttgccaaaaaatggcaaatgaaacagatcctgaaaacctaaatcttgtcctcagatggagaggaagtaccccaaaagaaatgggcagagagacaacaaaagtcaaaatacagaggcatagtagtgggctcaggatatatgacagggaggagaaatttctcatctcaaatgaaaagaagatattttctgaaaatagtttaaagtctgaagaacctatcctatggaccaagggtgagattcttggaaagggagcctacggcacagtatactgtggtctcactagtcaaggacagctaatagctgtaaaacaggtggctttggatacctctaataaattagctgctgaaaaggaataccggaaactacaggaagaagtagatttgctcaaagcactgaaacatgtcaacattgtggcctatttggggacatgcttgcaagagaacactgtgagcattttcatggagtttgttcctggtggctcaatctctagtattataaaccgttttgggccattgcctgagatggtgttctgtaaatatacgaaacaaatacttcaaggtgttgcttatctccatgagaactgtgtggtacatcgcgatatcaaaggaaataatgttatgctcatgccaactggaataataaagctgattgactttggctgtgccaggcgtttggcctgggcaggtttaaatggcacccacagtgacatgcttaagtccatgcatgggactccatattggatggccccagaagtcatcaatgagtctggctatggacggaaatcagatatctggagcattggttgtactgtgtttgagatggctacagggaagcctccactggcttccatggacaggatggccgccatgttttacatcggagcacaccgagggctgatgcctcctttaccagaccacttctcagaaaatgcagcagactttgtgcgcatgtgcctgaccagggaccagcatgagcgaccttctgctctccagctcctgaagcactccttcttggagagaagtcactgaatatacatcaagactttcttcccagttccactgcagatgc

SEQ ID NO: 154997 - DNA, 1604 bp, Homo sapiens
  Payload ID: 10472
  Gene Symbol: MAP3K19
  Gene Name: mitogen-activated protein kinase kinase kinase 19
  Uniprot ID: Q56UN5
  ENST ID: ENST00000375844
  CDS Start-End: 32-1564
ttcaaagaaacagcagcttttggacattttaatgagttctatgccaaaaccagaaagacatgctgagtcattgcttgacatttgtcatgatacaaactcttctccaactgatttgatgacagttaccaaaaatcaaaacatcatcttgcaaagcatcagcagaagtgaggagttcgaccaagatggtgactgcagtcattccacactggttaatgaagaagaagatcccagtggtggtagacaggactggcaacccaggacagaaggtgttgagatcactgtaacttttccaagagatgtcagtcctccccaagaaatgagccaagaagacttaaaagaaaagaatctgataaactcatcgcttcaagaatgggcacaagcacatgcagtttctcatccaaatgaaatagaaacggtggagctcaggaaaaagaagctgaccatgcggcccttagttttgcaaaaagaggaaagttccagggagctctgcaatgtgaacttgggctttttgctaccaagatcttgtttagaactgaacatttccaagtctgtaaccagagaagatgctcctcattttctgaaggagcagcaaagaaaatctgaagagttttcgacctctcatatgaagtacagtggccgaagcatcaagaggcatagtagtgggctcaggatatatgacagggaggagaaatttctcatctcaaatgaaaagaagatattttctgaaaatagtttaaagtctgaagaacctatcctatggaccaagggtgagattcttggaaagggagcctacggcacagtatactgtggtctcactagtcaaggacagctaatagctgtaaaacaggtggctttggatacctctaataaattagctgctgaaaaggaataccggaaactacaggaagaagtagatttgctcaaagcactgaaacatgtcaacattgtggcctatttggggacatgcttgcaagagaacactgtgagcattttcatggagtttgttcctggtggctcaatctctagtattataaaccgttttgggccattgcctgagatggtgttctgtaaatatacgaaacaaatacttcaaggtgttgcttatctccatgagaactgtgtggtacatcgcgatatcaaaggaaataatgttatgctcatgccaactggaataataaagctgattgactttggctgtgccaggcgtttggcctgggcaggtttaaatggcacccacagtgacatgcttaagtccatgcatgggactccatattggatggccccagaagtcatcaatgagtctggctatggacggaaatcagatatctggagcattggttgtactgtgtttgagatggctacagggaagcctccactggcttccatggacaggatggccgccatgttttacatcggagcacaccgagggctgatgcctcctttaccagaccacttctcagaaaatgcagcagactttgtgcgcatgtgcctgaccagggaccagcatgagcgaccttctgctctccagctcctgaagcactccttcttggagagaagtcactgaatatacatcaagactttcttcccagttccactgcagatgc

SEQ ID NO: 154998 - DNA, 4377 bp, Homo sapiens
  Payload ID: 10472
  Gene Symbol: MAP3K19
  Gene Name: mitogen-activated protein kinase kinase kinase 19
  Uniprot ID: Q56UN5
  ENST ID: ENST00000375845
  CDS Start-End: 32-4018
ttcaaagaaacagcagcttttggacattttaatgagttctatgccaaaaccagaaagacatgctgagtcattgcttgacatttgtcatgatacaaactcttctccaactgatttgatgacagttaccaaaaatcaaaacatcatcttgcaaagcatcagcagaagtgaggagttcgaccaagatggtgactgcagtcattccacactggttaatgaagaagaagatcccagtggtggtagacaggactggcaacccaggacagaaggtgttgagatcactgtaacttttccaagagatgtcagtcctccccaagaaatgagccaagaagacttaaaagaaaagaatctgataaactcatcgcttcaagaatgggcacaagcacatgcagtttctcatccaaatgaaatagaaacggtggagctcaggaaaaagaagctgaccatgcggcccttagttttgcaaaaagaggaaagttccagggagctctgcaatgtgaacttgggctttttgctaccaagatcttgtttagaactgaacatttccaagtctgtaaccagagaagatgctcctcattttctgaaggagcagcaaagaaaatctgaagagttttcgacctctcatatgaagtacagtggccgaagcatcaagttccttctgccaccactgtcactcttgcccacgcgatctggtgtccttactatcccccaaaatcacaagtttccaaaagaaaaagaaagaaacattccaagtctcacatcttttgtgcctaagctctcagtgtctgttcgtcaatctgatgagctcagcccatcaaacgagcctccgggagccctagttaagtcgttgatggatccgactctcaggtcttctgatggcttcatttggtcaagaaacatgtgctcttttcctaagactaaccatcacaggcaatgcctggagaaggaggaaaactggaaatccaaggaaatagaagaatgtaacaaaattgaaatcactcactttgaaaaagggcagtctttggtgtcttttgagaatttgaaggaaggcaatattcctgcagttagggaagaggatattgactgccatggtagtaaaacgcgaaaacctgaagaagagaactctcaatatctttcatcaagaaagaatgagagttcagtagccaaaaactatgaacaagatccagaaatagtatgtaccattccaagcaagttccaagaaacccagcattcagaaataactccaagccaggatgaagagatgagaaataataaagctgcttcaaaaagagtttcattacataaaaatgaagcaatggaaccaaacaatattttagaagagtgtactgtacttaaaagcttatccagtgtagtctttgatgaccccattgataaactcccagaaggttgtagcagcatggagacaaacataaaaatatcaatagcagaaagagccaaaccagaaatgagtaggatggtgcctcttatccacatcaccttccctgtggatggaagccccaaggaaccagtgatagccaaaccaagcctccaaacaagaaagggaaccattcataacaaccatagtgtcaacatacctgtacaccaagaaaatgacaagcataagatgaattcccataggagtaagttggattcaaagaccaagacaagtaagaagacacctcagaattttgtgatttctactgaaggtcccattaagcctaccatgcataaaaccagcataaaaacacaaattttcccggctttgggacttgtggaccccaggccttggcaattgcccaggtttcaaaagaaaatgccacagatagcaaagaagcaatcaactcaccggactcagaaacctaaaaagcaatcatttccttgcatctgtaaaaatccaggaacacagaagtcatgtgttcctctctctgttcaaccgacagagccaagactaaattacctagatcttaagtatagtgatatgttcaaagaaatcaattcaactgctaatggacctggaatctatgaaatgtttgggacccctgtttattgtcatgtgcgagagactgaaagggatgaaaacacgtattaccgtgagatatgttcggctccatcaggcagacgtatcaccaataaatgtcgatcttcacacagtgagaggaagagcaatatcagaacaagactttctcagaaaaaaacacatatgaaatgcccaaagacttcatttggcattaaacaagagcacaaagtcttaatttctaaagaaaagagttccaaggctgtacatagcaacctacatgacattgaaaatggtgatggtatttcagaaccagactggcagataaagtcttcaggaaatgagtttctatcttccaaagatgaaattcatcccatgaacttggctcagacacctgagcagtccatgaaacagaatgaattccctcctgtctcagatttatccattgttgaagaagtttctatggaagagtctactggtgatagagacatttctaacaatcaaatactcaccacaagcctcagagatctgcaagaacttgaagagctacatcaccagatcccatttatcccttcagaagacagctgggcagtgcccagtgagaagaattctaacaagtatgtacagcaagaaaagcagaatacagcatctcttagtaaagtaaatgccagccgaattttaactaatgatctagagtttgatagtgtttcagatcactctaaaacacttacaaatttctctttccaagcaaaacaagaaagtgcatcttcccagacatatcaatattgggtacattatttggatcatgatagtttagcaaataagtcaatcacatatcaaatgtttggaaaaaccttaagtggcacaaattcaatttcccaagaaattatggactctgtaaataatgaagaattgacagatgaactattaggttgtctagctgcagaattattagctcttgatgagaaagataacaactcttgccaaaaaatggcaaatgaaacagatcctgaaaacctaaatcttgtcctcagatggagaggaagtaccccaaaagaaatgggcagagagacaacaaaagtcaaaatacagaggcatagtagtgggctcaggatatatgacagggaggagaaatttctcatctcaaatgaaaagaagatattttctgaaaatagtttaaagtctgaagaacctatcctatggaccaagggtgagattcttggaaagggagcctacggcacagtatactgtggtctcactagtcaaggacagctaatagctgtaaaacaggtggctttggatacctctaataaattagctgctgaaaaggaataccggaaactacaggaagaagtagatttgctcaaagcactgaaacatgtcaacattgtggcctatttggggacatgcttgcaagagaacactgtgagcattttcatggagtttgttcctggtggctcaatctctagtattataaaccgttttgggccattgcctgagatggtgttctgtaaatatacgaaacaaatacttcaaggtgttgcttatctccatgagaactgtgtggtacatcgcgatatcaaaggaaataatgttatgctcatgccaactggaataataaagctgattgactttggctgtgccaggcgtttggcctgggcaggtttaaatggcacccacagtgacatgcttaagtccatgcatgggactccatattggatggccccagaagtcatcaatgagtctggctatggacggaaatcagatatctggagcattggttgtactgtgtttgagatggctacagggaagcctccactggcttccatggacaggatggccgccatgttttacatcggagcacaccgagggctgatgcctcctttaccagaccacttctcagaaaatgcagcagactttgtgcgcatgtgcctgaccagggaccagcatgagcgaccttctgctctccagctcctgaagcactccttcttggagagaagtcactgaatatacatcaagactttcttcccagttccactgcagatgctcccttgcttaattgtggggaatgatggctaagggatctttgtttccccactgaaaattcagtctaacccagtttaagcagatcctatggagtcattaactgaaagttgcagttacatattagcctcctcaagtgtcagacattattactcatagtatcagaaaacatgttcttaataacaacaaaaaactatttcagtgtttacagttttgattgtccaggaactacattctctattgttttatatgacatttctttttatttttggcctgtcctgtcaattttaatgttgttagtttaaaataaattgtaaaaacaa

SEQ ID NO: 154999 - DNA, 4350 bp, Homo sapiens
  Payload ID: 10472
  Gene Symbol: MAP3K19
  Gene Name: mitogen-activated protein kinase kinase kinase 19
  ENST ID: ENST00000392915
  CDS Start-End: 121-3579
agaactgcgagatgtgatgttgacagcggagacacagagacaaccgctgagaaacttgagtcaaagatgactaaattttaaggcctggaaagtgcaggagatggaaatacaaccaacaaaatgggagcacattggaactttcaagtagcaagtttctgtaggactgggcttgtgggaaaggaccggttgaaagaaagacatgctgagtcattgcttgacatttgtcatgatacaaactcttctccaactgatttgatgacagttaccaaaaatcaaaacatcatcttgcaaagcatcagcagaagtgaggagttcgaccaagatggtgactgcagtcattccacactggttaatgaagaagaagatcccagtggtggtagacaggactggcaacccaggacagaaggtgttgagatcactgtaacttttccaagagatgtcagtcctccccaagaaatgagccaagaagacttaaaagaaaagaatctgataaactcatcgcttcaagaatgggcacaagcacatgcagtttctcatccaaatgaaatagaaacggtggagctcaggaaaaagaagctgaccatgcggcccttagttttgcaaaaagaggaaagttccagggagctctgcaatgtgaacttgggctttttgctaccaagatcttgtttagaactgaacatttccaagtctgtaaccagagaagatgctcctcattttctgaaggagcagcaaagaaaatctgaagagttttcgacctctcatatgaagtacagtggccgaagcatcaagttccttctgccaccactgtcactcttgcccacgcgatctggtgtccttactatcccccaaaatcacaagtttccaaaagaaaaagaaagaaacattccaagtctcacatcttttgtgcctaagctctcagtgtctgttcgtcaatctgatgagctcagcccatcaaacgagcctccgggagccctagttaagtcgttgatggatccgactctcaggtcttctgatggcttcatttggtcaagaaacatgtgctcttttcctaagactaaccatcacaggcaatgcctggagaaggaggaaaactggaaatccaaggaaatagaagaatgtaacaaaattgaaatcactcactttgaaaaagggcagtctttggtgtcttttgagaatttgaaggaaggcaatattcctgcagttagggaagaggatattgactgccatggtagtaaaacgcgaaaacctgaagaagagaactctcaatatctttcatcaagaaagaatgagagttcagtagccaaaaactatgaacaagatccagaaatagtatgtaccattccaagcaagttccaagaaacccagcattcagaaataactccaagccaggatgaagagatgagaaataataaagctgcttcaaaaagagtttcattacataaaaatgaagcaatggaaccaaacaatattttagaagagtgtactgtacttaaaagcttatccagtgtagtctttgatgaccccattgataaactcccagaaggttgtagcagcatggagacaaacataaaaatatcaatagcagaaagagccaaaccagaaatgagtaggatggtgcctcttatccacatcaccttccctgtggatggaagccccaaggaaccagtgatagccaaaccaagcctccaaacaagaaagggaaccattcataacaaccatagtgtcaacatacctgtacaccaagaaaatgacaagcataagatgaattcccataggagtaagttggattcaaagaccaagacaagtaagaagacacctcagaattttgtgatttctactgaaggtcccattaagcctaccatgcataaaaccagcataaaaacacaaattttcccggctttgggacttgtggaccccaggccttggcaattgcccaggtttcaaaagaaaatgccacagatagcaaagaagcaatcaactcaccggactcagaaacctaaaaagcaatcatttccttgcatctgtaaaaatccaggaacacagaagtcatgtgttcctctctctgttcaaccgacagagccaagactaaattacctagatcttaagtatagtgatatgttcaaagaaatcaattcaactgctaatggacctggaatctatgaaatgtttgggacccctgtttattgtcatgtgcgagagactgaaagggatgaaaacacgtattaccgtgagatatgttcggctccatcaggcagacgtatcaccaataaatgtcgatcttcacacagtgagaggaagagcaatatcagaacaagactttctcagaaaaaaacacatatgaaatgcccaaagacttcatttggcattaaacaagagcacaaagtcttaatttctaaagaaaagagttccaaggctgtacatagcaacctacatgacattgaaaatggtgatggtatttcagaaccagactggcagataaagtcttcaggaaatgagtttctatcttccaaagatgaaattcatcccatgaacttggctcagacacctgagcagtccatgaaacagaatgaattccctcctgtctcagatttatccattgttgaagaagtttctatggaagagtctactggtgatagagacatttctaacaatcaaatactcaccacaagcctcagagatctgcaagaacttgaagagctacatcaccagatcccatttatcccttcagaagacagctgggcagtgcccagtgagaagaattctaacaagtatgtacagcaagaaaagcagaatacagcatctcttagtaaagtaaatgccagccgaattttaactaatgatctagagtttgatagtgtttcagatcactctaaaacacttacaaatttctctttccaagcaaaacaagaaagtgcatcttcccagacatatcaatattgggtacattatttggatcatgatagtttagcaaataagtcaatcacatatcaaatgtttggaaaaaccttaagtggcacaaattcaatttcccaagaaattatggactctgtaaataatgaagaattgacagatgaactattaggttgtctagctgcagaattattagctcttgatgagaaagataacaactcttgccaaaaaatggcaaatgaaacagatcctgaaaacctaaatcttgtcctcagatggagaggaagtaccccaaaagaaatgggcagagagacaacaaaagtcaaaatacagaggcatagtagtgggctcaggatatatgacagggaggagaaatttctcatctcaaatgaaaagaagatattttctgaaaatagtttaaagtctgaagaacctatcctatggaccaagggtgagattcttggaaagggagcctacggcacagttcaagtccaatgggaaagaaatatcttccttcaacagctgaatatgttactggaagtttggagaatcattactagatggcaaaaacaaaagatgttccttccattttgtgaactgcataagagatcttggggggtgggcgatgaagagaggtatactgtggtctcactagtcaaggacagctaatagctgtaaaacaggtggctttggatacctctaataaattagctgctgaaaaggaataccggaaactacaggaagaagtagatttgctcaaagcactgaaacatgtcaacattgtggcctatttggggacatgcttgcaagagaacactgtgagcattttcatggagtttgttcctggtggctcaatctctagtattataaaccgttttgggccattgcctgagatggtgttctgtaaatatacgaaacaaatacttcaaggtgttgcttatctccatgagaactgtgtggtacatcgcgatatcaaaggaaataatgttatgctcatgccaactggaataataaagctgattgactttggctgtgccaggcgtttggcctgggcaggtttaaatggcacccacagtgacatgcttaagtccatgcatgggactccatattggatggccccagaagtcatcaatgagtctggctatggacggaaatcagatatctggagcattggttgtactgtgtttgagatggctacagggaagcctccactggcttccatggacaggatggccgccatgttttacatcggagcacaccgagggctgatgcctcctttaccagaccacttctcagaaaatgcagcagactttgtgcgcatgtgcctgaccaggtaagaaactgaaagcaagaggaggaagataaatgcccggagattccaagtggcagacatttccctttcaatttatggcccattaaaagctctgttttggttatgaa

SEQ ID NO: 155000 - DNA, 1765 bp, Homo sapiens
  Payload ID: 10472
  Gene Symbol: MAP3K19
  Gene Name: mitogen-activated protein kinase kinase kinase 19
  Uniprot ID: Q56UN5
  ENST ID: ENST00000392917
  CDS Start-End: 32-1414
ttcaaagaaacagcagcttttggacattttaatgagttctatgccaaaaccagaaagacatgctgagtcattgcttgacatttgtcatgatacaaactcttctccaactgatttgatgacagttaccaaaaatcaaaacatcatcttgcaaagcatcagcagaagtgaggagttcgaccaagatggtgactgcagtcattccacactggttaatgaagaagaagatcccagtggtggtagacaggactggcaacccaggacagaaggtgttgagatcactgtaacttttccaagagatgtcagtcctccccaagaaatgagccaagaagacttaaaagaaaagaatctgataaactcatcgcttcaagaatgggcacaagcacatgcagtttctcatccaaatgaaatagaaacggtggagctcaggaaaaagaagctgaccatgcggcccttagttttgcaaaaagaggaaagttccagggagctctgcaatgtgaacttgggctttttgctaccaagatcttgtttagaactgaacatttccaagtctgtaaccagagaagatgctcctcattttctgaaggagcagcaaagaaaatctgaagagttttcgacctctcatatgaagtacagtggccgaagcatcaaggtatactgtggtctcactagtcaaggacagctaatagctgtaaaacaggtggctttggatacctctaataaattagctgctgaaaaggaataccggaaactacaggaagaagtagatttgctcaaagcactgaaacatgtcaacattgtggcctatttggggacatgcttgcaagagaacactgtgagcattttcatggagtttgttcctggtggctcaatctctagtattataaaccgttttgggccattgcctgagatggtgttctgtaaatatacgaaacaaatacttcaaggtgttgcttatctccatgagaactgtgtggtacatcgcgatatcaaaggaaataatgttatgctcatgccaactggaataataaagctgattgactttggctgtgccaggcgtttggcctgggcaggtttaaatggcacccacagtgacatgcttaagtccatgcatgggactccatattggatggccccagaagtcatcaatgagtctggctatggacggaaatcagatatctggagcattggttgtactgtgtttgagatggctacagggaagcctccactggcttccatggacaggatggccgccatgttttacatcggagcacaccgagggctgatgcctcctttaccagaccacttctcagaaaatgcagcagactttgtgcgcatgtgcctgaccagggaccagcatgagcgaccttctgctctccagctcctgaagcactccttcttggagagaagtcactgaatatacatcaagactttcttcccagttccactgcagatgctcccttgcttaattgtggggaatgatggctaagggatctttgtttccccactgaaaattcagtctaacccagtttaagcagatcctatggagtcattaactgaaagttgcagttacatattagcctcctcaagtgtcagacattattactcatagtatcagaaaacatgttcttaataacaacaaaaaactatttcagtgtttacagttttgattgtccaggaactacattctctattgttttatatgacatttctttttatttttggcctgtcctgtcaattttaatgttgttagtttaaaataaattgt

SEQ ID NO: 155001 - DNA, 1460 bp, Homo sapiens
  Payload ID: 10472
  Gene Symbol: MAP3K19
  Gene Name: mitogen-activated protein kinase kinase kinase 19
  Uniprot ID: Q56UN5
  ENST ID: ENST00000392918
  CDS Start-End: 32-1420
ttcaaagaaacagcagcttttggacattttaatgagttctatgccaaaaccagaaagacatgctgagtcattgcttgacatttgtcatgatacaaactcttctccaactgatttgatgacagttaccaaaaatcaaaacatcatcttgcaaagcatcagcagaagtgaggagttcgaccaagatggtgactgcagtcattccacactggttaatgaagaagaagatcccagtggtggtagacaggactggcaacccaggacagaaggtgttgagatcactgtaacttttccaagagatgtcagtcctccccaagaaatgagccaagaagacttaaaagaaaagaatctgataaactcatcgcttcaagaatgggcacaagcacatgcagtttctcatccaaatgaaatagaaacggtggagctcaggaaaaagaagctgaccatgcggcccttagttttgcaaaaagaggaaagttccagggagctctgcaatgtgaacttgggctttttgctaccaagatcttgtttagaactgaacatttccaagtctgtaaccagagaagatgctcctcattttctgaaggagcagcaaagaaaatctgaagagttttcgacctctcatatgaagtacagtggccgaagcatcaagaggcatagtagtgggctcaggatatatgacagggaggagaaatttctcatctcaaatgaaaagaagatattttctgaaaatagtttaaagtctgaagaacctatcctatggaccaaggtagatttgctcaaagcactgaaacatgtcaacattgtggcctatttggggacatgcttgcaagagaacactgtgagcattttcatggagtttgttcctggtggctcaatctctagtattataaaccgttttgggccattgcctgagatggtgttctgtaaatatacgaaacaaatacttcaaggtgttgcttatctccatgagaactgtgtggtacatcgcgatatcaaaggaaataatgttatgctcatgccaactggaataataaagctgattgactttggctgtgccaggcgtttggcctgggcaggtttaaatggcacccacagtgacatgcttaagtccatgcatgggactccatattggatggccccagaagtcatcaatgagtctggctatggacggaaatcagatatctggagcattggttgtactgtgtttgagatggctacagggaagcctccactggcttccatggacaggatggccgccatgttttacatcggagcacaccgagggctgatgcctcctttaccagaccacttctcagaaaatgcagcagactttgtgcgcatgtgcctgaccagggaccagcatgagcgaccttctgctctccagctcctgaagcactccttcttggagagaagtcactgaatatacatcaagactttcttcccagttccactgcagatgc

SEQ ID NO: 155002 - DNA, 537 bp, Homo sapiens
  Payload ID: 10472
  Gene Symbol: MAP3K19
  Gene Name: mitogen-activated protein kinase kinase kinase 19
  ENST ID: ENST00000425952
  CDS Start-End: 231-537
agaaaattgcagagggctgagccgaggaggtgcacccgcagatagagaggagcggtggggacatcaggactcaggaagtgagaggaggaggagaatcagaagagagttgcgggaagaaaggagcaggaaacaatgttaaattggaaaagagattacaaagcagatgtgaaagacatgctgagtcattgcttgacatttgtcatgatacaaactcttctccaactgatttgatgacagttaccaaaaatcaaaacatcatcttgcaaagcatcagcagaagtgaggagttcgaccaagatggtgactgcagtcattccacactggttaatgaagaagaagatcccagtggtggtagacaggactggcaacccaggacagaaggtgttgagatcactgtaacttttccaagagatgtcagtcctccccaagaaatgagccaagaagacttaaaagaaaagaatctgataaactcatcgcttcaagaatgggcacaagcacatgcagtttctcatccaaatgaaatagaaacggtggagc

SEQ ID NO: 155003 - DNA, 2195 bp, Homo sapiens
  Payload ID: 10472
  Gene Symbol: MAP3K19
  Gene Name: mitogen-activated protein kinase kinase kinase 19
  ENST ID: ENST00000437365
  CDS Start-End: 1-2094
aagcaatcatttccttgcatctgtaaaaatccaggaacacagaagtcatgtgttcctctctctgttcaaccgacagagccaagactaaattacctagatcttaagtatagtgatatgttcaaagaaatcaattcaactgctaatggacctggaatctatgaaatgtttgggacccctgtttattgtcatgtgcgagagactgaaagggatgaaaacacgtattaccgtgagatatgttcggctccatcaggcagacgtatcaccaataaatgtcgatcttcacacagtgagaggaagagcaatatcagaacaagactttctcagaaaaaaacacatatgaaatgcccaaagacttcatttggcattaaacaagagcacaaagtcttaatttctaaagaaaagagttccaaggctgtacatagcaacctacatgacattgaaaatggtgatggtatttcagaaccagactggcagataaagtcttcaggaaatgagtttctatcttccaaagatgaaattcatcccatgaacttggctcagacacctgagcagtccatgaaacagaatgaattccctcctgtctcagatttatccattgttgaagaagtttctatggaagagtctactggtgatagagacatttctaacaatcaaatactcaccacaagcctcagagatctgcaagaacttgaagagctacatcaccagatcccatttatcccttcagaagacagctgggcagtgcccagtgagaagaattctaacaagtatgtacagcaagaaaagcagaatacagcatctcttagtaaagtaaatgccagccgaattttaactaatgatctagagtttgatagtgtttcagatcactctaaaacacttacaaatttctctttccaagcaaaacaagaaagtgcatcttcccagacatatcaatattgggtacattatttggatcatgatagtttagcaaataagtcaatcacatatcaaatgtttggaaaaaccttaagtggcacaaattcaatttcccaagaaattatggactctgtaaataatgaagaattgacagatgaactattaggttgtctagctgcagaattattagctcttgatgagaaagataacaactcttgccaaaaaatggcaaatgaaacagatcctgaaaacctaaatcttgtcctcagatggagaggaagtaccccaaaagaaatgggcagagagacaacaaaagtcaaaatacagaggcatagtagtgggctcaggatatatgacagggaggagaaatttctcatctcaaatgaaaagaagatattttctgaaaatagtttaaagtctgaagaacctatcctatggaccaagggtgagattcttggaaagggagcctacggcacagtatactgtggtctcactagtcaaggacagctaatagctgtaaaacaggtggctttggatacctctaataaattagctgctgaaaaggaataccggaaactacaggaagaagtagatttgctcaaagcactgaaacatgtcaacattgtggcctatttggggacatgcttgcaagagaacactgtgagcattttcatggagtttgttcctggtggctcaatctctagtattataaaccgttttgggccattgcctgagatggtgttctgtaaatatacgaaacaaatacttcaaggtgttgcttatctccatgagaactgtgtggtacatcgcgatatcaaaggaaataatgttatgctcatgccaactggaataataaagctgattgactttggctgtgccaggcgtttggcctgggcaggtttaaatggcacccacagtgacatgcttaagtccatgcatgggactccatattggatggccccagaagtcatcaatgagtctggctatggacggaaatcagatatctggagcattggttgtactgtgtttgagatggctacagggaagcctccactggcttccatggacaggatggccgccatgttttacatcggagcacaccgagggctgatgcctcctttaccagaccacttctcagaaaatgcagcagactttgtgcgcatgtgcctgaccaggtaagaaactgaaagcaagaggaggaagataaatgcccggagattccaagtggcagacatttccctttcaatttatggcccattaaaagctctgttttggttatg

SEQ ID NO: 155004 - DNA, 541 bp, Homo sapiens
  Payload ID: 10472
  Gene Symbol: MAP3K19
  Gene Name: mitogen-activated protein kinase kinase kinase 19
  ENST ID: ENST00000414343
  CDS Start-End: 477-541
gtaaactaagcagtctatttgcagctaactaaagggtttgtgcatgcaggaccagcttaattaaagacaaaatttaaaaggaaaaattatttgggctgtacaacactgaaaaaaaaatctgaatctatgctgtttttaaatggatccctggttgaagtgtgggttacagctgtcccagaaatcagtgccacaatgaattaggatgatgttggctactgtttggcttggtgtttcttcaactgtgtgccacgtccctcagcaaaacacagcacagaagtggtttcaagaggtgatgtggaactcatctgtgactatattaccgaagtccaatccatcctcggaaaccttgactttcagcacccagagacgtggaatacgcctctcattactgcagcagaggaaaatctaacagagaaagacatgctgagtcattgcttgacatttgtcatgatacaaactcttctccaactgatttgatgacagttaccaaaaatcaaaacatcatcttgcaaagcatcagcagaagtgaggagttcgacca

SEQ ID NO: 155005 - DNA, 2135 bp, Homo sapiens
  Payload ID: 10473
  Gene Symbol: MAP3K2
  Gene Name: mitogen-activated protein kinase kinase kinase 2
  Uniprot ID: Q9Y2U5
  ENST ID: ENST00000344908
  CDS Start-End: 101-1960
ttttattaatatgctgatctgttttatcttctcaggccataaagaatgctgatgggagaaccattttcctaattttcaaattgttgagctgtttgccataatggatgatcagcaagctttgaactcaatcatgcaagatttggctgtccttcataaggccagtcgaccagcattatccttgcaggaaaccagaaaagcaaaatcttcatcaccaaaaaaacagaatgatgtccgagtcaaatttgaacatagaggagaaaaaagaatccttcagttccccagaccagttaaactggaagatctgagatctaaagctaaaattgcctttggacagtctatggatctacattataccaataacgagttggtaattccattaactactcaagatgacttggacaaagctgtggaactgctggatcgtagtattcatatgaagagcctcaagatattacttgtaataaatggaagtacacaggctactaatttagaaccattgccatcactagaagatttggataatacagtatttggagcagagaggaaaaaacggctatctataataggtcctactagtagagatagaagttctcctcccccaggttacattccagatgaattacaccaggttgcccggaatgggtcattcactagtatcaacagtgaaggagagttcattccagagagcatggaccaaatgctggatccattatctttaagcagccctgaaaattctggctcaggaagttgtccatcacttgatagtcctttggatggagagagctatccaaaatcacgaatgcctagggctcagagctacccagataatcatcaggaattttcagactatgataaccctatctttgagaaatttggaaaaggaggaacatatccaagaaggtatcatgtttcatatcatcatcaagagtataatgatggtcgtaaaacttttccaagagctagaaggacccaggggaccagcttacggtctcctgtgagtttcagtcctactgatcattccttaagcactagtagtggaagcagtatctttaccccagagtatgatgatagtcgaataagaagaaggggaagtgacatagacaatcctactttgaccgtaatggacatcagcccacccagccgttcacctcgagctccgaccaactggagattgggcaaactgcttggccaaggagcctttggaagggtctacctctgttatgatgttgatacaggaagagaattggctgttaagcaagttcaatttgaccccgatagtcctgagaccagcaaggaagtaaatgcacttgagtgtgaaattcagttgctgaaaaacttgctacatgagcgaattgttcagtattatggctgtttgagggatccccaggaaaaaacactttccatatttatggaatatatgccagggggttcaattaaggaccaattaaaagcatatggcgctcttactgagaatgtgactaggaaatacacccgtcagattctggagggtgtccattatttgcacagtaatatgattgtccatagagatatcaaaggcgcaaatatcctgcgagattcaacaggcaacgtcaaactaggagattttggggccagcaaacggcttcagaccatctgtctctcagggacaggaatgaagtctgtcacgggcacaccatactggatgagccctgaagtcatcagtggagaaggctatggaagaaaagcagacatctggagtgttgcatgtactgtggtagaaatgctaactgaaaagccgccttgggctgaatttgaagcaatggctgccatctttaaaatcgccactcagccaacaaacccaaagctgccacctcatgtctcagactatactcgagatttcctcaaacggatttttgtagaggccaaactgagaccttcagctgatgaactcttaaggcacatgtttgtgcattatcactagcagccagtaacctctcctgtgcctctacctagctcccatctattcattcaccttctctctgactgcacttttcttttttataaaaaaagagagatgggggagaaaaaagacaagagggaaagtatttctcttgattcttggttaaatttgtttaataataataatatcctaaatt

SEQ ID NO: 155006 - DNA, 689 bp, Homo sapiens
  Payload ID: 10473
  Gene Symbol: MAP3K2
  Gene Name: mitogen-activated protein kinase kinase kinase 2
  ENST ID: ENST00000409179
  CDS Start-End: 547-689
gcggcggcgcctgacgagggtgccgcggccgctgggcgcagcgttcgggggttgcacggcccgcggcggcgacgaaaacaacgaccaggacgctcggcgcccctgtccgcagagtcgccactcccgcctcttctccggtctctagcgacgcgggcccgcggcttcctcctttcctgcccagttcccgcgggcctcggggttgcagcggctagaagtgccgaggagcgccaggaggacccggccggctgcgaggattcacgcgcccgccaccccgcccggcccgggcttcatgtgaaagagggacgggcctggccccaaggcccgcgcccgactcctcgcgcgcccctccggtccccgggggccctgcggcagcccccgacctggggccgcggtgacaggccgcgctggggcggaggggcgggctcggcgggggcggcccctccttgggcctgcggctctctacgtccctgcggagcagccggccataaagaatgctgatgggagaaccattttcctaattttcaaattgttgagctgtttgccataatggatgatcagcaagctttgaactcaatcatgcaagatttggctgtccttcataaggccagtcgaccagcattatccttgcaggaaaccagaaaagcaaaatcttcatcaccaaaaaaacagaatgatgtccgagtcaaatt

SEQ ID NO: 155007 - DNA, 10992 bp, Homo sapiens
  Payload ID: 10473
  Gene Symbol: MAP3K2
  Gene Name: mitogen-activated protein kinase kinase kinase 2
  Uniprot ID: Q9Y2U5
  ENST ID: ENST00000409947
  CDS Start-End: 284-2143
tttctaaagtccctcaggaaaaaaattctgaaacttgagccacaaattaagaggcagacggcttttctccttgcaaatgacctgccacacagtccgtcactgcctctgctagctctgctacccttgggccctgtccacagcccacgtgggagaccttttcacgggatctactcggatgtctgggatctggccactaccgcaggctcgagacaacccaggccataaagaatgctgatgggagaaccattttcctaattttcaaattgttgagctgtttgccataatggatgatcagcaagctttgaactcaatcatgcaagatttggctgtccttcataaggccagtcgaccagcattatccttgcaggaaaccagaaaagcaaaatcttcatcaccaaaaaaacagaatgatgtccgagtcaaatttgaacatagaggagaaaaaagaatccttcagttccccagaccagttaaactggaagatctgagatctaaagctaaaattgcctttggacagtctatggatctacattataccaataacgagttggtaattccattaactactcaagatgacttggacaaagctgtggaactgctggatcgtagtattcatatgaagagcctcaagatattacttgtaataaatggaagtacacaggctactaatttagaaccattgccatcactagaagatttggataatacagtatttggagcagagaggaaaaaacggctatctataataggtcctactagtagagatagaagttctcctcccccaggttacattccagatgaattacaccaggttgcccggaatgggtcattcactagtatcaacagtgaaggagagttcattccagagagcatggaccaaatgctggatccattatctttaagcagccctgaaaattctggctcaggaagttgtccatcacttgatagtcctttggatggagagagctatccaaaatcacgaatgcctagggctcagagctacccagataatcatcaggaattttcagactatgataaccctatctttgagaaatttggaaaaggaggaacatatccaagaaggtatcatgtttcatatcatcatcaagagtataatgatggtcgtaaaacttttccaagagctagaaggacccaggggaccagcttacggtctcctgtgagtttcagtcctactgatcattccttaagcactagtagtggaagcagtatctttaccccagagtatgatgatagtcgaataagaagaaggggaagtgacatagacaatcctactttgaccgtaatggacatcagcccacccagccgttcacctcgagctccgaccaactggagattgggcaaactgcttggccaaggagcctttggaagggtctacctctgttatgatgttgatacaggaagagaattggctgttaagcaagttcaatttgaccccgatagtcctgagaccagcaaggaagtaaatgcacttgagtgtgaaattcagttgctgaaaaacttgctacatgagcgaattgttcagtattatggctgtttgagggatccccaggaaaaaacactttccatatttatggaatatatgccagggggttcaattaaggaccaattaaaagcatatggcgctcttactgagaatgtgactaggaaatacacccgtcagattctggagggtgtccattatttgcacagtaatatgattgtccatagagatatcaaaggcgcaaatatcctgcgagattcaacaggcaacgtcaaactaggagattttggggccagcaaacggcttcagaccatctgtctctcagggacaggaatgaagtctgtcacgggcacaccatactggatgagccctgaagtcatcagtggagaaggctatggaagaaaagcagacatctggagtgttgcatgtactgtggtagaaatgctaactgaaaagccgccttgggctgaatttgaagcaatggctgccatctttaaaatcgccactcagccaacaaacccaaagctgccacctcatgtctcagactatactcgagatttcctcaaacggatttttgtagaggccaaactgagaccttcagctgatgaactcttaaggcacatgtttgtgcattatcactagcagccagtaacctctcctgtgcctctacctagctcccatctattcattcaccttctctctgactgcacttttcttttttataaaaaaagagagatgggggagaaaaaagacaagagggaaagtatttctcttgattcttggttaaatttgtttaataataataatatcctaaattttttatatttaatctttttttcccttacaagaacttgaagtttttttttttaatttttataatgtactgatgtggttcagagagataaagcactttagtacatagtcactctttttagtacaaacaaatcatttggaatacctaaagattgtagagtcattccctctatcactgacacatcagtgacgatgggaagacatggaaaacaaggagaagaaaatgatgtataatttgtagtttttagtgatagtatttaaaatatatcctcatttgtggggttgagccctaaactttagtttagggtaggtactcaacttaaagaatataggtttcttcttatatctgtattctttagatcctaacctctgtctaccaacctttttgctcagtaggagtcttgatagaagatatgaatctctgagaggtatgtttatttgttaatcctaaccagtataataagcaaatacactataatagatccacgttactggaatctgtaaaccttgagggatagctttctgcttaaaaacacacacacacacacacacacacacacggaaaacctttattttaaagtcaagttgtgagcaaatagaaataaaagacaaaaggacatcactcttatcaaatgtgtgagcagtagaagagaccacatttacagtcaatagaaataatgaaaaaaaattaggtgtttagtgtattttaaacagttttgttttgttttacttgagggggacgtcccaaaattaaaggaatggagaaataatcaaaatcatgtataccatcttctatttccagctcctgattccccataggtaacatcccttaggagcgaagagttcaattagtaatgtttatgtgttatgtcaggagatgaaacccttgttcttaggatcacagaatactaaagcacctcaaaaaaacaggtatcatgtgaaacagtggttgccaaaagtggagcgaggatgatttcactaggcatttggcaattcttagagacatttccggttgtcacaattggagggatactagtaacatgaattgggtagaggccagggatgttgctaaatagattataatacacaaggaaagcagcctcaaagaattacccctcccaaaatgtcagaagtgctgaggctgagaaaccctgatgtaaagatcagtcccagttataaactgaaaacagctatttacaaagcagtaaatgcaagaaagaaaaggaagtcgcaaagagaaagtgatgtaatgcaaattgaggattttacaagatcagatactgctgctttaagtcaagggtgaataatctcaacaaacagcaaatagcaatcactttaccagctgcatattgcacccacataggtaactcttcattttaggaacaaactgaatttgaacactgagccttttgaactcagccatctctatatattctttccttaaaattcatgattttgggcaaaaaaaaaaaaaaaagcatatcaaaacaaaattttaactactaatgggaaggttaaaaagctgccacgtatttctagtacaatgtatccaataagagcaaggacattgttaaatggaacaagacagctgggaaaggccccactatctctaatagaattgtgctactataaaacatgaagatatcagcaatttggccacttgcagtttttttcagcatgttaaagcaagtgctaagtactttattagtactttatttagtactttattttaaaggtctagaaaacaacagtcttcctggaggccccagaatccctttcatgggattcataagggactcaggtattcttattttctgccaaaaggtgtgcttatttagggactcttttacgatactttgtttctgaagttaggtagatcttggtttactgtgccaaggtcctacctagcattccctgtaggaatatttgaaattccactagctagtctaagaagtcaaagcacaaaattaattgtcaacgcttctctcatattcttaaaattgaagcagtttgcagggaagaacaagaatgaggtgtccctgccttggtaaagcaactgccaaattttgttctagaaagaatccccaagtgtgtggatctattataatttctttatcttttatgaatgagggcatcttttctacttgagcaagatcatggtccttgaccagtgggcttttccttcatatctgtcttgtgtagttgtgcttttcctttggctcgtttttggtctgtcagggtaaccagcagtgcacaatatgagacaaatgctctttagagagaaatctggtgagactgtagaacccagagcaaaactgtttttttttcagtctctgttttcttttctaaatgctatagaaaataaaggcacctgaaaagaaactactactttaacactgctgtggaaggcctttgctttataagaaaaatattattagctatgggaaagtaatgttctttatgtaaagacttaaaaatagactaatagtttacagagttattatataaaatacgatgtgaatttatttcaaacaagttgtgaaggtaccaaaaaccacaataaaagttaatatatataaaaactactagaacaaaaaagcttgaaggtgtgggggtggagggtatggaagaccaaaagtaaatttaaaaaagaaatttttgaaaggaaacagctttatcaggggaagttaaatataacactccgtttttttcttctttctaataatgatatggatcaacaaatgcaatttgaactttttaagataactctaaatgtgttttgtttcttaaatgcacaattgattcttctatactgtaatgcttctttgctgacgctggaaaatggtcagactgctgactttgtgcctttaaaatgcattctgctttgacagtggcagactttttggtgctggagaagattcactagcagtcttatatgtgcttttcaggaaatatctttctacttaaggccttgagagattcaaagtggcatgacttaggcttggaccaaatataagatcttttacattgcaaacaaaatgttgtattgaataaaagggttaaaaaaatcataatgactagtggaaattttgatgggttgttaattatttaaaatgtatttgaaagtatacagactgaaaatttcagtatgaatatcttgaaaattttcagcacttttccttgtttacaaaacatctttctaacttaaaaaaatgactattgccttagaaagttttaaaaggcacagttacccttacataacatatataaggaattaaaatattaatgcatttgctgaactgtaaaagaaaattttaaaccttgatttcagagtgaattggattggctttcacttgagagagtctttaccttattcccaaagaaactgcattaaaaagatgaaactatttctttagactaagtctctgctactccagctcatatatatgtcagatctgctctgtagtatttctgacatggagttgttataagatatgtgaaatcacttagaaaataaaatcagatgtgaatagtttagcaggatgaccaagccagatgcagactccttggcctatggcaaagttctgtgccagtgattttatttggagtctgggaactgatagcttgatataaaatcacctggtgtcaattaaatatacaaatctatcttttttaatagaatgaatcttctttgtttgttcaataattgtaacttattatgtcaggtactaaattaacatccttaaggaggtcacaatctaggaggaacatgggcaaacagttacttattttatggcatacgctaactctgaaagttcagcaatgatgttttaaaatgttattttttattaagggaaaagcaattttaggtaatcattggctgttataaacggaaatgtcactgacaacagggattagagtaaaagtatctccaaactagagggatcccctccccaaccaggtcacatagcatctctctcaggaccccctcttactgcaaaacccagcctctactcaacagttctggtgatggggagcatttattccataacagtgtttttttgttcttttttttttttttccccagtgtctcttttaaagaaaacatactttattttggtctaaattgtgaaaatacccaaaacatttgatagaaattgaactctgtcaacagtgttatttatactaagatcaggacagttccttgagatcatactgttttattactaagtttggcctttgttttacaaatgtaatgttcatatttatttgaattttaagattggttaaatgttaatgaaaagcaatccaattgttaatttttagtagtgccttttctctgtatgccttaattttattttatattaataattcaagttacccaccaaaatgaagattttttccaaaatcagtaggcttcacaagttcatttggccttagactgtgtattggtccttaaatgtttcttaatgcctgcctcctcctacccttttctacctcctttttaaaaaaataaataaataaataaataaatgttaggagagaaacattaggatttgtctgtgatagacatgctgcagcttccactagacatgaattcccaacacaagcatagaaagaggtattctcgttctaaagagacatgtaaatgttttctgggttgaatatttgattttcaatcacattggcactgtccaagttcttggcatattatagttcagttatgattttcatggtagagttacaatacttgtttttgccctaaagaagtcattcacatggtttacaaatgttaaggcaatgagataggacagtgagtaggaaatccagggatagcagattctagtccttaattctcagctaacattttgggtaatactcacagaaaagttacttttctgtgaagtgtgtgcatgtgtgcatgtatgtgtgcgtttgcatgcatgtgtgtgtgtgtgtgtgtgtggttagagttggaggcagggatgggaaggaagaaggggaaaggtatgagtgttcaattaggtcagtttctggttttggaagaacaactcaaatgtatgacctactgatgacatacagtgagtgtagtcatccttgggtaggaacaccagtacattttccagaagtagctagtacaaatgattgtataataatattgattgtaaattgccatactcttggttgctaaaggtagattaaaattcaatttgtgtatatgtaaaataatcttatatataattcttaaatagaaagtaattgattttacatagttcttcctgaactttttggaactgaaattctgccaaacattatcaaaataagcttccttagcttaccaagtattcacaaggaaattctcttgtacctctttttggttggctaggggaagcatgctgtgaagcagctattcctacttatagttgtctttggcttggctttgacttctgccatggtttggacaggatgccatggtaggtgtgggaagtatcagggcctcccatcttcccatactcaccttccagagctgttgatggaaatgagctcttgggggagcctagagattcttttttcagtggtcctgtaagcattcaaggttgagcttcagaaagatgagggaggagtcatagctacagtaaagaaaagaatagattttatctgttgcctgtatacagtctcatagaattcttatttttcataattgtgcattttaattgatagtcatatggtatttttgttaataacagcaaaggcattaaatcagtaccattgttccttctgcctgatgacttcttgtttgtaacacaatctgtattatcagaatcactttaaaccaaagcttttatattccctgtacacatagccaaaataattagcactgttacttctgtccacttgtaagctaatagtataaaaattataaagcagatactagtagaatttgtattctggtatatccttcaaggaaaaggacaggtgatcagtgcatttagacatccagaagttacttccactattgaggaactatgtagacatgaatttaagcttgtacatgtgccaatcttgttaatgtcacttgaccactgattcacatagacagacattaacgtctgatgcctcaggttgatggcgaactttcttcctagtgtcttaacatttatgaacttatgtttgacttgaggggcatttcagcaaagctgtgaggaaaagtaggttctggactgatgtctgctttgtgccatagacattttggaacataaggaagtatctgcttctactatatgtacaggacttgtccccaaataatttctgaatcccttaatgcagttgagaatcccttaatgcagttgagaacagtaaagttcatgaccataccgaaaagcacttttaagttcacttctttttaaatatttttttagaatttattttttaaaagcatatgtaactagtgatgattttagcattagctttacttggaggggagaagaaacaaaattacaccttaaactctattagatagactacaaaatggatttgatgtattcttacttttccaaagaattttttccacctggaataagaagagaggactagttgaaacatttgagctggagaggcttatgggcaatatgaagtgggccaaattcttgcaatacaccctattcaattgaaagtacagtgtctaaggataagaatacttctttaaagaccaacaattgttttaatgcaatcttaattagtaaatggtttacattttttctattgttattggttttaaaatttgctaccctgaattctgaaatattataagagttaataccaaaaatacttttaatgtctgacatctcttacatttcacatggttctttttattcattgtaaataaaagtaaacttggataaatttgagaataaactttgaattgttgcaaactatgattatcaatttgtaaatttaccctttgacataataatgtacatttttaaatgtagccattaaattctctatatttaacctattggtttctctctaaatgtttttaatctcagttgaatgctgggcagtttataattatgtacaaagggtttttttcctattaagattgacatttttgcacatttttggaaatgtttaatttgtacactgatttactactctgaccaataattgttgatgagtgtatgagcatcatgaatgcgtgcattgaactactgtctgtgtctttatgttttaacttctttcaagatgtagccatcagttactgcactgctattactgacttaaatggacctttttgcttttacaaactatacttatctatggttctttgttgaagaactcaggagttcgacattaatagaaattagaaaattttataatgtattataaaatccattactaagttgaaagtatgcttttaactgtgtatcaggggatgtatgtttgtgtggagatgtttttttctgtctgtaggcacatgtatatatcccagtaagttcttattttcatttcatttctacatttttatgaacttgttttataagggtactgtttagttgtgataattaaatatatataaaagctttctgagagattatttactatatgaatatattttcagctggctgatcaaaagtatttttaaaattttgtttttagccattcaaaatgtatttgtattttcagaattgaatgcaagtcatacttagagctcaattaaaatactcttgcaagaaaaagcattaaattctctttgagaattccgtgaaatgcaaattaagggaaaaataggttttaagcagtagcaaaaacacaccgctaaaaatggcctttgaattctcagagctatggaaaaatgtgagaaactaaattgtctcgagatgtcaagatttttctatctccagttgctattggcctgtcctactgttgtctttgaatatttcctgtattccaccccaaaagatttcaacttttagtttttctatcactgggcaaggtcagactgggtttataaaacaatatattggcatattgtgattctttgtaattgactataaattggttttgaaatgtccaaacatacgttgtgtgtctttatattgtactgtgtgttttaagtaactggcagaaaaagaattggaaatgaaatttccaatcagacaatgtagtattaaagaaaactttgttttaaatatgcggtaccatgtaaaattactcgtgttaggaataaagtccactgttgaagttgaatgtcactaagcttattatgttaaaaggaaccagtgtgattaggaaaacctaccagaagccagatacagtgtggtacgtgcaacatttcatgcacattttgattttgtttgtcattcaaaattgtgcttgtaaaaatgtatacaatttctgagttttataatttctaggtacttgttttttcttgctggtaaatagcttttttttaaaaaaaaatctaatataaaagaaaccatgtttatattttgttagtgatcaatgactttgtttatatggaaatttgtatattgttggcacacattttgttgaggtttacgtgcatgaaggcctgcaataattagcacaatgaaaactgctttttcttacatgttcatttttttgaaagattgtggtgcaaaggcttactctaataagtaaccttctggactatg

SEQ ID NO: 155008 - DNA, 3529 bp, Homo sapiens
  Payload ID: 10474
  Gene Symbol: MAP3K3
  Gene Name: mitogen-activated protein kinase kinase kinase 3
  Uniprot ID: Q99759
  ENST ID: ENST00000361733
  CDS Start-End: 321-2201
ggagaacggtggccggacggagagactgcgggtctgagggactggcgggcgggcgggccgagcggcgccgccgaggccgggctgggccgagcccaggagcgcccgggatgtagcgggccaccctgccgatgccacagcgcccggccgcgggcggagccggagccggagcctggggaggcggcgggggcccagagcgcagcccgcgccccccgcgcggagccaggcccgctgccgtccccgccgcccgggcccccggcatgcagccccggctgcggaggtgacactcacggaccttagccaccgccgccgccatcgccaccatggacgaacaggaggcattgaactcaatcatgaacgatctggtggccctccagatgaaccgacgtcaccggatgcctggatatgagaccatgaagaacaaagacacaggtcactcaaataggcagagtgacgtcagaatcaagttcgagcacaacggggagaggcgaattatagcgttcagccggcctgtgaaatatgaagatgtggagcacaaggtgacaacagtatttggacaacctcttgatctacattacatgaacaatgagctctccatcctgctgaaaaaccaagatgatcttgataaagcaattgacattttagatagaagctcaagcatgaaaagccttaggatattgctgttgtcccaggacagaaaccataacagttcctctccccactctggggtgtccagacaggtgcggatcaaggcttcccagtccgcaggggatataaatactatctaccagccccccgagcccagaagcaggcacctctctgtcagctcccagaaccctggccgaagctcacctccccctggctatgttcctgagcggcagcagcacattgcccggcaggggtcctacaccagcatcaacagtgagggggagttcatcccagagaccagcgagcagtgcatgctggatcccctgagcagtgcagaaaattccttgtctggaagctgccaatccttggacaggtcagcagacagcccatccttccggaaatcacgaatgtcccgtgcccagagcttccctgacaacagacaggaatactcagatcgggaaactcagctttatgacaaaggggtcaaaggtggaacctacccccggcgctaccacgtgtctgtgcaccacaaggactacagtgatggcagaagaacatttccccgaatacggcgtcatcaaggcaacttgttcaccctggtgccctccagccgctccctgagcacaaatggcgagaacatgggtctggctgtgcaatacctggacccccgtgggcgcctgcggagtgcggacagcgagaatgccctctctgtgcaggagaggaatgtgccaaccaagtctcccagtgcccccatcaactggcgccggggaaagctcctgggccagggtgccttcggcagggtctatttgtgctatgacgtggacacgggacgtgaacttgcttccaagcaggtccaatttgatccagacagtcctgagacaagcaaggaggtgagtgctctggagtgcgagatccagttgctaaagaacttgcagcatgagcgcatcgtgcagtactatggctgtctgcgggaccgcgctgagaagaccctgaccatcttcatggagtacatgccagggggctcggtgaaagaccagttgaaggcttacggtgctctgacagagagcgtgacccgaaagtacacgcggcagatcctggagggcatgtcctacctgcacagcaacatgattgttcaccgggacattaagggagccaacatcctccgagactctgctgggaatgtaaagctgggggactttggggccagcaaacgcctgcagacgatctgtatgtcggggacgggcatgcgctccgtcactggcacaccctactggatgagccctgaggtgatcagcggcgagggctatggaaggaaagcagacgtgtggagcctgggctgcactgtggtggagatgctgacagagaaaccaccgtgggcagagtatgaagctatggccgccatcttcaagattgccacccagcccaccaatcctcagctgccctcccacatctctgaacatggccgggacttcctgaggcgcatttttgtggaggctcgccagagaccttcagctgaggagctgctcacacaccactttgcacagctcatgtactgagctctcacggccacacagctgccggtcgccctttgctgcatggcagggggctgctgctgggctcagtgaagttgctgcttctcccaggcaaggctgtggaccatggagtggcagcccagccagcgtcggtctgtgccccttccgccactggggctcagagccggggtggggtggctgcagcctcaggactgggagcccccagcctgtcagatccaggagctccagtgtcctgagctcagcgtggaggggtaggggctgggaacagtgtgcaaggcagccgtgggccccaccctcggggatgtgtcctgacactgcaattggcaccgaagcccagagggtctgggggcacaagactgacgccagggtatgaagagtgttattttcattcaaagtgttattttgtttttccttccaatgtctggagaccaccagggcatctctgggctggatgagctcccacaagcctgagggaaaggccagcactcgctagcagtggcaggcagaggcccaggctgccgtcccctagagtcccaggttggctctgccagtcctgtcctttaccaaagatgaatgaagcaaatgtcatgctgccttattcagggaaggaggagcctgtcctgcctgtggccatgaccctgcctctcccaggcaggggcccgcgatgtggaactgctgccactgaggggggatccagttttgtcaatgcagttgtctctgttttacaagttggagtcactcttatgctgtacccagtttctaaactggagactgtgtgtgccctctgggctctgagtacccctgctttgggcttgggcctaggctgcattgaaaagagctgaaggttgtggcctttgcgctcctggcccagcctttgttccccactggagcagaaggggagatggacgacacggtcggggcatctggcctggccagtgccctgatcccagagagcccgaggaggtgtctcaggctgcctgagtcgtgacctgctaggccagagcccactccatctggtagaagggaaagcccatatgctaccaccagctgtgtccaaaaccgccagctctgttcttcctcagccagcctcgcccatccccttgaggtctcagcccctttcccttgtagctcctcccctggagggggaatggcagcaggggttggggaaacagcatctccaagcagcttagagttggccatatttacctcagcctgggcgctggtcctttcttccggcccctcccctccaaaatgtgcctattgctagagctcctccctctcaacacccagtttccttgggagttgtcattaaaggaaaaaaaaaaaaaaaa

SEQ ID NO: 155009 - DNA, 4818 bp, Homo sapiens
  Payload ID: 10474
  Gene Symbol: MAP3K3
  Gene Name: mitogen-activated protein kinase kinase kinase 3
  Uniprot ID: Q99759
  ENST ID: ENST00000361357
  CDS Start-End: 319-2292
agaacggtggccggacggagagactgcgggtctgagggactggcgggcgggcgggccgagcggcgccgccgaggccgggctgggccgagcccaggagcgcccgggatgtagcgggccaccctgccgatgccacagcgcccggccgcgggcggagccggagccggagcctggggaggcggcgggggcccagagcgcagcccgcgccccccgcgcggagccaggcccgctgccgtccccgccgcccgggcccccggcatgcagccccggctgcggaggtgacactcacggaccttagccaccgccgccgccatcgccaccatggacgaacaggaggcattgaactcaatcatgaacgatctggtggccctccagatgaaccgacgtcaccggatgcctggatatgagaccatgaagaacaaagacacaggtcactcaaataggcagaaaaaacacaacagcagcagctcagcccttctgaacagccccacagtaacaacaagctcatgtgcaggggccagtgagaaaaagaaatttttgagtgacgtcagaatcaagttcgagcacaacggggagaggcgaattatagcgttcagccggcctgtgaaatatgaagatgtggagcacaaggtgacaacagtatttggacaacctcttgatctacattacatgaacaatgagctctccatcctgctgaaaaaccaagatgatcttgataaagcaattgacattttagatagaagctcaagcatgaaaagccttaggatattgctgttgtcccaggacagaaaccataacagttcctctccccactctggggtgtccagacaggtgcggatcaaggcttcccagtccgcaggggatataaatactatctaccagccccccgagcccagaagcaggcacctctctgtcagctcccagaaccctggccgaagctcacctccccctggctatgttcctgagcggcagcagcacattgcccggcaggggtcctacaccagcatcaacagtgagggggagttcatcccagagaccagcgagcagtgcatgctggatcccctgagcagtgcagaaaattccttgtctggaagctgccaatccttggacaggtcagcagacagcccatccttccggaaatcacgaatgtcccgtgcccagagcttccctgacaacagacaggaatactcagatcgggaaactcagctttatgacaaaggggtcaaaggtggaacctacccccggcgctaccacgtgtctgtgcaccacaaggactacagtgatggcagaagaacatttccccgaatacggcgtcatcaaggcaacttgttcaccctggtgccctccagccgctccctgagcacaaatggcgagaacatgggtctggctgtgcaatacctggacccccgtgggcgcctgcggagtgcggacagcgagaatgccctctctgtgcaggagaggaatgtgccaaccaagtctcccagtgcccccatcaactggcgccggggaaagctcctgggccagggtgccttcggcagggtctatttgtgctatgacgtggacacgggacgtgaacttgcttccaagcaggtccaatttgatccagacagtcctgagacaagcaaggaggtgagtgctctggagtgcgagatccagttgctaaagaacttgcagcatgagcgcatcgtgcagtactatggctgtctgcgggaccgcgctgagaagaccctgaccatcttcatggagtacatgccagggggctcggtgaaagaccagttgaaggcttacggtgctctgacagagagcgtgacccgaaagtacacgcggcagatcctggagggcatgtcctacctgcacagcaacatgattgttcaccgggacattaagggagccaacatcctccgagactctgctgggaatgtaaagctgggggactttggggccagcaaacgcctgcagacgatctgtatgtcggggacgggcatgcgctccgtcactggcacaccctactggatgagccctgaggtgatcagcggcgagggctatggaaggaaagcagacgtgtggagcctgggctgcactgtggtggagatgctgacagagaaaccaccgtgggcagagtatgaagctatggccgccatcttcaagattgccacccagcccaccaatcctcagctgccctcccacatctctgaacatggccgggacttcctgaggcgcatttttgtggaggctcgccagagaccttcagctgaggagctgctcacacaccactttgcacagctcatgtactgagctctcacggccacacagctgccggtcgccctttgctgcatggcagggggctgctgctgggctcagtgaagttgctgcttctcccaggcaaggctgtggaccatggagtggcagcccagccagcgtcggtctgtgccccttccgccactggggctcagagccggggtggggtggctgcagcctcaggactgggagcccccagcctgtcagatccaggagctccagtgtcctgagctcagcgtggaggggtaggggctgggaacagtgtgcaaggcagccgtgggccccaccctcggggatgtgtcctgacactgcaattggcaccgaagcccagagggtctgggggcacaagactgacgccagggtatgaagagtgttattttcattcaaagtgttattttgtttttccttccaatgtctggagaccaccagggcatctctgggctggatgagctcccacaagcctgagggaaaggccagcactcgctagcagtggcaggcagaggcccaggctgccgtcccctagagtcccaggttggctctgccagtcctgtcctttaccaaagatgaatgaagcaaatgtcatgctgccttattcagggaaggaggagcctgtcctgcctgtggccatgaccctgcctctcccaggcaggggcccgcgatgtggaactgctgccactgaggggggatccagttttgtcaatgcagttgtctctgttttacaagttggagtcactcttatgctgtacccagtttctaaactggagactgtgtgtgccctctgggctctgagtacccctgctttgggcttgggcctaggctgcattgaaaagagctgaaggttgtggcctttgcgctcctggcccagcctttgttccccactggagcagaaggggagatggacgacacggtcggggcatctggcctggccagtgccctgatcccagagagcccgaggaggtgtctcaggctgcctgagtcgtgacctgctaggccagagcccactccatctggtagaagggaaagcccatatgctaccaccagctgtgtccaaaaccgccagctctgttcttcctcagccagcctcgcccatccccttgaggtctcagcccctttcccttgtagctcctcccctggagggggaatggcagcaggggttggggaaacagcatctccaagcagcttagagttggccatatttacctcagcctgggcgctggtcctttcttccggcccctcccctccaaaatgtgcctattgctagagctcctccctctcaacacccagtttccttgggagttgtcattaaaggaaaaaaaaaaaaaaaaaagccagtgcccagggatgggcatctccagggagctggggattagtgccaggcagccctgccagccatgcctacatccccatgggcacagaacaagccaaagccttcgttgtatgttgacgatgcacttttatgaatgtagtttctatcgctgtttttagccttttcacatcatgtaatgtgaggccttgtacttgttaatttatatctcagatcatatttgatggtttttatatatatcaattctagactgttacaggtgacggacgcctcaagagagagaagagaaaatgaaagcagctggttttgcagaagtgtgtgtcgcatgcgccagttgggcctggaccctcctgtgtccatccctgttcccccaggggctctatcagcccctgtaccccacactgccctctgaagacaacacaggctcctgcttccacctcggcccttgcccagggtggggcctggccctcatcttgaccaaagctgctgtgtggcagctcggcctctctacgaccccatcttggtggctgcacactcttcctggcccgcacccccatccccagtccctgttccccaagaggatacagagcacggtgctggctgactcaactgtgcgtcccaggttcagggtcttacagagctccaccccctggggtcttacctcactgggaatgtgttttgaaaatgaatttgaagacaagccaacaaaccctgcactccaaaaaagcaaaacagaccctaatttttttgtgccaaaaactgtggacatgctggctcagcatcctcaggaccaagttgttgcttaatttattgttttttaataactaatccagataaaaagttgtggggcttcagggtgacctgggcccaaaggttctgaagggcagttcctggcagccccaggcttgctgtgggaaggggccgtgccgtcactttctcatcattccatggggtgtgtctgcctgggccaactctgcatggagaggccagggctggggacagtccgcactctgccaccctcctgccccttccacccaccccagctctatgtctgtgtctgaattgtggatcgtgcagccatggttattgtggaactgtggaacctgcagccatagttatttgactatatcttgaccgagggcttgcagtgcaaagccaggccagtgttgcgcattacttacaataaaagggatcattta

SEQ ID NO: 155010 - DNA, 3352 bp, Homo sapiens
  Payload ID: 10474
  Gene Symbol: MAP3K3
  Gene Name: mitogen-activated protein kinase kinase kinase 3
  Uniprot ID: Q99759
  ENST ID: ENST00000579585
  CDS Start-End: 67-2040
ttgtttttcggagcgttcctgaggtgacactcacggaccttagccaccgccgccgccatcgccaccatggacgaacaggaggcattgaactcaatcatgaacgatctggtggccctccagatgaaccgacgtcaccggatgcctggatatgagaccatgaagaacaaagacacaggtcactcaaataggcagaaaaaacacaacagcagcagctcagcccttctgaacagccccacagtaacaacaagctcatgtgcaggggccagtgagaaaaagaaatttttgagtgacgtcagaatcaagttcgagcacaacggggagaggcgaattatagcgttcagccggcctgtgaaatatgaagatgtggagcacaaggtgacaacagtatttggacaacctcttgatctacattacatgaacaatgagctctccatcctgctgaaaaaccaagatgatcttgataaagcaattgacattttagatagaagctcaagcatgaaaagccttaggatattgctgttgtcccaggacagaaaccataacagttcctctccccactctggggtgtccagacaggtgcggatcaaggcttcccagtccgcaggggatataaatactatctaccagccccccgagcccagaagcaggcacctctctgtcagctcccagaaccctggccgaagctcacctccccctggctatgttcctgagcggcagcagcacattgcccggcaggggtcctacaccagcatcaacagtgagggggagttcatcccagagaccagcgagcagtgcatgctggatcccctgagcagtgcagaaaattccttgtctggaagctgccaatccttggacaggtcagcagacagcccatccttccggaaatcacgaatgtcccgtgcccagagcttccctgacaacagacaggaatactcagatcgggaaactcagctttatgacaaaggggtcaaaggtggaacctacccccggcgctaccacgtgtctgtgcaccacaaggactacagtgatggcagaagaacatttccccgaatacggcgtcatcaaggcaacttgttcaccctggtgccctccagccgctccctgagcacaaatggcgagaacatgggtctggctgtgcaatacctggacccccgtgggcgcctgcggagtgcggacagcgagaatgccctctctgtgcaggagaggaatgtgccaaccaagtctcccagtgcccccatcaactggcgccggggaaagctcctgggccagggtgccttcggcagggtctatttgtgctatgacgtggacacgggacgtgaacttgcttccaagcaggtccaatttgatccagacagtcctgagacaagcaaggaggtgagtgctctggagtgcgagatccagttgctaaagaacttgcagcatgagcgcatcgtgcagtactatggctgtctgcgggaccgcgctgagaagaccctgaccatcttcatggagtacatgccagggggctcggtgaaagaccagttgaaggcttacggtgctctgacagagagcgtgacccgaaagtacacgcggcagatcctggagggcatgtcctacctgcacagcaacatgattgttcaccgggacattaagggagccaacatcctccgagactctgctgggaatgtaaagctgggggactttggggccagcaaacgcctgcagacgatctgtatgtcggggacgggcatgcgctccgtcactggcacaccctactggatgagccctgaggtgatcagcggcgagggctatggaaggaaagcagacgtgtggagcctgggctgcactgtggtggagatgctgacagagaaaccaccgtgggcagagtatgaagctatggccgccatcttcaagattgccacccagcccaccaatcctcagctgccctcccacatctctgaacatggccgggacttcctgaggcgcatttttgtggaggctcgccagagaccttcagctgaggagctgctcacacaccactttgcacagctcatgtactgagctctcacggccacacagctgccggtcgccctttgctgcatggcagggggctgctgctgggctcagtgaagttgctgcttctcccaggcaaggctgtggaccatggagtggcagcccagccagcgtcggtctgtgccccttccgccactggggctcagagccggggtggggtggctgcagcctcaggactgggagcccccagcctgtcagatccaggagctccagtgtcctgagctcagcgtggaggggtaggggctgggaacagtgtgcaaggcagccgtgggccccaccctcggggatgtgtcctgacactgcaattggcaccgaagcccagagggtctgggggcacaagactgacgccagggtatgaagagtgttattttcattcaaagtgttattttgtttttccttccaatgtctggagaccaccagggcatctctgggctggatgagctcccacaagcctgagggaaaggccagcactcgctagcagtggcaggcagaggcccaggctgccgtcccctagagtcccaggttggctctgccagtcctgtcctttaccaaagatgaatgaagcaaatgtcatgctgccttattcagggaaggaggagcctgtcctgcctgtggccatgaccctgcctctcccaggcaggggcccgcgatgtggaactgctgccactgaggggggatccagttttgtcaatgcagttgtctctgttttacaagttggagtcactcttatgctgtacccagtttctaaactggagactgtgtgtgccctctgggctctgagtacccctgctttgggcttgggcctaggctgcattgaaaagagctgaaggttgtggcctttgcgctcctggcccagcctttgttccccactggagcagaaggggagatggacgacacggtcggggcatctggcctggccagtgccctgatcccagagagcccgaggaggtgtctcaggctgcctgagtcgtgacctgctaggccagagcccactccatctggtagaagggaaagcccatatgctaccaccagctgtgtccaaaaccgccagctctgttcttcctcagccagcctcgcccatccccttgaggtctcagcccctttcccttgtagctcctcccctggagggggaatggcagcaggggttggggaaacagcatctccaagcagcttagagttggccatatttacctcagcctgggcgctggtcctttcttccggcccctcccctccaaaatgtgcctattgctagagctcctccctctcaacacccagtttccttgggagttgtcattaaagg

SEQ ID NO: 155011 - DNA, 2016 bp, Homo sapiens
  Payload ID: 10474
  Gene Symbol: MAP3K3
  Gene Name: mitogen-activated protein kinase kinase kinase 3
  ENST ID: ENST00000577395
  CDS Start-End: 51-1919
tgcggaggtgacactcacggaccttagccaccgccgccgccatcgccaccatggacgaacaggaggcattgaactcaatcatgaacgatctggtggccctccagatgaaccgacgtcaccggatgcctggatatgagaccatgaagaacaaagacacaggtcactcaaataggcagagtgacgtcagaatcaagttcgagcacaacggggagaggcgaattatagcgttcagccggcctgtgaaatatgaagatgtggagcacaaggtgacaacagtatttggacaacctcttgatctacattacatgaacaatgagctctccatcctgctgaaaaaccaagatgatcttgataaagcaattgacattttagatagaagctcaagcatgaaaagccttaggatattgctgttgtcccaggacagaaaccataacagttcctctccccactctggggtgtccagacaggtgcggatcaaggcttcccagtccgcaggggatataaatactatctaccagccccccgagcccagaagcaggcacctctctgtcagctcccagaaccctggccgaagctcacctccccctggctatgttcctgagcggcagcagcacattgcccggcaggggtcctacaccagcatcaacagtgagggggagttcatcccagagaccagcgagcagtgcatgctggatcccctgagcagtgcagaaaattccttgtctggaagctgccaatccttggacagcccatccttccggaaatcacgaatgtcccgtgcccagagcttccctgacaacagacaggaatactcagatcgggaaactcagctttatgacaaaggggtcaaaggtggaacctacccccggcgctaccacgtgtctgtgcaccacaaggactacagtgatggcagaagaacatttccccgaatacggcgtcatcaaggcaacttgttcaccctggtgccctccagccgctccctgagcacaaatggcgagaacatgggtctggctgtgcaatacctggacccccgtgggcgcctgcggagtgcggacagcgagaatgccctctctgtgcaggagaggaatgtgccaaccaagtctcccagtgcccccatcaactggcgccggggaaagctcctgggccagggtgccttcggcagggtctatttgtgctatgacgtggacacgggacgtgaacttgcttccaagcaggtccaatttgatccagacagtcctgagacaagcaaggaggtgagtgctctggagtgcgagatccagttgctaaagaacttgcagcatgagcgcatcgtgcagtactatggctgtctgcgggaccgcgctgagaagaccctgaccatcttcatggagtacatgccagggggctcggtgaaagaccagttgaaggcttacggtgctctgacagagagcgtgacccgaaagtacacgcggcagatcctggagggcatgtcctacctgcacagcaacatgattgttcaccgggacattaagggagccaacatcctccgagactctgctgggaatgtaaagctgggggactttggggccagcaaacgcctgcagacgatctgtatgtcggggacgggcatgcgctccgtcactggcacaccctactggatgagccctgaggtgatcagcggcgagggctatggaaggaaagcagacgtgtggagcctgggctgcactgtggtggagatgctgacagagaaaccaccgtgggcagagtatgaagctatggccgccatcttcaagattgccacccagcccaccaatcctcagctgccctcccacatctctgaacatggccgggacttcctgaggcgcatttttgtggaggctcgccagagaccttcagctgaggagctgctcacacaccactttgcacagctcatgtactgagctctcacggccacacagctgccggtcgccctttgctgcatggcagggggctgctgctgggctcagtgaagttgctgcttctcccaggcaaggctgt

SEQ ID NO: 155012 - DNA, 2024 bp, Homo sapiens
  Payload ID: 10474
  Gene Symbol: MAP3K3
  Gene Name: mitogen-activated protein kinase kinase kinase 3
  ENST ID: ENST00000577597
  CDS Start-End: 51-221
tgcggaggtgacactcacggaccttagccaccgccgccgccatcgccaccatggacgaacaggaggcattgaactcaatcatgaacgatctggtggccctccagatgaaccgacgtcaccggatgcctggatatgagaccatgaagaacaaagacacaggtcactcaaatagagtgacgtcagaatcaagttcgagcacaacggggagaggcgaattatagcgttcagccggcctgtgaaatatgaagatgtggagcacaaggtgacaacagtatttggacaacctcttgatctacattacatgaacaatgagctctccatcctgctgaaaaaccaagatgatcttgataaagcaattgacattttagatagaagctcaagcatgaaaagccttaggatattgctgttgtcccaggacagaaaccataacagttcctctccccactctggggtgtccagacaggtgcggatcaaggcttcccagtccgcaggggatataaatactatctaccagccccccgagcccagaagcaggcacctctctgtcagctcccagaaccctggccgaagctcacctccccctggctatgttcctgagcggcagcagcacattgcccggcaggggtcctacaccagcatcaacagtgagggggagttcatcccagagaccagcgagcagtgcatgctggatcccctgagcagtgcagaaaattccttgtctggaagctgccaatccttggacaggtcagcagacagcccatccttccggaaatcacgaatgtcccgtgcccagagcttccctgacaacagacaggaatactcagatcgggaaactcagctttatgacaaaggggtcaaaggtggaacctacccccggcgctaccacgtgtctgtgcaccacaaggactacagtgatggcagaagaacatttccccgaatacggcgtcatcaaggcaacttgttcaccctggtgccctccagccgctccctgagcacaaatggcgagaacatgggtctggctgtgcaatacctggacccccgtgggcgcctgcggagtgcggacagcgagaatgccctctctgtgcaggagaggaatgtgccaaccaagtctcccagtgcccccatcaactggcgccggggaaagctcctgggccagggtgccttcggcagggtctatttgtgctatgacgtggacacgggacgtgaacttgcttccaagcaggtccaatttgatccagacagtcctgagacaagcaaggaggtgagtgctctggagtgcgagatccagttgctaaagaacttgcagcatgagcgcatcgtgcagtactatggctgtctgcgggaccgcgctgagaagaccctgaccatcttcatggagtacatgccagggggctcggtgaaagaccagttgaaggcttacggtgctctgacagagagcgtgacccgaaagtacacgcggcagatcctggagggcatgtcctacctgcacagcaacatgattgttcaccgggacattaagggagccaacatcctccgagactctgctgggaatgtaaagctgggggactttggggccagcaaacgcctgcagacgatctgtatgtcggggacgggcatgcgctccgtcactggcacaccctactggatgagccctgaggtgatcagcggcgagggctatggaaggaaagcagacgtgtggagcctgggctgcactgtggtggagatgctgacagagaaaccaccgtgggcagagtatgaagctatggccgccatcttcaagattgccacccagcccaccaatcctcagctgccctcccacatctctgaacatggccgggacttcctgaggcgcatttttgtggaggctcgccagagaccttcagctgaggagctgctcacacaccactttgcacagctcatgtactgagctctcacggccacacagctgccggtcgccctttgctgcatggcagggggctgctgctgggctcagtgaagttgctgcttctcccaggcaaggctgt

SEQ ID NO: 155013 - DNA, 2480 bp, Homo sapiens
  Payload ID: 10474
  Gene Symbol: MAP3K3
  Gene Name: mitogen-activated protein kinase kinase kinase 3
  ENST ID: ENST00000584573
  CDS Start-End: 336-2297
gagcgttcctgaggtggagaacggtggccggacggagagactgcgggtctgagggactggcgggcgggcgggccgagcggcgccgccgaggccgggctgggccgagcccaggagcgcccgggatgtagcgggccaccctgccgatgccacagcgcccggccgcgggcggagccggagccggagcctggggaggcggcgggggcccagagcgcagcccgcgccccccgcgcggagccaggcccgctgccgtccccgccgcccgggcccccggcatgcagccccggctgcggaggtgacactcacggaccttagccaccgccgccgccatcgccaccatggacgaacaggaggcattgaactcaatcatgaacgatctggtggccctccagatgaaccgacgtcaccggatgcctggatatgagaccatgaagaacaaagacacaggtcactcaaataggcagaaaaaacacaacagcagcagctcagcccttctgaacagccccacagtaacaacaagctcatgtgcaggggccagtgagaaaaagaaatttttgagtgacgtcagaatcaagttcgagcacaacggggagaggcgaattatagcgttcagccggcctgtgaaatatgaagatgtggagcacaaggtgacaacagtatttggacaacctcttgatctacattacatgaacaatgagctctccatcctgctgaaaaaccaagatgatcttgataaagcaattgacattttagatagaagctcaagcatgaaaagccttaggatattgctgttgtcccaggacagaaaccataacagttcctctccccactctggggtgtccagacaggtgcggatcaaggcttcccagtccgcaggggatataaatactatctaccagccccccgagcccagaagcaggcacctctctgtcagctcccagaaccctggccgaagctcacctccccctggctatgttcctgagcggcagcagcacattgcccggcaggggtcctacaccagcatcaacagtgagggggagttcatcccagagaccagcgagcagtgcatgctggatcccctgagcagtgcagaaaattccttgtctggaagctgccaatccttggacagcccatccttccggaaatcacgaatgtcccgtgcccagagcttccctgacaacagacaggaatactcagatcgggaaactcagctttatgacaaaggggtcaaaggtggaacctacccccggcgctaccacgtgtctgtgcaccacaaggactacagtgatggcagaagaacatttccccgaatacggcgtcatcaaggcaacttgttcaccctggtgccctccagccgctccctgagcacaaatggcgagaacatgggtctggctgtgcaatacctggacccccgtgggcgcctgcggagtgcggacagcgagaatgccctctctgtgcaggagaggaatgtgccaaccaagtctcccagtgcccccatcaactggcgccggggaaagctcctgggccagggtgccttcggcagggtctatttgtgctatgacgtggacacgggacgtgaacttgcttccaagcaggtccaatttgatccagacagtcctgagacaagcaaggaggtgagtgctctggagtgcgagatccagttgctaaagaacttgcagcatgagcgcatcgtgcagtactatggctgtctgcgggaccgcgctgagaagaccctgaccatcttcatggagtacatgccagggggctcggtgaaagaccagttgaaggcttacggtgctctgacagagagcgtgacccgaaagtacacgcggcagatcctggagggcatgtcctacctgcacagcaacatgattgttcaccgggacattaagggagccaacatcctccgagactctgctgggaatgtaaagctgggggactttggggccagcaaacgcctgcagacgatctgtatgtcggggacgggcatgcgctccgtcactggcacaccctactggatgagccctgaggtgatcagcggcgagggctatggaaggaaagcagacgtgtggagcctgggctgcactgtggtggagatgctgacagagaaaccaccgtgggcagagtatgaagctatggccgccatcttcaagattgccacccagcccaccaatcctcagctgccctcccacatctctgaacatggccgggacttcctgaggcgcatttttgtggaggctcgccagagaccttcagctgaggagctgctcacacaccactttgcacagctcatgtactgagctctcacggccacacagctgccggtcgccctttgctgcatggcagggggctgctgctgggctcagtgaagttgctgcttctcccaggcaaggctgtggaccatggagtggcagcccagccagcgtcggtctgtgccccttccgccactggggctcagagccggggtggggtggctgcagcct

SEQ ID NO: 155014 - DNA, 580 bp, Homo sapiens
  Payload ID: 10474
  Gene Symbol: MAP3K3
  Gene Name: mitogen-activated protein kinase kinase kinase 3
  ENST ID: ENST00000581732
  CDS Start-End: 1-128
atttgtgctatgacgtggacacgggacgtgaacttgcttccaagcaggtccaatttgatccagacagtcctgagacaagcaagttcccaaggcagatccctgtgaggccactaactagggcaagctgagctgaacccaggcgggcagaactagggccctgagagctgaggcgaccactgacccctcccctaggaggtgagtgctctggagtgcgagatccagttgctaaagaacttgcagcatgagcgcatcgtgcagtactatggctgtctgcgggaccgcgctgagaagaccctgaccatcttcatggagtacatgccagggggctcggtgaaagaccagttgaaggcttacggtgctctgacagagagcgtgacccgaaagtacacgcggcagatcctggagggcatgtcctacctgcacagcaacatgattgttcaccgggacattaagggagccaacatcctccgagactctgctgggaatgtaaagctgggggactttggggccagcaaacgcctgcagacgatctgtatgtcggggacgggcatgcgctccgtcactggcacaccctactgga

SEQ ID NO: 155015 - DNA, 678 bp, Homo sapiens
  Payload ID: 10474
  Gene Symbol: MAP3K3
  Gene Name: mitogen-activated protein kinase kinase kinase 3
  ENST ID: ENST00000585302
  CDS Start-End: 1-95
aggcttcccagtccgcaggggatataaatactatctaccagccccccgagcccagaagcaggcacctctctgtcagtagaattgcttcaaattgaagtgtcctctgaagatcctgagctgagcttgagagatctaagcactgatcctgttgctgagtttgtctgtttgcaatatgcctcctgagggagttacaggaaaaatatgtttctgaggtactgactttgccttactgagtaacttctggaatccaggcaagtactggtaatgtttgagtgcttgctgtgtgctggtacagacaagactttctggaagggaaacagagacagaagtcaaggctcccagaaccctggccgaagctcacctccccctggctatgttcctgagcggcagcagcacattgcccggcaggggtcctacaccagcatcaacagtgagggggagttcatcccagagaccagcgagcagtgcatgctggatcccctgagcagtgcagaaaattccttgtctggaagctgccaatccttggacagcccatccttccggaaatcacgaatgtcccgtgcccagagcttccctgacaacagacaggaatactcagatcgggaaactcagctttatgacaaaggggtcaaaggtggaacctacccccggcgctaccacgtgtctgtgcaccacaag

SEQ ID NO: 155016 - DNA, 5295 bp, Homo sapiens
  Payload ID: 10475
  Gene Symbol: MAP3K4
  Gene Name: mitogen-activated protein kinase kinase kinase 4
  ENST ID: ENST00000348824
  CDS Start-End: 119-4783
cctgcggcggggtagaggcggaggcggagtcgagtcactcccgcacttcggggctccggtgccccgcgccaggctgcagcttactgcccgccgcggccatgcggggctccgtgcacggatgagagaagccgctgccgcgctggtccctcctcccgcctttgccgtcacgcctgccgccgccatggaggagccgccgccaccgccgccgccgccaccaccgccaccggaacccgagaccgagtcagaacccgagtgctgcttggcggcgaggcaagagggcacattgggagattcagcttgcaagagtcctgaatctgatctagaagacttctccgatgaaacaaatacagagaatctttatggtacctctccccccagcacacctcgacagatgaaacgcatgtcaaccaaacatcagaggaataatgtggggaggccagccagtcggtctaatttgaaagaaaaaatgaatgcaccaaatcagcctccacataaagacactggaaaaacagtggagaatgtggaagaatacagctataagcaggagaaaaagatccgagcagctcttagaacaacagagcgtgatcgtaaaaaaaatgtacagtgctcattcatgttagactcagtgggtggatctttgccaaaaaaatcaattccagatgtggatctcaataagccttacctcagccttggctgtagcaatgctaagcttccagtatctgtgcccatgcctatagccagacctgcacgccagacttctaggactgactgtccagcagatcgtttaaagttttttgaaactttacgacttttgctaaagcttacctcagtctcaaagaaaaaagacagggagcaaagaggacaagaaaatacgtctggtttctggcttaaccgatctaacgaactgatctggttagagctacaagcctggcatgcaggacggacaattaacgaccaggacttctttttatatacagcccgtcaagccatcccagatattattaatgaaatccttactttcaaagtcgactatgggagcttcgcctttgttagagatagagctggttttaatggtacttcagtagaagggcagtgcaaagccactcctggaacaaagattgtaggttactcaacacatcatgagcatctccaacgccagagggtctcatttgagcaggtaaaacggataatggagctgctagagtacatagaagcactttatccatcattgcaggctcttcagaaggactatgaaaaatatgctgcaaaagacttccaggacagggtgcaggcactctgtttgtggttaaacatcacaaaagacttaaatcagaaattaaggattatgggcactgttttgggcatcaagaatttatcagacattggctggccagtgtttgaaatcccttcccctcgaccatccaaaggtaatgagccggagtatgagggtgatgacacagaaggagaattaaaggagttggaaagtagtacggatgagagtgaagaagaacaaatctctgatcctagggtaccggaaatcagacagcccatagataacagcttcgacatccagtcgcgggactgcatatccaagaagcttgagaggctcgaatctgaggatgattctcttggctggggagcaccagactggagcacagaagcaggctttagtagacattgtctgacttctatttatagaccatttgtagacaaagcactgaagcagatggggttaagaaagttaattttaagacttcacaagctaatggatggttccttgcaaagggcacgtatagcattggtaaagaacgatcgtccagtggagttttctgaatttccagatcccatgtggggttcagattatgtgcagttgtcaaggacaccaccttcatctgaggagaaatgcagtgctgtgtcgtgggaggagctgaaggccatggatttaccttcattcgaacctgccttcctagttctctgccgagtccttctgaatgtcatacatgagtgtctgaagttaagattggagcagagacctgctggagaaccatctctcttgagtattaagcagctggtgagagagtgtaaggaggtcctgaagggcggcctgctgatgaagcagtactaccagttcatgctgcaggaggttctggaggacttggagaagcccgactgcaacattgacgcttttgaagaggatctacataaaatgcttatggtgtattttgattacatgagaagctggatccaaatgctacagcaattacctcaagcatcgcatagtttaaaaaatctgttagaagaagaatggaatttcaccaaagaaataactcattacatacggggaggagaagcacaggccgggaagcttttctgtgacattgcaggaatgctgctgaaatctacaggaagttttttagaatttggcttacaggagagctgtgctgaattttggactagtgcggatgacagcagtgcttccgacgaaatcaggaggtctgttatagagatcagtcgagccctgaaggagctcttccatgaagccagagaaagggcttccaaagcacttggatttgctaaaatgttgagaaaggacctggaaatagcagcagaattcaggctttcagccccagttagagacctcctggatgttctgaaatcaaaacagtatgtcaaggtgcaaattcctgggttagaaaacttgcaaatgtttgttccagacactcttgctgaggagaagagtattattttgcagttactcaatgcagctgcaggaaaggactgttcaaaagattcagatgacgtactcatcgatgcctatctgcttctgaccaagcacggtgatcgagcccgtgattcagaggacagctggggcacctgggaggcacagcctgtcaaagtcgtgcctcaggtggagactgttgacaccctgagaagcatgcaggtggataatcttttactagttgtcatgcagtctgcgcatctcacaattcagagaaaagctttccagcagtccattgagggacttatgactctgtgccaggagcagacatccagtcagccggtcatcgccaaagctttgcagcagctgaagaatgatgcattggagctatgcaacaggataagcaatgccattgaccgcgtggaccacatgttcacatcagaatttgatgctgaggttgatgaatctgaatctgtcaccttgcaacagtactaccgagaagcaatgattcaggggtacaattttggatttgagtatcataaagaagttgttcgtttgatgtctggggagtttagacagaagataggagacaaatatataagctttgcccggaagtggatgaattatgtcctgactaaatgtgagagtggtagaggtacaagacccaggtgggcgactcaaggatttgattttctacaagcaattgaacctgcctttatttcagctttaccagaagatgacttcttgagtttacaagccttgatgaatgaatgcattggccatgtcataggaaaaccacacagtcctgttacagccattcatcggaacagcccccgtcctatgaaggtacctcgatgccatagtgaccctcctaacccacacctcattatccccactccagagggattcaggggttccagcgttcctgaaaatgatcgattggcttccatagctgctgaattgcagtttaggtccctgagtcgtcactcaagccccacggaggagcgagatgaaccagcatatccaagaggagattcaagtgggtccacaagaagaagttgggaacttcggacactaatcagccagagtaaagatactgcttctaaactaggacccatagaagctatccagaagtcagtccgattgtttgaagaaaagaggtaccgagaaatgaggagaaagaatatcattggtcaagtttgtgatacgcctaagtcctatgataatgttatgcacgttggcttgaggaaggtgaccttcaaatggcaaagaggaaacaaaattggagaaggccagtatgggaaggtgtacacctgcatcagcgtcgacaccggggagctgatggccatgaaagagattcgatttcaacctaatgaccataagactatcaaggaaactgcagacgaattgaaaatattcgaaggcatcaaacaccccaatctggttcggtattttggtgtggagctccatagagaagaaatgtacatcttcatggagtactgcgatgaggggactttagaagaggtgtcaaggctgggacttcaggaacatgtgattaggctgtattcaaagcagatcaccattgcgatcaacgtcctccatgagcatggcatagtccaccgtgacattaaaggtgccaatatcttccttacctcatctggattaatcaaactgggagattttggatgttcagtaaagctcaaaaacaatgcccagaccatgcctggtgaagtgaacagcaccctggggacagcagcatacatggcacctgaagtcatcactcgtgccaaaggagagggccatgggcgtgcggccgacatctggagtctggggtgtgttgtcatagagatggtgactggcaagaggccttggcatgagtatgagcacaactttcaaattatgtataaagtggggatgggacataagccaccaatccctgaaagattaagccctgaaggaaaggacttcctttctcactgccttgagagtgacccaaagatgagatggaccgccagccagctcctcgaccattcgtttgtcaaggtttgcacagatgaagaatgaagcctagtagaatatggacttggaaaattctcttaatcactactgtatgtaatatttacataaagactgtgctgagaagcagtataagcctttttaaccttccaagactgaagactgcacaggtgacaagcgtcacttctcctgctgctcctgtttgtctgatgtggcaaaaggccctctggagggctggtggccacgaggttaaagaagctgcatgttaagtgccattactactgtacacggaccatcgcctctgtctcctccgtgtctcgcgcgactgagaaccgtgacatcagcgtagtgttttgacctttctaggttcaaaagaagttgtagtgttatcaggcgtcccataccttgtttttaatctcctgtttgttgagtgcactgactgtgaaacctttaccttttttgttgttgttggcaagctgcaggtttgtaatgcaaaaggctgattactgaaatttaagaaaaaggttcttttttcaataaatggtttattttaggaaagc

SEQ ID NO: 155017 - DNA, 5397 bp, Homo sapiens
  Payload ID: 10475
  Gene Symbol: MAP3K4
  Gene Name: mitogen-activated protein kinase kinase kinase 4
  Uniprot ID: Q9Y6R4
  ENST ID: ENST00000366919
  CDS Start-End: 206-4882
gatctgggaggcttgtccctcgccgcccaccgtagccccggcgctcggccggtcgccgtttccaagatggccgcggcgcgcacggctcctgcggcggggtagaggcggaggcggagtcgagtcactcccgcacttcggggctccggtgccccgcgccaggctgcagcttactgcccgccgcggccatgcggggctccgtgcacggatgagagaagccgctgccgcgctggtccctcctcccgcctttgccgtcacgcctgccgccgccatggaggagccgccgccaccgccgccgccgccaccaccgccaccggaacccgagaccgagtcagaacccgagtgctgcttggcggcgaggcaagagggcacattgggagattcagcttgcaagagtcctgaatctgatctagaagacttctccgatgaaacaaatacagagaatctttatggtacctctccccccagcacacctcgacagatgaaacgcatgtcaaccaaacatcagaggaataatgtggggaggccagccagtcggtctaatttgaaagaaaaaatgaatgcaccaaatcagcctccacataaagacactggaaaaacagtggagaatgtggaagaatacagctataagcaggagaaaaagatccgagcagctcttagaacaacagagcgtgatcgtaaaaaaaatgtacagtgctcattcatgttagactcagtgggtggatctttgccaaaaaaatcaattccagatgtggatctcaataagccttacctcagccttggctgtagcaatgctaagcttccagtatctgtgcccatgcctatagccagacctgcacgccagacttctaggactgactgtccagcagatcgtttaaagttttttgaaactttacgacttttgctaaagcttacctcagtctcaaagaaaaaagacagggagcaaagaggacaagaaaatacgtctggtttctggcttaaccgatctaacgaactgatctggttagagctacaagcctggcatgcaggacggacaattaacgaccaggacttctttttatatacagcccgtcaagccatcccagatattattaatgaaatccttactttcaaagtcgactatgggagcttcgcctttgttagagatagagctggttttaatggtacttcagtagaagggcagtgcaaagccactcctggaacaaagattgtaggttactcaacacatcatgagcatctccaacgccagagggtctcatttgagcaggtaaaacggataatggagctgctagagtacatagaagcactttatccatcattgcaggctcttcagaaggactatgaaaaatatgctgcaaaagacttccaggacagggtgcaggcactctgtttgtggttaaacatcacaaaagacttaaatcagaaattaaggattatgggcactgttttgggcatcaagaatttatcagacattggctggccagtgtttgaaatcccttcccctcgaccatccaaaggtaatgagccggagtatgagggtgatgacacagaaggagaattaaaggagttggaaagtagtacggatgagagtgaagaagaacaaatctctgatcctagggtaccggaaatcagacagcccatagataacagcttcgacatccagtcgcgggactgcatatccaagaagcttgagaggctcgaatctgaggatgattctcttggctggggagcaccagactggagcacagaagcaggctttagtagacattgtctgacttctatttatagaccatttgtagacaaagcactgaagcagatggggttaagaaagttaattttaagacttcacaagctaatggatggttccttgcaaagggcacgtatagcattggtaaagaacgatcgtccagtggagttttctgaatttccagatcccatgtggggttcagattatgtgcagttgtcaaggacaccaccttcatctgaggagaaatgcagtgctgtgtcgtgggaggagctgaaggccatggatttaccttcattcgaacctgccttcctagttctctgccgagtccttctgaatgtcatacatgagtgtctgaagttaagattggagcagagacctgctggagaaccatctctcttgagtattaagcagctggtgagagagtgtaaggaggtcctgaagggcggcctgctgatgaagcagtactaccagttcatgctgcaggaggttctggaggacttggagaagcccgactgcaacattgacgcttttgaagaggatctacataaaatgcttatggtgtattttgattacatgagaagctggatccaaatgctacagcaattacctcaagcatcgcatagtttaaaaaatctgttagaagaagaatggaatttcaccaaagaaataactcattacatacggggaggagaagcacaggccgggaagcttttctgtgacattgcaggaatgctgctgaaatctacaggaagttttttagaatttggcttacaggagagctgtgctgaattttggactagtgcggatgacagcagtgcttccgacgaaatcaggaggtctgttatagagatcagtcgagccctgaaggagctcttccatgaagccagagaaagggcttccaaagcacttggatttgctaaaatgttgagaaaggacctggaaatagcagcagaattcaggctttcagccccagttagagacctcctggatgttctgaaatcaaaacagtatgtcaaggtgcaaattcctgggttagaaaacttgcaaatgtttgttccagacactcttgctgaggagaagagtattattttgcagttactcaatgcagctgcaggaaaggactgttcaaaagattcagatgacgtactcatcgatgcctatctgcttctgaccaagcacggtgatcgagcccgtgattcagaggacagctggggcacctgggaggcacagcctgtcaaagtcgtgcctcaggtggagactgttgacaccctgagaagcatgcaggtggataatcttttactagttgtcatgcagtctgcgcatctcacaattcagagaaaagctttccagcagtccattgagggacttatgactctgtgccaggagcagacatccagtcagccggtcatcgccaaagctttgcagcagctgaagaatgatgcattggagctatgcaacaggataagcaatgccattgaccgcgtggaccacatgttcacatcagaatttgatgctgaggttgatgaatctgaatctgtcaccttgcaacagtactaccgagaagcaatgattcaggggtacaattttggatttgagtatcataaagaagttgttcgtttgatgtctggggagtttagacagaagataggagacaaatatataagctttgcccggaagtggatgaattatgtcctgactaaatgtgagagtggtagaggtacaagacccaggtgggcgactcaaggatttgattttctacaagcaattgaacctgcctttatttcagctttaccagaagatgacttcttgagtttacaagccttgatgaatgaatgcattggccatgtcataggaaaaccacacagtcctgttacaggtttgtaccttgccattcatcggaacagcccccgtcctatgaaggtacctcgatgccatagtgaccctcctaacccacacctcattatccccactccagagggattcaggggttccagcgttcctgaaaatgatcgattggcttccatagctgctgaattgcagtttaggtccctgagtcgtcactcaagccccacggaggagcgagatgaaccagcatatccaagaggagattcaagtgggtccacaagaagaagttgggaacttcggacactaatcagccagagtaaagatactgcttctaaactaggacccatagaagctatccagaagtcagtccgattgtttgaagaaaagaggtaccgagaaatgaggagaaagaatatcattggtcaagtttgtgatacgcctaagtcctatgataatgttatgcacgttggcttgaggaaggtgaccttcaaatggcaaagaggaaacaaaattggagaaggccagtatgggaaggtgtacacctgcatcagcgtcgacaccggggagctgatggccatgaaagagattcgatttcaacctaatgaccataagactatcaaggaaactgcagacgaattgaaaatattcgaaggcatcaaacaccccaatctggttcggtattttggtgtggagctccatagagaagaaatgtacatcttcatggagtactgcgatgaggggactttagaagaggtgtcaaggctgggacttcaggaacatgtgattaggctgtattcaaagcagatcaccattgcgatcaacgtcctccatgagcatggcatagtccaccgtgacattaaaggtgccaatatcttccttacctcatctggattaatcaaactgggagattttggatgttcagtaaagctcaaaaacaatgcccagaccatgcctggtgaagtgaacagcaccctggggacagcagcatacatggcacctgaagtcatcactcgtgccaaaggagagggccatgggcgtgcggccgacatctggagtctggggtgtgttgtcatagagatggtgactggcaagaggccttggcatgagtatgagcacaactttcaaattatgtataaagtggggatgggacataagccaccaatccctgaaagattaagccctgaaggaaaggacttcctttctcactgccttgagagtgacccaaagatgagatggaccgccagccagctcctcgaccattcgtttgtcaaggtttgcacagatgaagaatgaagcctagtagaatatggacttggaaaattctcttaatcactactgtatgtaatatttacataaagactgtgctgagaagcagtataagcctttttaaccttccaagactgaagactgcacaggtgacaagcgtcacttctcctgctgctcctgtttgtctgatgtggcaaaaggccctctggagggctggtggccacgaggttaaagaagctgcatgttaagtgccattactactgtacacggaccatcgcctctgtctcctccgtgtctcgcgcgactgagaaccgtgacatcagcgtagtgttttgacctttctaggttcaaaagaagttgtagtgttatcaggcgtcccataccttgtttttaatctcctgtttgttgagtgcactgactgtgaaacctttaccttttttgttgttgttggcaagctgcaggtttgtaatgcaaaaggctgattactgaaatttaagaaaaaggttcttttttcaataaatggtttattttaggaaagctca

SEQ ID NO: 155018 - DNA, 5445 bp, Homo sapiens
  Payload ID: 10475
  Gene Symbol: MAP3K4
  Gene Name: mitogen-activated protein kinase kinase kinase 4
  ENST ID: ENST00000366920
  CDS Start-End: 119-4933
cctgcggcggggtagaggcggaggcggagtcgagtcactcccgcacttcggggctccggtgccccgcgccaggctgcagcttactgcccgccgcggccatgcggggctccgtgcacggatgagagaagccgctgccgcgctggtccctcctcccgcctttgccgtcacgcctgccgccgccatggaggagccgccgccaccgccgccgccgccaccaccgccaccggaacccgagaccgagtcagaacccgagtgctgcttggcggcgaggcaagagggcacattgggagattcagcttgcaagagtcctgaatctgatctagaagacttctccgatgaaacaaatacagagaatctttatggtacctctccccccagcacacctcgacagatgaaacgcatgtcaaccaaacatcagaggaataatgtggggaggccagccagtcggtctaatttgaaagaaaaaatgaatgcaccaaatcagcctccacataaagacactggaaaaacagtggagaatgtggaagaatacagctataagcaggagaaaaagatccgagcagctcttagaacaacagagcgtgatcgtaaaaaaaatgtacagtgctcattcatgttagactcagtgggtggatctttgccaaaaaaatcaattccagatgtggatctcaataagccttacctcagccttggctgtagcaatgctaagcttccagtatctgtgcccatgcctatagccagacctgcacgccagacttctaggactgactgtccagcagatcgtttaaagttttttgaaactttacgacttttgctaaagcttacctcagtctcaaagaaaaaagacagggagcaaagaggacaagaaaatacgtctggtttctggcttaaccgatctaacgaactgatctggttagagctacaagcctggcatgcaggacggacaattaacgaccaggacttctttttatatacagcccgtcaagccatcccagatattattaatgaaatccttactttcaaagtcgactatgggagcttcgcctttgttagagatagagctggttttaatggtacttcagtagaagggcagtgcaaagccactcctggaacaaagattgtaggttactcaacacatcatgagcatctccaacgccagagggtctcatttgagcaggtaaaacggataatggagctgctagagtacatagaagcactttatccatcattgcaggctcttcagaaggactatgaaaaatatgctgcaaaagacttccaggacagggtgcaggcactctgtttgtggttaaacatcacaaaagacttaaatcagaaattaaggattatgggcactgttttgggcatcaagaatttatcagacattggctggccagtgtttgaaatcccttcccctcgaccatccaaaggtaatgagccggagtatgagggtgatgacacagaaggagaattaaaggagttggaaagtagtacggatgagagtgaagaagaacaaatctctgatcctagggtaccggaaatcagacagcccatagataacagcttcgacatccagtcgcgggactgcatatccaagaagcttgagaggctcgaatctgaggatgattctcttggctggggagcaccagactggagcacagaagcaggctttagtagacattgtctgacttctatttatagaccatttgtagacaaagcactgaagcagatggggttaagaaagttaattttaagacttcacaagctaatggatggttccttgcaaagggcacgtatagcattggtaaagaacgatcgtccagtggagttttctgaatttccagatcccatgtggggttcagattatgtgcagttgtcaaggacaccaccttcatctgaggagaaatgcagtgctgtgtcgtgggaggagctgaaggccatggatttaccttcattcgaacctgccttcctagttctctgccgagtccttctgaatgtcatacatgagtgtctgaagttaagattggagcagagacctgctggagaaccatctctcttgagtattaagcagctggtgagagagtgtaaggaggtcctgaagggcggcctgctgatgaagcagtactaccagttcatgctgcaggaggttctggaggacttggagaagcccgactgcaacattgacgcttttgaagaggatctacataaaatgcttatggtgtattttgattacatgagaagctggatccaaatgctacagcaattacctcaagcatcgcatagtttaaaaaatctgttagaagaagaatggaatttcaccaaagaaataactcattacatacggggaggagaagcacaggccgggaagcttttctgtgacattgcaggaatgctgctgaaatctacaggaagttttttagaatttggcttacaggagagctgtgctgaattttggactagtgcggatgacagcagtgcttccgacgaaatcaggaggtctgttatagagatcagtcgagccctgaaggagctcttccatgaagccagagaaagggcttccaaagcacttggatttgctaaaatgttgagaaaggacctggaaatagcagcagaattcaggctttcagccccagttagagacctcctggatgttctgaaatcaaaacagtatgtcaaggtgcaaattcctgggttagaaaacttgcaaatgtttgttccagacactcttgctgaggagaagagtattattttgcagttactcaatgcagctgcaggaaaggactgttcaaaagattcagatgacgtactcatcgatgcctatctgcttctgaccaagcacggtgatcgagcccgtgattcagaggacagctggggcacctgggaggcacagcctgtcaaagtcgtgcctcaggtggagactgttgacaccctgagaagcatgcaggtggataatcttttactagttgtcatgcagtctgcgcatctcacaattcagagaaaagctttccagcagtccattgagggacttatgactctgtgccaggagcagacatccagtcagccggtcatcgccaaagctttgcagcagctgaagaatgatgcattggagctatgcaacaggataagcaatgccattgaccgcgtggaccacatgttcacatcagaatttgatgctgaggttgatgaatctgaatctgtcaccttgcaacagtactaccgagaagcaatgattcaggggtacaattttggatttgagtatcataaagaagttgttcgtttgatgtctggggagtttagacagaagataggagacaaatatataagctttgcccggaagtggatgaattatgtcctgactaaatgtgagagtggtagaggtacaagacccaggtgggcgactcaaggatttgattttctacaagcaattgaacctgcctttatttcagctttaccagaagatgacttcttgagtttacaagccttgatgaatgaatgcattggccatgtcataggaaaaccacacagtcctgttacagccattcatcggaacagcccccgtcctatgaaggtacctcgatgccatagtgaccctcctaacccacacctcattatccccactccagagggattcagcactcggagcatgccttccgacgcgcggagccatggcagccctgctgctgctgctgctgctgctgctgctgctgttgctgccagtcggcccagcccctctggtggtgactctgtgctgcccaaatccatcagcagtgcccatgataccaggggttccagcgttcctgaaaatgatcgattggcttccatagctgctgaattgcagtttaggtccctgagtcgtcactcaagccccacggaggagcgagatgaaccagcatatccaagaggagattcaagtgggtccacaagaagaagttgggaacttcggacactaatcagccagagtaaagatactgcttctaaactaggacccatagaagctatccagaagtcagtccgattgtttgaagaaaagaggtaccgagaaatgaggagaaagaatatcattggtcaagtttgtgatacgcctaagtcctatgataatgttatgcacgttggcttgaggaaggtgaccttcaaatggcaaagaggaaacaaaattggagaaggccagtatgggaaggtgtacacctgcatcagcgtcgacaccggggagctgatggccatgaaagagattcgatttcaacctaatgaccataagactatcaaggaaactgcagacgaattgaaaatattcgaaggcatcaaacaccccaatctggttcggtattttggtgtggagctccatagagaagaaatgtacatcttcatggagtactgcgatgaggggactttagaagaggtgtcaaggctgggacttcaggaacatgtgattaggctgtattcaaagcagatcaccattgcgatcaacgtcctccatgagcatggcatagtccaccgtgacattaaaggtgccaatatcttccttacctcatctggattaatcaaactgggagattttggatgttcagtaaagctcaaaaacaatgcccagaccatgcctggtgaagtgaacagcaccctggggacagcagcatacatggcacctgaagtcatcactcgtgccaaaggagagggccatgggcgtgcggccgacatctggagtctggggtgtgttgtcatagagatggtgactggcaagaggccttggcatgagtatgagcacaactttcaaattatgtataaagtggggatgggacataagccaccaatccctgaaagattaagccctgaaggaaaggacttcctttctcactgccttgagagtgacccaaagatgagatggaccgccagccagctcctcgaccattcgtttgtcaaggtttgcacagatgaagaatgaagcctagtagaatatggacttggaaaattctcttaatcactactgtatgtaatatttacataaagactgtgctgagaagcagtataagcctttttaaccttccaagactgaagactgcacaggtgacaagcgtcacttctcctgctgctcctgtttgtctgatgtggcaaaaggccctctggagggctggtggccacgaggttaaagaagctgcatgttaagtgccattactactgtacacggaccatcgcctctgtctcctccgtgtctcgcgcgactgagaaccgtgacatcagcgtagtgttttgacctttctaggttcaaaagaagttgtagtgttatcaggcgtcccataccttgtttttaatctcctgtttgttgagtgcactgactgtgaaacctttaccttttttgttgttgttggcaagctgcaggtttgtaatgcaaaaggctgattactgaaatttaagaaaaaggttcttttttcaataaatggtttattttaggaaagc

SEQ ID NO: 155019 - DNA, 5490 bp, Homo sapiens
  Payload ID: 10475
  Gene Symbol: MAP3K4
  Gene Name: mitogen-activated protein kinase kinase kinase 4
  Uniprot ID: Q9Y6R4
  ENST ID: ENST00000392142
  CDS Start-End: 149-4975
gtttccaagatggccgcggcgcgcacggctcctgcggcggggtagaggcggaggcggagtcgagtcactcccgcacttcggggctccggtgccccgcgccaggctgcagcttactgcccgccgcggccatgcggggctccgtgcacggatgagagaagccgctgccgcgctggtccctcctcccgcctttgccgtcacgcctgccgccgccatggaggagccgccgccaccgccgccgccgccaccaccgccaccggaacccgagaccgagtcagaacccgagtgctgcttggcggcgaggcaagagggcacattgggagattcagcttgcaagagtcctgaatctgatctagaagacttctccgatgaaacaaatacagagaatctttatggtacctctccccccagcacacctcgacagatgaaacgcatgtcaaccaaacatcagaggaataatgtggggaggccagccagtcggtctaatttgaaagaaaaaatgaatgcaccaaatcagcctccacataaagacactggaaaaacagtggagaatgtggaagaatacagctataagcaggagaaaaagatccgagcagctcttagaacaacagagcgtgatcgtaaaaaaaatgtacagtgctcattcatgttagactcagtgggtggatctttgccaaaaaaatcaattccagatgtggatctcaataagccttacctcagccttggctgtagcaatgctaagcttccagtatctgtgcccatgcctatagccagacctgcacgccagacttctaggactgactgtccagcagatcgtttaaagttttttgaaactttacgacttttgctaaagcttacctcagtctcaaagaaaaaagacagggagcaaagaggacaagaaaatacgtctggtttctggcttaaccgatctaacgaactgatctggttagagctacaagcctggcatgcaggacggacaattaacgaccaggacttctttttatatacagcccgtcaagccatcccagatattattaatgaaatccttactttcaaagtcgactatgggagcttcgcctttgttagagatagagctggttttaatggtacttcagtagaagggcagtgcaaagccactcctggaacaaagattgtaggttactcaacacatcatgagcatctccaacgccagagggtctcatttgagcaggtaaaacggataatggagctgctagagtacatagaagcactttatccatcattgcaggctcttcagaaggactatgaaaaatatgctgcaaaagacttccaggacagggtgcaggcactctgtttgtggttaaacatcacaaaagacttaaatcagaaattaaggattatgggcactgttttgggcatcaagaatttatcagacattggctggccagtgtttgaaatcccttcccctcgaccatccaaaggtaatgagccggagtatgagggtgatgacacagaaggagaattaaaggagttggaaagtagtacggatgagagtgaagaagaacaaatctctgatcctagggtaccggaaatcagacagcccatagataacagcttcgacatccagtcgcgggactgcatatccaagaagcttgagaggctcgaatctgaggatgattctcttggctggggagcaccagactggagcacagaagcaggctttagtagacattgtctgacttctatttatagaccatttgtagacaaagcactgaagcagatggggttaagaaagttaattttaagacttcacaagctaatggatggttccttgcaaagggcacgtatagcattggtaaagaacgatcgtccagtggagttttctgaatttccagatcccatgtggggttcagattatgtgcagttgtcaaggacaccaccttcatctgaggagaaatgcagtgctgtgtcgtgggaggagctgaaggccatggatttaccttcattcgaacctgccttcctagttctctgccgagtccttctgaatgtcatacatgagtgtctgaagttaagattggagcagagacctgctggagaaccatctctcttgagtattaagcagctggtgagagagtgtaaggaggtcctgaagggcggcctgctgatgaagcagtactaccagttcatgctgcaggaggttctggaggacttggagaagcccgactgcaacattgacgcttttgaagaggatctacataaaatgcttatggtgtattttgattacatgagaagctggatccaaatgctacagcaattacctcaagcatcgcatagtttaaaaaatctgttagaagaagaatggaatttcaccaaagaaataactcattacatacggggaggagaagcacaggccgggaagcttttctgtgacattgcaggaatgctgctgaaatctacaggaagttttttagaatttggcttacaggagagctgtgctgaattttggactagtgcggatgacagcagtgcttccgacgaaatcaggaggtctgttatagagatcagtcgagccctgaaggagctcttccatgaagccagagaaagggcttccaaagcacttggatttgctaaaatgttgagaaaggacctggaaatagcagcagaattcaggctttcagccccagttagagacctcctggatgttctgaaatcaaaacagtatgtcaaggtgcaaattcctgggttagaaaacttgcaaatgtttgttccagacactcttgctgaggagaagagtattattttgcagttactcaatgcagctgcaggaaaggactgttcaaaagattcagatgacgtactcatcgatgcctatctgcttctgaccaagcacggtgatcgagcccgtgattcagaggacagctggggcacctgggaggcacagcctgtcaaagtcgtgcctcaggtggagactgttgacaccctgagaagcatgcaggtggataatcttttactagttgtcatgcagtctgcgcatctcacaattcagagaaaagctttccagcagtccattgagggacttatgactctgtgccaggagcagacatccagtcagccggtcatcgccaaagctttgcagcagctgaagaatgatgcattggagctatgcaacaggataagcaatgccattgaccgcgtggaccacatgttcacatcagaatttgatgctgaggttgatgaatctgaatctgtcaccttgcaacagtactaccgagaagcaatgattcaggggtacaattttggatttgagtatcataaagaagttgttcgtttgatgtctggggagtttagacagaagataggagacaaatatataagctttgcccggaagtggatgaattatgtcctgactaaatgtgagagtggtagaggtacaagacccaggtgggcgactcaaggatttgattttctacaagcaattgaacctgcctttatttcagctttaccagaagatgacttcttgagtttacaagccttgatgaatgaatgcattggccatgtcataggaaaaccacacagtcctgttacaggtttgtaccttgccattcatcggaacagcccccgtcctatgaaggtacctcgatgccatagtgaccctcctaacccacacctcattatccccactccagagggattcagcactcggagcatgccttccgacgcgcggagccatggcagccctgctgctgctgctgctgctgctgctgctgctgttgctgccagtcggcccagcccctctggtggtgactctgtgctgcccaaatccatcagcagtgcccatgataccaggggttccagcgttcctgaaaatgatcgattggcttccatagctgctgaattgcagtttaggtccctgagtcgtcactcaagccccacggaggagcgagatgaaccagcatatccaagaggagattcaagtgggtccacaagaagaagttgggaacttcggacactaatcagccagagtaaagatactgcttctaaactaggacccatagaagctatccagaagtcagtccgattgtttgaagaaaagaggtaccgagaaatgaggagaaagaatatcattggtcaagtttgtgatacgcctaagtcctatgataatgttatgcacgttggcttgaggaaggtgaccttcaaatggcaaagaggaaacaaaattggagaaggccagtatgggaaggtgtacacctgcatcagcgtcgacaccggggagctgatggccatgaaagagattcgatttcaacctaatgaccataagactatcaaggaaactgcagacgaattgaaaatattcgaaggcatcaaacaccccaatctggttcggtattttggtgtggagctccatagagaagaaatgtacatcttcatggagtactgcgatgaggggactttagaagaggtgtcaaggctgggacttcaggaacatgtgattaggctgtattcaaagcagatcaccattgcgatcaacgtcctccatgagcatggcatagtccaccgtgacattaaaggtgccaatatcttccttacctcatctggattaatcaaactgggagattttggatgttcagtaaagctcaaaaacaatgcccagaccatgcctggtgaagtgaacagcaccctggggacagcagcatacatggcacctgaagtcatcactcgtgccaaaggagagggccatgggcgtgcggccgacatctggagtctggggtgtgttgtcatagagatggtgactggcaagaggccttggcatgagtatgagcacaactttcaaattatgtataaagtggggatgggacataagccaccaatccctgaaagattaagccctgaaggaaaggacttcctttctcactgccttgagagtgacccaaagatgagatggaccgccagccagctcctcgaccattcgtttgtcaaggtttgcacagatgaagaatgaagcctagtagaatatggacttggaaaattctcttaatcactactgtatgtaatatttacataaagactgtgctgagaagcagtataagcctttttaaccttccaagactgaagactgcacaggtgacaagcgtcacttctcctgctgctcctgtttgtctgatgtggcaaaaggccctctggagggctggtggccacgaggttaaagaagctgcatgttaagtgccattactactgtacacggaccatcgcctctgtctcctccgtgtctcgcgcgactgagaaccgtgacatcagcgtagtgttttgacctttctaggttcaaaagaagttgtagtgttatcaggcgtcccataccttgtttttaatctcctgtttgttgagtgcactgactgtgaaacctttaccttttttgttgttgttggcaagctgcaggtttgtaatgcaaaaggctgattactgaaatttaagaaaaaggttcttttttcaataaatggtttattttaggaaagctca

SEQ ID NO: 155020 - DNA, 225 bp, Homo sapiens
  Payload ID: 10475
  Gene Symbol: MAP3K4
  Gene Name: mitogen-activated protein kinase kinase kinase 4
  ENST ID: ENST00000448119
  CDS Start-End: 156-225
cttcctggaacgcagagtgtaatccctgcatttggcaagagggcacattgggagattcagcttgcaagagtcctgaatctgatctagaagacttctccgatgaaacaaatacagagaatctttatggtacctctccccccagcacacctcgacagatgaaacgcatgtcaaccaaacatcagaggaataatgtggggaggccagccagtcggtctaatttgaaag

SEQ ID NO: 155021 - DNA, 629 bp, Homo sapiens
  Payload ID: 10475
  Gene Symbol: MAP3K4
  Gene Name: mitogen-activated protein kinase kinase kinase 4
  ENST ID: ENST00000542952
  CDS Start-End: 164-421
gctcggccggtcgccgtttccaagatggccgcggcgcgcacggctcctgcggcggggtagaggcggaggcggagtcgagtcactcccgcacttcggggctccggtgccccgcgccaggctgcagcttactgcccgccgcggccatgcggggctccgtgcacggatgagagaagccgctgccgcgctggtccctcctcccgcctttgccgtcacgcctgccgccgccatggaggagccgccgccaccgccgccgccgccaccaccgccaccggaacccgagaccgagtcagaacccgagtgctgcttggcggcgagttttctgaatttccagatcccatgtggggttcagattatgtgcagttgtcaaggacaccaccttcatctgaggagaaatgcagtgctgtgtcgtgggaggagctgaaggccatggatttaccttcattcgaacctgccttcctagttctctgccgagtccttctgaatgtcatacatgagtgtctgaagttaagattggagcagagacctgctggagaaccatctctcttgagtattaagcagctggtgagagagtgtaaggaggtcctgaagggcggcctgctgatgaagcagtactaccagttcatgctgca

SEQ ID NO: 155022 - DNA, 5444 bp, Homo sapiens
  Payload ID: 10475
  Gene Symbol: MAP3K4
  Gene Name: mitogen-activated protein kinase kinase kinase 4
  ENST ID: ENST00000544041
  CDS Start-End: 89-4417
cgagtcactcccgcacttcggggctccggtgccccgcgccaggctgcagcttactgcccgccgcggccatgcggggctccgtgcacggatgagagaagccgctgccgcgctggtccctcctcccgcctttgccgtcacgcctgccgccgccatggaggagccgccgccaccgccgccgccgccaccaccgccaccggaacccgagaccgagtcagaacccgagtgctgcttggcggcgaggcaagagggcacattgggagattcagcttgcaagagtcctgaatctgatctagaagacttctccgatgaaacaaatacagagaatctttatggtacctctccccccagcacacctcgacagatgaaacgcatgtcaaccaaacatcagaggaataatgtggggaggccagccagtcggtctaatttgaaagaaaaaatgaatgcaccaaatcagcctccacataaagacactggaaaaacagtggagaatgtggaagaatacagctataagcaggagaaaaagatccgagcagctcttagaacaacagagcgtgatcgtaaaaaaaatgtacagtgctcattcatgttagactcagtgggtggatctttgccaaaaaaatcaattccagatgtggatctcaataagccttacctcagccttggctgtagcaatgctaagcttccagtatctgtgcccatgcctatagccagacctgcacgccagacttctaggactgactgtccagcagatcgtttaaagttttttgaaactttacgacttttgctaaagcttacctcagtctcaaagaaaaaagacagggagcaaagaggacaagaaaatacgtctggtttctggcttaaccgatctaacgaactgatctggttagagctacaagcctggcatgcaggacggacaattaacgaccaggacttctttttatatacagcccgtcaagccatcccagatattattaatgaaatccttactttcaaagtcgactatgggagcttcgcctttgttagagatagagctggttttaatggtacttcagtagaagggcagtgcaaagccactcctggaacaaagattgtaggttactcaacacatcatgagcatctccaacgccagagggtctcatttgagcaggtaaaacggataatggagctgctagagtacatagaagcactttatccatcattgcaggctcttcagaaggactatgaaaaatatgctgcaaaagacttccaggacagggtgcaggcactctgtttgtggttaaacatcacaaaagacttaaatcagaaattaaggattatgggcactgttttgggcatcaagaatttatcagacattggctggccagtgtttgaaatcccttcccctcgaccatccaaaggtaatgagccggagtatgagggtgatgacacagaaggagaattaaaggagttggaaagtagtacggatgagagtgaagaagaacaaatctctgatcctagggtaccggaaatcagacagcccatagataacagcttcgacatccagtcgcgggactgcatatccaagaagcttgagaggctcgaatctgaggatgattctcttggctggggagcaccagactggagcacagaagcaggctttagtagacattgtctgacttctatttatagaccatttgtagacaaagcactgaagcagatggggttaagaaagttaattttaagacttcacaagctaatggatggttccttgcaaagggcacgtatagcattggtaaagaacgatcgtccagtggagttttctgaatttccagatcccatgtggggttcagattatgtgcagttgtcaaggacaccaccttcatctgaggagaaatgcagtgctgtgtcgtgggaggagctgaaggccatggatttaccttcattcgaacctgccttcctagttctctgccgagtccttctgaatgtcatacatgagtgtctgaagttaagattggagcagagacctgctggagaaccatctctcttgagtattaagcagctggtgagagagtgtaaggaggtcctgaagggcggcctgctgatgaagcagtactaccagttcatgctgcaggaggttctggaggacttggagaagcccgactgcaacattgacgcttttgaagaggatctacataaaatgcttatggtgtattttgattacatgagaagctggatccaaatgctacagcaattacctcaagcatcgcatagtttaaaaaatctgttagaagaagaatggaatttcaccaaagaaataactcattacatacggggaggagaagcacaggccgggaagcttttctgtgacattgcaggaatgctgctgaaatctacaggaagttttttagaatttggcttacaggagagctgtgctgaattttggactagtgcggatgacagcagtgcttccgacgaaatcaggaggtctgttatagagatcagtcgagccctgaaggagctcttccatgaagccagagaaagggcttccaaagcacttggatttgctaaaatgttgagaaaggacctggaaatagcagcagaattcaggctttcagccccagttagagacctcctggatgttctgaaatcaaaacagtatgtcaaggtgcaaattcctgggttagaaaacttgcaaatgtttgttccagacactcttgctgaggagaagagtattattttgcagttactcaatgcagctgcaggaaaggactgttcaaaagattcagatgacgtactcatcgatgcctatctgcttctgaccaagcacggtgatcgagcccgtgattcagaggacagctggggcacctgggaggcacagcctgtcaaagtcgtgcctcaggtggagactgttgacaccctgagaagcatgcaggtggataatcttttactagttgtcatgcagtctgcgcatctcacaattcagagaaaagctttccagcagtccattgagggacttatgactctgtgccaggagcagacatccagtcagccggtcatcgccaaagctttgcagcagctgaagaatgatgcattggagctatgcaacaggataagcaatgccattgaccgcgtggaccacatgttcacatcagaatttgatgctgaggttgatgaatctgaatctgtcaccttgcaacagtactaccgagaagcaatgattcaggggtacaattttggatttgagtatcataaagaagttgttcgtttgatgtctggggagtttagacagaagataggagacaaatatataagctttgcccggaagtggatgaattatgtcctgactaaatgtgagagtggtagaggtacaagacccaggtgggcgactcaaggatttgattttctacaagcaattgaacctgcctttatttcagctttaccagaagatgacttcttgagtttacaagccttgatgaatgaatgcattggccatgtcataggaaaaccacacagtcctgttacaggtttgtaccttgccattcatcggaacagcccccgtcctatgaaggtacctcgatgccatagtgaccctcctaacccacacctcattatccccactccagagggattcagcactcggagcatgccttccgacgcgcggagccatggcagccctgctgctgctgctgctgctgctgctgctgctgttgctgccagtcggcccagcccctctggtggtgactctgtgctgcccaaatccatcagcagtgcccatgataccaggggttccagcgttcctgaaaatgatcgattggcttccatagctgctgaattgcagtttaggtccctgagtcgtcactcaagccccacggaggagcgagatgaaccagcatatccaagaggagattcaagtgggtccacaagaagaagttgggaacttcggacactaatcagccagagtaaagatactgcttctaaactaggacccatagaagctatccagaagtcagtccgattgtttgaagaaaagaggtaccgagaaatgaggagaaagaatatcattggtcaagtttgtgatacgcctaagtcctatgataatgttatgcacgttggcttgaggaaggtgaccttcaaatggcaaagaggaaacaaaattggagaaggccagtatgggaaggtgtacacctgcatcagcgtcgacaccggggagctgatggccatgaaagagattcgatttcaacctaatgaccataagactatcaaggaaactgcagacgaattgaaaatattcgaaggcatcaaacaccccaatctggttcggtattttggtgtggagctccatagaagcacagtaactttgcctaattctcaggaaatctccatgagttacatcatttctgccttctctctgaaactagaggagttcctcctaaaatgaagaaatgtacatcttcatggagtactgcgatgaggggactttagaagaggtgtcaaggctgggacttcaggaacatgtgattaggctgtattcaaagcagatcaccattgcgatcaacgtcctccatgagcatggcatagtccaccgtgacattaaaggtgccaatatcttccttacctcatctggattaatcaaactgggagattttggatgttcagtaaagctcaaaaacaatgcccagaccatgcctggtgaagtgaacagcaccctggggacagcagcatacatggcacctgaagtcatcactcgtgccaaaggagagggccatgggcgtgcggccgacatctggagtctggggtgtgttgtcatagagatggtgactggcaagaggccttggcatgagtatgagcacaactttcaaattatgtataaagtggggatgggacataagccaccaatccctgaaagattaagccctgaaggaaaggacttcctttctcactgccttgagagtgacccaaagatgagatggaccgccagccagctcctcgaccattcgtttgtcaaggtttgcacagatgaagaatgaagcctagtagaatatggacttggaaaattctcttaatcactactgtatgtaatatttacataaagactgtgctgagaagcagtataagcctttttaaccttccaagactgaagactgcacaggtgacaagcgtcacttctcctgctgctcctgtttgtctgatgtggcaaaaggccctctggagggctggtggccacgaggttaaagaagctgcatgttaagtgccattactactgtacacggaccatcgcctctgtctcctccgtgtctcgcgcgactgagaaccgtgacatcagcgtagtgttttgacctttctaggttcaaaagaagttgtagtgttatcaggcgtcccataccttgtttttaatctcctgtttgttgagtgcactgactgtgaaacctttaccttttttgttgttgttggcaagctgcaggttt

SEQ ID NO: 155023 - DNA, 5451 bp, Homo sapiens
  Payload ID: 10475
  Gene Symbol: MAP3K4
  Gene Name: mitogen-activated protein kinase kinase kinase 4
  ENST ID: ENST00000490904
  CDS Start-End: 89-1999
cgagtcactcccgcacttcggggctccggtgccccgcgccaggctgcagcttactgcccgccgcggccatgcggggctccgtgcacggatgagagaagccgctgccgcgctggtccctcctcccgcctttgccgtcacgcctgccgccgccatggaggagccgccgccaccgccgccgccgccaccaccgccaccggaacccgagaccgagtcagaacccgagtgctgcttggcggcgaggcaagagggcacattgggagattcagcttgcaagagtcctgaatctgatctagaagacttctccgatgaaacaaatacagagaatctttatggtacctctccccccagcacacctcgacagatgaaacgcatgtcaaccaaacatcagaggaataatgtggggaggccagccagtcggtctaatttgaaagaaaaaatgaatgcaccaaatcagcctccacataaagacactggaaaaacagtggagaatgtggaagaatacagctataagcaggagaaaaagatccgagcagctcttagaacaacagagcgtgatcgtaaaaaaaatgtacagtgctcattcatgttagactcagtgggtggatctttgccaaaaaaatcaattccagatgtggatctcaataagccttacctcagccttggctgtagcaatgctaagcttccagtatctgtgcccatgcctatagccagacctgcacgccagacttctaggactgactgtccagcagatcgtttaaagttttttgaaactttacgacttttgctaaagcttacctcagtctcaaagaaaaaagacagggagcaaagaggacaagaaaatacgtctggtttctggcttaaccgatctaacgaactgatctggttagagctacaagcctggcatgcaggacggacaattaacgaccaggacttctttttatatacagcccgtcaagccatcccagatattattaatgaaatccttactttcaaagtcgactatgggagcttcgcctttgttagagatagagctggttttaatggtacttcagtagaagggcagtgcaaagccactcctggaacaaagattgtaggttactcaacacatcatgagcatctccaacgccagagggtctcatttgagcaggtaaaacggataatggagctgctagagtacatagaagcactttatccatcattgcaggctcttcagaaggactatgaaaaatatgctgcaaaagacttccaggacagggtgcaggcactctgtttgtggttaaacatcacaaaagacttaaatcagaaattaaggattatgggcactgttttgggcatcaagaatttatcagacattggctggccagtgtttgaaatcccttcccctcgaccatccaaaggtaatgagccggagtatgagggtgatgacacagaaggagaattaaaggagttggaaagtagtacggatgagagtgaagaagaacaaatctctgatcctagggtaccggaaatcagacagcccatagataacagcttcgacatccagtcgcgggactgcatatccaagaagcttgagaggctcgaatctgaggatgattctcttggctggggagcaccagactggagcacagaagcaggctttagtagacattgtctgacttctatttatagaccatttgtagacaaagcactgaagcagatggggttaagaaagttaattttaagacttcacaagctaatggatggttccttgcaaagggcacgtatagcattggtaaagaacgatcgtccagtggagggagacatgagacatcaatcaatatatgtaagatgtacattggttccatccagaaagacaggacaactcgaagcagggatggggcttgcaggtcacagttttctgaatttccagatcccatgtggggttcagattatgtgcagttgtcaaggacaccaccttcatctgaggagaaatgcagtgctgtgtcgtgggaggagctgaaggccatggatttaccttcattcgaacctgccttcctagttctctgccgagtccttctgaatgtcatacatgagtgtctgaagttaagattggagcagagacctgctggagaaccatctctcttgagtattaagcagctggtgagagagtgtaaggaggtcctgaagggcggcctgctgatgaagcagtactaccagttcatgctgcaggaggttctggaggacttggagaagcccgactgcaacattgacgcttttgaagaggatctacataaaatgcttatggtgtattttgattacatgagaagctggatccaaatgctacagcaattacctcaagcatcgcatagtttaaaaaatctgttagaagaagaatggaatttcaccaaagaaataactcattacatacggggaggagaagcacaggccgggaagcttttctgtgacattgcaggaatgctgctgaaatctacaggaagttttttagaatttggcttacaggagagctgtgctgaattttggactagtgcggatgacagcagtgcttccgacgaaatcaggaggtctgttatagagatcagtcgagccctgaaggagctcttccatgaagccagagaaagggcttccaaagcacttggatttgctaaaatgttgagaaaggacctggaaatagcagcagaattcaggctttcagccccagttagagacctcctggatgttctgaaatcaaaacagtatgtcaaggtgcaaattcctgggttagaaaacttgcaaatgtttgttccagacactcttgctgaggagaagagtattattttgcagttactcaatgcagctgcaggaaaggactgttcaaaagattcagatgacgtactcatcgatgcctatctgcttctgaccaagcacggtgatcgagcccgtgattcagaggacagctggggcacctgggaggcacagcctgtcaaagtcgtgcctcaggtggagactgttgacaccctgagaagcatgcaggtggataatcttttactagttgtcatgcagtctgcgcatctcacaattcagagaaaagctttccagcagtccattgagggacttatgactctgtgccaggagcagacatccagtcagccggtcatcgccaaagctttgcagcagctgaagaatgatgcattggagctatgcaacaggataagcaatgccattgaccgcgtggaccacatgttcacatcagaatttgatgctgaggttgatgaatctgaatctgtcaccttgcaacagtactaccgagaagcaatgattcaggggtacaattttggatttgagtatcataaagaagttgttcgtttgatgtctggggagtttagacagaagataggagacaaatatataagctttgcccggaagtggatgaattatgtcctgactaaatgtgagagtggtagaggtacaagacccaggtgggcgactcaaggatttgattttctacaagcaattgaacctgcctttatttcagctttaccagaagatgacttcttgagtttacaagccttgatgaatgaatgcattggccatgtcataggaaaaccacacagtcctgttacaggtttgtaccttgccattcatcggaacagcccccgtcctatgaaggtacctcgatgccatagtgaccctcctaacccacacctcattatccccactccagagggattcagcactcggagcatgccttccgacgcgcggagccatggcagccctgctgctgctgctgctgctgctgctgctgctgttgctgccagtcggcccagcccctctggtggtgactctgtgctgcccaaatccatcagcagtgcccatgataccaggggttccagcgttcctgaaaatgatcgattggcttccatagctgctgaattgcagtttaggtccctgagtcgtcactcaagccccacggaggagcgagatgaaccagcatatccaagaggagattcaagtgggtccacaagaagaagttgggaacttcggacactaatcagccagagtaaagatactgcttctaaactaggacccatagaagctatccagaagtcagtccgattgtttgaagaaaagaggtaccgagaaatgaggagaaagaatatcattggtcaagtttgtgatacgcctaagtcctatgataatgttatgcacgttggcttgaggaaggtgaccttcaaatggcaaagaggaaacaaaattggagaaggccagtatgggaaggtgtacacctgcatcagcgtcgacaccggggagctgatggccatgaaagagattcgatttcaacctaatgaccataagactatcaaggaaactgcagacgaattgaaaatattcgaaggcatcaaacaccccaatctggttcggtattttggtgtggagctccatagagaagaaatgtacatcttcatggagtactgcgatgaggggactttagaagaggtgtcaaggctgggacttcaggaacatgtgattaggctgtattcaaagcagatcaccattgcgatcaacgtcctccatgagcatggcatagtccaccgtgacattaaaggtgccaatatcttccttacctcatctggattaatcaaactgggagattttggatgttcagtaaagctcaaaaacaatgcccagaccatgcctggtgaagtgaacagcaccctggggacagcagcatacatggcacctgaagtcatcactcgtgccaaaggagagggccatgggcgtgcggccgacatctggagtctggggtgtgttgtcatagagatggtgactggcaagaggccttggcatgagtatgagcacaactttcaaattatgtataaagtggggatgggacataagccaccaatccctgaaagattaagccctgaaggaaaggacttcctttctcactgccttgagagtgacccaaagatgagatggaccgccagccagctcctcgaccattcgtttgtcaaggtttgcacagatgaagaatgaagcctagtagaatatggacttggaaaattctcttaatcactactgtatgtaatatttacataaagactgtgctgagaagcagtataagcctttttaaccttccaagactgaagactgcacaggtgacaagcgtcacttctcctgctgctcctgtttgtctgatgtggcaaaaggccctctggagggctggtggccacgaggttaaagaagctgcatgttaagtgccattactactgtacacggaccatcgcctctgtctcctccgtgtctcgcgcgactgagaaccgtgacatcagcgtagtgttttgacctttctaggttcaaaagaagttgtagtgttatcaggcgtcccataccttgtttttaatctcctgtttgttgagtgcactgactgtgaaacctttaccttttttgttgttgttggcaagctgcaggttt

SEQ ID NO: 155024 - DNA, 5197 bp, Homo sapiens
  Payload ID: 10476
  Gene Symbol: MAP3K5
  Gene Name: mitogen-activated protein kinase kinase kinase 5
  Uniprot ID: Q99683
  ENST ID: ENST00000359015
  CDS Start-End: 362-4486
cgagcgcggcgcccttgagctgcaccgcggcgcaggtttgcgagccgacttgtcagccggccaagaaaaggaagctccgtcccttcccgctcacccggcttccccaccccttgtactctaaactctgcagagggcgagcggcgcggccacggaggcgccgaggaggagcgagccgccgccgggcagcggcgtgccctcgggggagagggcgccggagaggaggcggcggcgcggcggcgagggcgcggcgcgcgatggcagctgcttagcccggcgggcgcggagcagccccgagctgtggctggccaggcggtgcggctgggcgggggacgccgccgccgttgctgcccggcccggagagatgagcacggaggcggacgagggcatcactttctctgtgccacccttcgccccctcgggcttctgcaccatccccgagggcggcatctgcaggaggggaggagcggcggcggtgggcgagggcgaggagcaccagctgccaccgccgccgccgggcagcttctggaacgtggagagcgccgctgcccctggcatcggttgtccggcggccacctcctcgagcagtgccacccgaggccggggcagctctgttggcgggggcagccgacggaccacggtggcatatgtgatcaacgaagcgagccaagggcaactggtggtggccgagagcgaggccctgcagagcttgcgggaggcgtgcgagacagtgggcgccaccctggaaaccctgcattttgggaaactcgactttggagaaaccaccgtgctggaccgcttttacaatgcagatattgcggtggtggagatgagcgatgccttccggcagccgtccttgttttaccaccttggggtgagagaaagtttcagcatggccaacaacatcatcctctactgtgatactaactcggactctctgcagtcactgaaggaaataatttgccagaagaatactatgtgcactgggaactacacctttgttccttacatgataactccacataacaaagtctactgctgtgacagcagcttcatgaaggggttgacagagctcatgcaaccgaacttcgagctgcttcttggacccatctgcttacctcttgtggatcgttttattcaacttttgaaggtggcacaagcaagttctagccagtacttccgggaatctatactcaatgacatcaggaaagctcgtaatttatacactggtaaagaattggcagctgagttggcaagaattcggcagcgagtagataatatcgaagtcttgacagcagatattgtcataaatctgttactttcctacagagatatccaggactatgattctattgtgaagctggtagagactttagaaaaactgccaacctttgatttggcctcccatcaccatgtgaagtttcattatgcatttgcactgaataggagaaatctccctggtgacagagcaaaagctcttgatattatgattcccatggtgcaaagcgaaggacaagttgcttcagatatgtattgcctagttggtcgaatctacaaagatatgtttttggactctaatttcacggacactgaaagcagagaccatggagcttcttggttcaaaaaggcatttgaatctgagccaacactacagtcaggaattaattatgcggtcctcctcctggcagctggacaccagtttgaatcttcctttgagctccggaaagttggggtgaagctaagtagtcttcttggtaaaaagggaaacttggaaaaactccagagctactgggaagttggattttttctgggggccagcgtcctagccaatgaccacatgagagtcattcaagcatctgaaaagctttttaaactgaagacaccagcatggtacctcaagtctattgtagagacaattttaatatataagcattttgtgaaactgaccacagaacagcctgtggccaagcaagaacttgtggacttttggatggatttcctggtcgaggccacaaagacagatgttactgtggttaggtttccagtattaatattagaaccaaccaaaatctatcaaccttcttatttgtctatcaacaatgaagttgaggaaaagacaatctctatttggcacgtgcttcctgatgacaagaaaggtatacatgagtggaattttagtgcctcttctgtcaggggagtgagtatttctaaatttgaagaaagatgctgctttctttatgtgcttcacaattctgatgatttccaaatctatttctgtacagaacttcattgtaaaaagttttttgagatggtgaacaccattaccgaagagaaggggagaagcacagaggaaggagactgtgaaagtgacttgctggagtatgactatgaatatgatgaaaatggtgacagagtcgttttaggaaaaggcacttatgggatagtctacgcaggtcgggacttgagcaaccaagtcagaattgctattaaggaaatcccagagagagacagcagatactctcagcccctgcatgaagaaatagcattgcataaacacctgaagcacaaaaatattgtccagtatctgggctctttcagtgagaatggtttcattaaaatcttcatggagcaggtccctggaggaagtctttctgctctccttcgttccaaatggggtccattaaaagacaatgagcaaacaattggcttttatacaaagcaaatactggaaggattaaaatatctccatgacaatcagatagttcaccgggacataaagggtgacaatgtgttgattaatacctacagtggtgttctcaagatctctgacttcggaacatcaaagaggcttgctggcataaacccctgtactgaaacttttactggtaccctccagtatatggcaccagaaataatagataaaggaccaagaggctacggaaaagcagcagacatctggtctctgggctgtacaatcattgaaatggccacaggaaaacccccattttatgaactgggagaaccacaagcagctatgttcaaggtgggaatgtttaaagtccaccctgagatcccagagtccatgtctgcagaggccaaggcattcatactgaaatgttttgaaccagatcctgacaagagagcctgtgctaacgacttgcttgttgatgagtttttaaaagtttcaagcaaaaagaaaaagacacaacctaagctttcagctctttcagctggatcaaatgaatatctcaggagtatatccttgccggtacctgtgctggtggaggacaccagcagcagcagtgagtacggctcagtttcacccgacacggagttgaaagtggaccccttctctttcaaaacaagagccaagtcctgcggagaaagagatgtcaagggaattcggacactctttttgggcattccagatgagaattttgaagatcacagtgctcctccttcccctgaagaaaaagattctggattcttcatgctgaggaaggacagtgagaggcgagctacccttcacaggatcctgacggaagaccaagacaaaattgtgagaaacctaatggaatctttagctcagggggctgaagaaccgaaactaaaatgggaacacatcacaaccctcattgcaagcctcagagaatttgtgagatccactgaccgaaaaatcatagccaccacactgtcaaagctgaaactggagctggacttcgacagccatggcattagccaagtccaggtggtactctttggttttcaagatgctgtcaataaagttcttcggaatcataacatcaagccgcactggatgtttgccttagacagtatcattcggaaggcggtacagacagccattaccatcctggttccagaactaaggccacatttcagccttgcatctgagagtgatactgctgatcaagaagacttggatgtagaagatgaccatgaggaacagccttcaaatcaaactgtccgaagacctcaggctgtcattgaagatgctgtggctacctcaggcgtgagcacgctcagttctactgtgtctcatgattcccagagtgctcaccggtcactgaatgtacagcttggaaggatgaaaatagaaaccaatagattactggaagaattggttcggaaagagaaagaattacaagcactccttcatcgagctattgaagaaaaagaccaagaaattaaacacctgaagcttaagtcccaacccatagaaattcctgaattgcctgtatttcatctaaattcttctggcacaaatactgaagattctgaacttaccgactggctgagagtgaatggagctgatgaagacactataagccggtttttggctgaagattatacactattggatgttctctactatgttacacgtgatgacttaaaatgcttgagactaaggggagggatgctgtgcacactgtggaaggctatcattgactttcgaaacaaacagacttgactgttgctcaatctaatcttcgatggaaattctaaaaattaatacagagctgatcttcttgggggtgggaaaatcgaagggagaggagaaaggcgctgcactttaaatccagtatttgtttactcatgttaaaaaaaaaaaaaacagacaaaacacactgaaatttcctaactacatctatttctataatttttaaggactcttcataaggactcttaaaataatcctgaacattagaaccctaatgttcaggaagattttaatctaagcatttttatggaaatatttttaatgcagcagctattgcacttcagccaaatgtttatttcacacaaaacggatgtaacatttcatgtgatcgtgcaccactggaacaaaaccaaaatgtgaccataactgtttaggcttctgtgtgtttgtaatatgctctaataatctgagtagaaatgcgtaatttcaattactgtataaagtttatgtttttttaagtgtgcagaatctgagagcaatggtttttacttctctgtgttaattgtaatattgactctattttgtaacttaagtttctgacctgtcgtacatttgtttgagtcgtttatgtactactgaactgtaccagttgcacatgcttgaactgtagtaatgttagcttgttctaaagctatccattgtgtcatatttactctaaaaattaaagagactctcaacata

SEQ ID NO: 155025 - DNA, 4136 bp, Homo sapiens
  Payload ID: 10477
  Gene Symbol: MAP3K6
  Gene Name: mitogen-activated protein kinase kinase kinase 6
  Uniprot ID: O95382
  ENST ID: ENST00000357582
  CDS Start-End: 270-4136
tgagctgccgatcaccggatgccccagattcctgggacccaatcccggatttcagaacctcaggaccttgcaagtccgagctaggatttctccctggactttagattcctggaacgggacgtcaggccgtattccggatccctagatcccgtgggagattctccgattccgaacggattccagatcccaagattcctgatctgccggcccaggctcctgccccgcccccggttcccagtgcgcggcgccccgcgcctgagcgcccccgcatggcggggccgtgtccccggtccggggcggagcgcgccggcagctgctggcaggacccgctggccgtggcgctgagccggggccggcagctcgcggcgcccccgggccggggctgcgcgcggagccggccgctcagcgtggtctacgtgctgacccgggagccgcagcccgggctcgagcctcgggagggaaccgaggcggagccgctgcccctgcgctgcctgcgcgaggcttgcgcgcaggtcccccggccgcggccgcccccgcagctgcgcagcctgcccttcgggacgctggagctaggcgacaccgcggctctggatgccttctacaacgcggatgtggtggtgctggaggtgagcagctcgctggtacagccctccctgttctaccaccttggtgtgcgtgagagcttcagcatgaccaacaatgtgctcctctgctcccaggccgacctccctgacctgcaggccctgcgggaggatgttttccagaagaactcggattgcgttggcagctacacactgatcccctatgtggtgacggccactggtcgggtgctgtgtggtgatgcaggccttctgcggggcctggctgatgggctggtacaggctggagtggggaccgaggccctgctcactcccctggtgggccggcttgcccgcctgctggaggccacacccacagactcttgtggctatttccgggagaccattcggcgggacatccggcaggcgcgggagcggttcagtgggccacagctgcggcaggagctggctcgcctgcagcggagactggacagcgtggagctgctgagccccgacatcatcatgaacttgctgctctcctaccgcgatgtgcaggactactcggccatcattgagctggtggagacgctgcaggccttgcccacctgtgatgtggccgagcagcataatgtctgcttccactacacttttgccctcaaccggaggaacaggcctggggaccgggcgaaggccctgtctgtgctgctgccgctggtacagcttgagggctctgtggcgcccgatctgtactgcatgtgtggccgtatctacaaggacatgttcttcagctcgggtttccaggatgctgggcaccgggagcaggcctatcactggtatcgcaaggcttttgacgtagagcccagccttcactcaggcatcaatgcagctgtgctcctcattgctgccgggcagcactttgaggattccaaagagctccggctaataggcatgaagctgggctgcctgctggcccgcaaaggctgcgtggagaagatgcagtattactgggatgtgggtttctacctgggagcccagatcctcgccaatgaccccacccaggtggtgctggctgcagagcagctgtataagctcaatgcccccatatggtacctggtgtccgtgatggagaccttcctgctctaccagcacttcaggcccacgccagagccccctggagggccaccacgccgtgcccacttctggctccacttcttgctacagtcctgccaaccattcaagacagcctgtgcccagggcgaccagtgcttggtgctggtcctggagatgaacaaggtgctgctgcctgcaaagctcgaggttcggggtactgacccagtaagcacagtgaccctgagcctgctggagcctgagacccaggacattccctccagctggaccttcccagtcgcctccatatgcggagtcagcgcctcaaagcgcgacgagcgctgctgcttcctctatgcactccccccggctcaggacgtccagctgtgcttccccagcgtagggcactgccagtggttctgcggcctgatccaggcctgggtgacgaacccggattccacggcgcccgcggaggaggcggagggcgcgggggagatgttggagtttgattatgagtacacggagacgggcgagcggctggtgctgggcaagggcacgtatggggtggtgtacgcgggccgcgatcgccacacgagggtgcgcatcgccatcaaggagatcccggagcgggacagcaggttctctcagcccctgcatgaagagatcgctcttcacagacgcctgcgccacaagaacatagtgcgctatctgggctcagctagccagggcggctaccttaagatcttcatggaggaagtgcctggaggcagcctgtcctccttgctgcggtcggtgtggggacccctgaaggacaacgagagcaccatcagtttctacacccgccagatcctgcagggacttggctacttgcacgacaaccacatcgtgcacagggacataaaaggggacaatgtgctgatcaacaccttcagtgggctgctcaagatttctgacttcggcacctccaagcggctggcaggcatcacaccttgcactgagaccttcacaggaactctgcagtatatggccccagaaatcattgaccagggcccacgcgggtatgggaaagcagctgacatctggtcactgggctgcactgtcattgagatggccacaggtcgcccccccttccacgagctcgggagcccacaggctgccatgtttcaggtgggtatgtacaaggtccatccgccaatgcccagctctctgtcggccgaggcccaagcctttctcctccgaacttttgagccagacccccgcctccgagccagcgcccagacactgctgggggaccccttcctgcagcctgggaaaaggagccgcagccccagctccccacgacatgctccacggccctcagatgccccttctgccagtcccactccttcagccaactcaaccacccagtctcagacattcccgtgccctcaggcaccctctcagcacccacccagccccccgaagcgctgcctcagttatgggggcaccagccagctccgggtgcccgaggagcctgcggccgaggagcctgcgtctccggaggagagttcggggctgagcctgctgcaccaggagagcaagcgtcgggccatgctggccgcagtattggagcaggagctgccagcgctggcggagaatctgcaccaggagcagaagcaagagcagggggcccgtctgggcagaaaccatgtggaagagctgctgcgctgcctcggggcacacatccacactcccaaccgccggcagctcgcccaggagctgcgggcgctgcaaggacggctgagggcccagggccttgggcctgcgcttctgcacagaccgctgtttgccttcccggatgcggtgaagcagatcctccgcaagcgccagatccgtccacactggatgttcgttctggactcactgctcagccgtgctgtgcgggcagccctgggtgtgctaggaccggaggtggagaaggaggcggtctcaccgaggtcagaggagctgagtaatgaaggggactcccagcagagcccaggccagcagagcccgcttccggtggagcccgagcagggccccgctcctctgatggtgcagctgagcctcttgagggcagagactgatcggctgcgcgaaatcctggcggggaaggaacgggagtaccaggccctggtgcagcgggctctacagcggctgaatgaggaagcccggacctatgtcctggccccagagcctccaactgctctttcaacggaccagggcctggtgcagtggctacaggaactgaatgtggattcaggcaccatccaaatgctgttgaaccatagcttcaccctccacactctgctcacctatgccactcgagatgacctcatctacacccgcatcaggggagggatggtatgccgcatctggagggccatcttggcacagcgagcaggatccacaccagtcacctctggaccctga

SEQ ID NO: 155026 - DNA, 4309 bp, Homo sapiens
  Payload ID: 10477
  Gene Symbol: MAP3K6
  Gene Name: mitogen-activated protein kinase kinase kinase 6
  Uniprot ID: O95382
  ENST ID: ENST00000374040
  CDS Start-End: 262-4104
cgatcaccggatgccccagattcctgggacccaatcccggatttcagaacctcaggaccttgcaagtccgagctaggatttctccctggactttagattcctggaacgggacgtcaggccgtattccggatccctagatcccgtgggagattctccgattccgaacggattccagatcccaagattcctgatctgccggcccaggctcctgccccgcccccggttcccagtgcgcggcgccccgcgcctgagcgcccccgcatggcggggccgtgtccccggtccggggcggagcgcgccggcagctgctggcaggacccgctggccgtggcgctgagccggggccggcagctcgcggcgcccccgggccggggctgcgcgcggagccggccgctcagcgtggtctacgtgctgacccgggagccgcagcccgggctcgagcctcgggagggaaccgaggcggagccgctgcccctgcgctgcctgcgcgaggcttgcgcgcaggtcccccggccgcggccgcccccgcagctgcgcagcctgcccttcgggacgctggagctaggcgacaccgcggctctggatgccttctacaacgcggatgtggtggtgctggaggtgagcagctcgctggtacagccctccctgttctaccaccttggtgtgcgtgagagcttcagcatgaccaacaatgtgctcctctgctcccaggccgacctccctgacctgcaggccctgcgggattgcgttggcagctacacactgatcccctatgtggtgacggccactggtcgggtgctgtgtggtgatgcaggccttctgcggggcctggctgatgggctggtacaggctggagtggggaccgaggccctgctcactcccctggtgggccggcttgcccgcctgctggaggccacacccacagactcttgtggctatttccgggagaccattcggcgggacatccggcaggcgcgggagcggttcagtgggccacagctgcggcaggagctggctcgcctgcagcggagactggacagcgtggagctgctgagccccgacatcatcatgaacttgctgctctcctaccgcgatgtgcaggactactcggccatcattgagctggtggagacgctgcaggccttgcccacctgtgatgtggccgagcagcataatgtctgcttccactacacttttgccctcaaccggaggaacaggcctggggaccgggcgaaggccctgtctgtgctgctgccgctggtacagcttgagggctctgtggcgcccgatctgtactgcatgtgtggccgtatctacaaggacatgttcttcagctcgggtttccaggatgctgggcaccgggagcaggcctatcactggtatcgcaaggcttttgacgtagagcccagccttcactcaggcatcaatgcagctgtgctcctcattgctgccgggcagcactttgaggattccaaagagctccggctaataggcatgaagctgggctgcctgctggcccgcaaaggctgcgtggagaagatgcagtattactgggatgtgggtttctacctgggagcccagatcctcgccaatgaccccacccaggtggtgctggctgcagagcagctgtataagctcaatgcccccatatggtacctggtgtccgtgatggagaccttcctgctctaccagcacttcaggcccacgccagagccccctggagggccaccacgccgtgcccacttctggctccacttcttgctacagtcctgccaaccattcaagacagcctgtgcccagggcgaccagtgcttggtgctggtcctggagatgaacaaggtgctgctgcctgcaaagctcgaggttcggggtactgacccagtaagcacagtgaccctgagcctgctggagcctgagacccaggacattccctccagctggaccttcccagtcgcctccatatgcggagtcagcgcctcaaagcgcgacgagcgctgctgcttcctctatgcactccccccggctcaggacgtccagctgtgcttccccagcgtagggcactgccagtggttctgcggcctgatccaggcctgggtgacgaacccggattccacggcgcccgcggaggaggcggagggcgcgggggagatgttggagtttgattatgagtacacggagacgggcgagcggctggtgctgggcaagggcacgtatggggtggtgtacgcgggccgcgatcgccacacgagggtgcgcatcgccatcaaggagatcccggagcgggacagcaggttctctcagcccctgcatgaagagatcgctcttcacagacgcctgcgccacaagaacatagtgcgctatctgggctcagctagccagggcggctaccttaagatcttcatggaggaagtgcctggaggcagcctgtcctccttgctgcggtcggtgtggggacccctgaaggacaacgagagcaccatcagtttctacacccgccagatcctgcagggacttggctacttgcacgacaaccacatcgtgcacagggacataaaaggggacaatgtgctgatcaacaccttcagtgggctgctcaagatttctgacttcggcacctccaagcggctggcaggcatcacaccttgcactgagaccttcacaggaactctgcagtatatggccccagaaatcattgaccagggcccacgcgggtatgggaaagcagctgacatctggtcactgggctgcactgtcattgagatggccacaggtcgcccccccttccacgagctcgggagcccacaggctgccatgtttcaggtgggtatgtacaaggtccatccgccaatgcccagctctctgtcggccgaggcccaagcctttctcctccgaacttttgagccagacccccgcctccgagccagcgcccagacactgctgggggaccccttcctgcagcctgggaaaaggagccgcagccccagctccccacgacatgctccacggccctcagatgccccttctgccagtcccactccttcagccaactcaaccacccagtctcagacattcccgtgccctcaggcaccctctcagcacccacccagccccccgaagcgctgcctcagttatgggggcaccagccagctccgggtgcccgaggagcctgcggccgaggagcctgcgtctccggaggagagttcggggctgagcctgctgcaccaggagagcaagcgtcgggccatgctggccgcagtattggagcaggagctgccagcgctggcggagaatctgcaccaggagcagaagcaagagcagggggcccgtctgggcagaaaccatgtggaagagctgctgcgctgcctcggggcacacatccacactcccaaccgccggcagctcgcccaggagctgcgggcgctgcaaggacggctgagggcccagggccttgggcctgcgcttctgcacagaccgctgtttgccttcccggatgcggtgaagcagatcctccgcaagcgccagatccgtccacactggatgttcgttctggactcactgctcagccgtgctgtgcgggcagccctgggtgtgctaggaccggaggtggagaaggaggcggtctcaccgaggtcagaggagctgagtaatgaaggggactcccagcagagcccaggccagcagagcccgcttccggtggagcccgagcagggccccgctcctctgatggtgcagctgagcctcttgagggcagagactgatcggctgcgcgaaatcctggcggggaaggaacgggagtaccaggccctggtgcagcgggctctacagcggctgaatgaggaagcccggacctatgtcctggccccagagcctccaactgctctttcaacggaccagggcctggtgcagtggctacaggaactgaatgtggattcaggcaccatccaaatgctgttgaaccatagcttcaccctccacactctgctcacctatgccactcgagatgacctcatctacacccgcatcaggggagggatggtatgccgcatctggagggccatcttggcacagcgagcaggatccacaccagtcacctctggaccctgagagctgaatgagggcatcataggccagacaggcccaaggatggatgaatggagaggacaaaggcagcttctgacacaccagccccaggacctggggcgactggaggaagccaggcgagtggggcccaggactggttccagtgagagaaaccaaccacaggcacccaagcactaccagacaaagcgtattaaacagaacacttttg

SEQ ID NO: 155027 - DNA, 2530 bp, Homo sapiens
  Payload ID: 10477
  Gene Symbol: MAP3K6
  Gene Name: mitogen-activated protein kinase kinase kinase 6
  ENST ID: ENST00000472410
  CDS Start-End: 1-2396
tcatgaacttgctgctctcctaccgcgatgtgcaggactactcggccatcattgagctggtggagacgctgcaggccttgcccacctgtgatgtggccgagcagcataatgtctgcttccactacacttttgccctcaaccggaggaacaggcctggggaccgggcgaaggccctgtctgtgctgctgccgctggtacagcttgagggctctgtggcgcccgatctgtactgcatgtgtggccgtatctacaaggacatgttcttcagctcgggtttccaggatgctgggcaccgggagcaggcctatcactggtatcgcaaggcttttgacgtagagcccagccttcactcaggcatcaatgcagctgtgctcctcattgctgccgggcagcactttgaggattccaaagagctccggctaataggcatgaagctgggctgcctgctggcccgcaaaggctgcgtggagaagatgcagtattactgggatgtgggtttctacctgggagcccagatcctcgccaatgaccccacccaggtggtgctggctgcagagcagctgtataagctcaatgcccccatatggtacctggtgtccgtgatggagaccttcctgctctaccagcacttcaggcccacgccagagccccctggagggccaccacgccgtgcccacttctggctccacttcttgctacagtcctgccaaccattcaagacagcctgtgcccagggcgaccagtgcttggtgctggtcctggagatgaacaaggtgctgctgcctgcaaagctcgaggttcggggtactgacccagtaagcacagtgaccctgagcctgctggagcctgagacccaggacattccctccagctggaccttcccagtcgcctccatatgcggagtcagcgcctcaaagcgcgacgagcgctgctgcttcctctatgcactccccccggctcaggacgtccagctgtgcttccccagcgtagggcactgccagtggttctgcggcctgatccaggcctgggtgacgaacccggattccacggcgcccgcggaggaggcggagggcgcgggggagatgttggagtttgattatgagtacacggagacgggcgagcggctggtgctgggcaagggcacgtatggggtggtgtacgcgggccgcgatcgccacacgagggtgcgcatcgccatcaaggagatcccggagcgggacagcaggttctctcagcccctgcatgaagagatcgctcttcacagacgcctgcgccacaagaacatagtgcgctatctgggctcagctagccagggcggctaccttaagatcttcatggaggaagtgcctggaggcagcctgtcctccttgctgcggtcggtgtggggacccctgaaggacaacgagagcaccatcagtttctacacccgccagatcctgcagggacttggctacttgcacgacaaccacatcgtgcacagggacataaaaggggacaatgtgctgatcaacaccttcagtgggctgctcaagatttctgacttcggcacctccaagcggctggcaggcatcacaccttgcactgagaccttcacaggaactctgcagtatatggccccagaaatcattgaccagggcccacgcgggtatgggaaagcagctgacatctggtcactgggctgcactgtcattgagatggccacaggtcgcccccccttccacgagctcgggagcccacaggctgccatgtttcaggtgggtatgtacaaggtccatccgccaatgcccagctctctgtcggccgaggcccaagcctttctcctccgaacttttgagccagacccccgcctccgagccagcgcccagacactgctgggggaccccttcctgcagcctgggaaaaggagccgcagccccagctccccacgacatgctccacggccctcagatgccccttctgccagtcccactccttcagccaactcaaccacccagtctcagacattcccgtgccctcaggcaccctctcagcacccacccagccccccgaagcgctgcctcagttatgggggcaccagccagctccgggtgcccgaggagcctgcggccgaggagcctgcgtctccggaggagagttcggggctgagcctgctgcaccaggagagcaagcgtcgggccatgctggccgcagtattggagcaggagctgccagcgctggcggagaatctgcaccaggagcagaagcaagagcagggggcccgtctgggcagaaaccatgtggaagagctgctgcgctgcctcggggcacacatccacactcccaaccgccggcagctcgcccaggagctgcgggcgctgcaaggatggatgaatggagaggacaaaggcagcttctgacacaccagccccaggacctggggcgactggaggaagccaggcgagtggggcccaggactggttccagtgagagaaaccaaccacaggcacccaagcactaccagacaaagcgtattaaacagaacacttttgaa

SEQ ID NO: 155028 - DNA, 444 bp, Homo sapiens
  Payload ID: 10477
  Gene Symbol: MAP3K6
  Gene Name: mitogen-activated protein kinase kinase kinase 6
  ENST ID: ENST00000486046
  CDS Start-End: 1-248
gggagtaccaggccctggtgcagcgggctctacagcggctgaatgaggaagcccggacctatgtcctggccccagagcctccaactgctctttcaacggaccagggcctggtgcagtggctacaggaactgaatgtggattcaggcaccatccaaatggggagggatggtatgccgcatctggagggccatcttggcacagcgagcaggatccacaccagtcacctctggaccctgagagctgaatgagggcatcataggccagacaggcccaaggatggatgaatggagaggacaaaggcagcttctgacacaccagccccaggacctggggcgactggaggaagccaggcgagtggggcccaggactggttccagtgagagaaaccaaccacaggcacccaagcactaccagacaaagcgtattaaacagaacacttttgaa

SEQ ID NO: 155029 - DNA, 4309 bp, Homo sapiens
  Payload ID: 10477
  Gene Symbol: MAP3K6
  Gene Name: mitogen-activated protein kinase kinase kinase 6
  Uniprot ID: O95382
  ENST ID: ENST00000493901
  CDS Start-End: 241-4107
gattcccaggatcccccaagtggctctgagctgccgatcaccggatgccccagattcctgggacccaatcccggatttcagaacctcaggaccttgcaagtccgagctaggatttctccctggactttagattcctggaacgggacgtcaggccatcccaagattcctgatctgccggcccaggctcctgccccgcccccggttcccagtgcgcggcgccccgcgcctgagcgcccccgcatggcggggccgtgtccccggtccggggcggagcgcgccggcagctgctggcaggacccgctggccgtggcgctgagccggggccggcagctcgcggcgcccccgggccggggctgcgcgcggagccggccgctcagcgtggtctacgtgctgacccgggagccgcagcccgggctcgagcctcgggagggaaccgaggcggagccgctgcccctgcgctgcctgcgcgaggcttgcgcgcaggtcccccggccgcggccgcccccgcagctgcgcagcctgcccttcgggacgctggagctaggcgacaccgcggctctggatgccttctacaacgcggatgtggtggtgctggaggtgagcagctcgctggtacagccctccctgttctaccaccttggtgtgcgtgagagcttcagcatgaccaacaatgtgctcctctgctcccaggccgacctccctgacctgcaggccctgcgggaggatgttttccagaagaactcggattgcgttggcagctacacactgatcccctatgtggtgacggccactggtcgggtgctgtgtggtgatgcaggccttctgcggggcctggctgatgggctggtacaggctggagtggggaccgaggccctgctcactcccctggtgggccggcttgcccgcctgctggaggccacacccacagactcttgtggctatttccgggagaccattcggcgggacatccggcaggcgcgggagcggttcagtgggccacagctgcggcaggagctggctcgcctgcagcggagactggacagcgtggagctgctgagccccgacatcatcatgaacttgctgctctcctaccgcgatgtgcaggactactcggccatcattgagctggtggagacgctgcaggccttgcccacctgtgatgtggccgagcagcataatgtctgcttccactacacttttgccctcaaccggaggaacaggcctggggaccgggcgaaggccctgtctgtgctgctgccgctggtacagcttgagggctctgtggcgcccgatctgtactgcatgtgtggccgtatctacaaggacatgttcttcagctcgggtttccaggatgctgggcaccgggagcaggcctatcactggtatcgcaaggcttttgacgtagagcccagccttcactcaggcatcaatgcagctgtgctcctcattgctgccgggcagcactttgaggattccaaagagctccggctaataggcatgaagctgggctgcctgctggcccgcaaaggctgcgtggagaagatgcagtattactgggatgtgggtttctacctgggagcccagatcctcgccaatgaccccacccaggtggtgctggctgcagagcagctgtataagctcaatgcccccatatggtacctggtgtccgtgatggagaccttcctgctctaccagcacttcaggcccacgccagagccccctggagggccaccacgccgtgcccacttctggctccacttcttgctacagtcctgccaaccattcaagacagcctgtgcccagggcgaccagtgcttggtgctggtcctggagatgaacaaggtgctgctgcctgcaaagctcgaggttcggggtactgacccagtaagcacagtgaccctgagcctgctggagcctgagacccaggacattccctccagctggaccttcccagtcgcctccatatgcggagtcagcgcctcaaagcgcgacgagcgctgctgcttcctctatgcactccccccggctcaggacgtccagctgtgcttccccagcgtagggcactgccagtggttctgcggcctgatccaggcctgggtgacgaacccggattccacggcgcccgcggaggaggcggagggcgcgggggagatgttggagtttgattatgagtacacggagacgggcgagcggctggtgctgggcaagggcacgtatggggtggtgtacgcgggccgcgatcgccacacgagggtgcgcatcgccatcaaggagatcccggagcgggacagcaggttctctcagcccctgcatgaagagatcgctcttcacagacgcctgcgccacaagaacatagtgcgctatctgggctcagctagccagggcggctaccttaagatcttcatggaggaagtgcctggaggcagcctgtcctccttgctgcggtcggtgtggggacccctgaaggacaacgagagcaccatcagtttctacacccgccagatcctgcagggacttggctacttgcacgacaaccacatcgtgcacagggacataaaaggggacaatgtgctgatcaacaccttcagtgggctgctcaagatttctgacttcggcacctccaagcggctggcaggcatcacaccttgcactgagaccttcacaggaactctgcagtatatggccccagaaatcattgaccagggcccacgcgggtatgggaaagcagctgacatctggtcactgggctgcactgtcattgagatggccacaggtcgcccccccttccacgagctcgggagcccacaggctgccatgtttcaggtgggtatgtacaaggtccatccgccaatgcccagctctctgtcggccgaggcccaagcctttctcctccgaacttttgagccagacccccgcctccgagccagcgcccagacactgctgggggaccccttcctgcagcctgggaaaaggagccgcagccccagctccccacgacatgctccacggccctcagatgccccttctgccagtcccactccttcagccaactcaaccacccagtctcagacattcccgtgccctcaggcaccctctcagcacccacccagccccccgaagcgctgcctcagttatgggggcaccagccagctccgggtgcccgaggagcctgcggccgaggagcctgcgtctccggaggagagttcggggctgagcctgctgcaccaggagagcaagcgtcgggccatgctggccgcagtattggagcaggagctgccagcgctggcggagaatctgcaccaggagcagaagcaagagcagggggcccgtctgggcagaaaccatgtggaagagctgctgcgctgcctcggggcacacatccacactcccaaccgccggcagctcgcccaggagctgcgggcgctgcaaggacggctgagggcccagggccttgggcctgcgcttctgcacagaccgctgtttgccttcccggatgcggtgaagcagatcctccgcaagcgccagatccgtccacactggatgttcgttctggactcactgctcagccgtgctgtgcgggcagccctgggtgtgctaggaccggaggtggagaaggaggcggtctcaccgaggtcagaggagctgagtaatgaaggggactcccagcagagcccaggccagcagagcccgcttccggtggagcccgagcagggccccgctcctctgatggtgcagctgagcctcttgagggcagagactgatcggctgcgcgaaatcctggcggggaaggaacgggagtaccaggccctggtgcagcgggctctacagcggctgaatgaggaagcccggacctatgtcctggccccagagcctccaactgctctttcaacggaccagggcctggtgcagtggctacaggaactgaatgtggattcaggcaccatccaaatgctgttgaaccatagcttcaccctccacactctgctcacctatgccactcgagatgacctcatctacacccgcatcaggggagggatggtatgccgcatctggagggccatcttggcacagcgagcaggatccacaccagtcacctctggaccctgagagctgaatgagggcatcataggccagacaggcccaaggatggatgaatggagaggacaaaggcagcttctgacacaccagccccaggacctggggcgactggaggaagccaggcgagtggggcccaggactggttccagtgagagaaaccaaccacaggcacccaagcactaccagacaaagcgtattaaacagaacactt

SEQ ID NO: 155030 - DNA, 3328 bp, Homo sapiens
  Payload ID: 10478
  Gene Symbol: MAP3K7
  Gene Name: mitogen-activated protein kinase kinase kinase 7
  ENST ID: ENST00000369320
  CDS Start-End: 1728-2510
cataatggtactcgaccaccactgataaaaaatttacctaagcccattgagagcctgatgactcgttgttggtctaaagatccttcccagcgcccttcaatggaggaaattgtgaaaataatgactcacttgatgcgggtataatccttcttttgaggggctttggatttaggggaatttaatatgtgctgagttttaatggaattttaaaagggatgttattactatattctgctttatatattgctatgttttctaagtgagaatgggcatttattactcatagtcagaagaggaaacatttcgagagggaaaatctagttctttatcactggaaagatggctagactaggtttctagacttgcttttttctttttgcttacattagtggacaagtatgtttgtctctgggcctgttgcctcatttgtaatgtgggagaaactgaaatagatagtctctaaagccatcacaggacttggatatattaatattatgacttcaatacatgataaactaaattttacatttttctgataccaattttcatcaagcatttagtcatttatgcaaggcaataggttgcattctcagacacatttatttgagtgacttttactatttggcctattttcaggtttttatatcccagtaaaaagttaaactttcttctatttagaagaacccttttaaatgattatcaaattttcctagtctgtgaatcaagcgcctttagaattatttggaatattttacgcctctggtttttggtacattaacaaaaactgtgaagtggtatcttggctttaaaaagttcaaatatctatgaaagtgcctgaattttgaaacagtttgttcagtagaagaatcttacaatctccttaaatatagactaagtaatttcctaaatggtaaaacgttgtttattcaatctattgaaaatttcttacgcaaagcagcttgaactaatctactaaaagtttaccatcgtatttggataccagtcatatatagaagcctaggccttaaaggtgtgtgcataagaaaacaacttagtctctgtagtcagattacttaaaactttaggatatataagttattgcagttgtaattttgcttctctgttccttgtctaatttgaggagaatacgtttcctttttttctctaaattctaacatttttgtccagcagatactttgagtattatgcctccagtttgtagaaagacattcataatctatcctcttaatatttaaaatgttctaacaattattctatggtatactagtctcagtcttcagactaacagtcactggaagtttacatcactactgtaagaacatgagtatgttttacataattatgagaaatgatactattttatttcatatgtttctctagagaaatatttgctgttttcttcaagactatctagactccaatgtaagctagattcttaggtaggtgcatggcattgatcaaagttgaaatccaagagtacattattgtaatctttgtaaaataaaaaacttaggcacctacaaatttagtatataacttagggaaaataaaacattaatcaggatttaatttgtattaaggaaattttaagctgtggtttacttttttatatatagtactttccaggagcagatgagccattacagtatccttgtcagtattcagatgaaggacagagcaactctgccaccagtacaggctcattcatggacattgcttctacaaatacgagtaacaaaagtgacactaatatggagcaagttcctgccacaaatgatactattaagcgcttagaatcaaaattgttgaaaaatcaggcaaagcaacagagtgaatctggacgtttaagcttgggagcctcccgtgggagcagtgtggagagcttgcccccaacctctgagggcaagaggatgagtgctgacatgtctgaaatagaagctaggatcgccgcaaccacaggcaacggacagccaagacgtagatccatccaagacttgactgtaactggaacagaacctggtcaggtgagcagtaggtcatccagtcccagtgtcagaatgattactacctcaggaccaacctcagaaaagccaactcgaagtcatccatggacccctgatgattccacagataccaatggatcagataactccatcccaatggcttatcttacactggatcaccaactacagcctctagcaccgtgcccaaactccaaagaatctatggcagtgtttgaacagcattgtaaaatggcacaagaatatatgaaagttcaaacagaaattgcattgttattacagagaaagcaagaactagttgcagaactggaccaggatgaaaaggaccagcaaaatacatctcgcctggtacaggaacataaaaagcttttagatgaaaacaaaagcctttctacttactaccagcaatgcaaaaaacaactagaggtcatcagaagtcagcagcagaaacgacaaggcacttcatgattctctgggaccgttacattttgaaatatgcaaagaaagactttttttttaaggaaaggaaaaccttataatgacgattcatgagtgttagctttttggcgtgttctgaatgccaactgcctatatttgctgcatttttttcattgtttattttccttttctcatggtggacatacaattttactgtttcattgcataacatggtagcatctgtgacttgaatgagcagcactttgcaacttcaaaacagatgcagtgaactgtggctgtatatgcatgctcattgtgtgaaggctagcctaacagaacaggaggtatcaaactagctgctatgtgcaaacagcgtccattttttcatattagaggtggaacctcaagaatgactttattcttgtatctcatctcaaaatattaataatttttttcccaaaagatggtatataccaagttaaagacagggtattataaatttagagtgattggtggtatattacggaaatacggaacctttagggatagttccgtgtaagggctttgatgccagcatccttggatcagtactgaactcagttccatccgtaaaatatgtaaaggtaagtggcagctgctctatttaatgaaagcagttttaccggattttgttagactaaaatttgattgtgatacattgaacaaaatggaactcatttttttttaaggagtaaagatttttaattctgtgattgtgtgtatgtgtgttgaaactgtaaagcttttatgactctaatattaatctcttaaatgaaattaaaaggcaaaagaacatgattgagcttaaa

SEQ ID NO: 155031 - DNA, 4633 bp, Homo sapiens
  Payload ID: 10478
  Gene Symbol: MAP3K7
  Gene Name: mitogen-activated protein kinase kinase kinase 7
  Uniprot ID: O43318
  ENST ID: ENST00000369325
  CDS Start-End: 1-1557
atgtctacagcctctgccgcctcctcctcctcctcgtcttcggccggtgagatgatcgaagccccttcccaggtcctcaactttgaagagatcgactacaaggagatcgaggtggaagaggttgttggaagaggagcctttggagttgtttgcaaagctaagtggagagcaaaagatgttgctattaaacaaatagaaagtgaatctgagaggaaagcgtttattgtagagcttcggcagttatcccgtgtgaaccatcctaatattgtaaagctttatggagcctgcttgaatccagtgtgtcttgtgatggaatatgctgaagggggctctttatataatgtgctgcatggtgctgaaccattgccatattatactgctgcccacgcaatgagttggtgtttacagtgttcccaaggagtggcttatcttcacagcatgcaacccaaagcgctaattcacagggacctgaaaccaccaaacttactgctggttgcaggggggacagttctaaaaatttgtgattttggtacagcctgtgacattcagacacacatgaccaataacaaggggagtgctgcttggatggcacctgaagtttttgaaggtagtaattacagtgaaaaatgtgacgtcttcagctggggtattattctttgggaagtgataacgcgtcggaaaccctttgatgagattggtggcccagctttccgaatcatgtgggctgttcataatggtactcgaccaccactgataaaaaatttacctaagcccattgagagcctgatgactcgttgttggtctaaagatccttcccagcgcccttcaatggaggaaattgtgaaaataatgactcacttgatgcggtactttccaggagcagatgagccattacagtatccttgtcagtattcagatgaaggacagagcaactctgccaccagtacaggctcattcatggacattgcttctacaaatacgagtaacaaaagtgacactaatatggagcaagttcctgccacaaatgatactattaagcgcttagaatcaaaattgttgaaaaatcaggcaaagcaacagagtgaatctggacgtttaagcttgggagcctcccgtgggagcagtgtggagagcttgcccccaacctctgagggcaagaggatgagtgctgacatgtctgaaatagaagctaggatcgccgcaaccacagcctattccaagcctaaacggggccaccgtaaaactgcttcatttggcaacattctggatgtccctgagatcgtcatatcaggcaacggacagccaagacgtagatccatccaagacttgactgtaactggaacagaacctggtcaggtgagcagtaggtcatccagtcccagtgtcagaatgattactacctcaggaccaacctcagaaaagccaactcgaagtcatccatggacccctgatgattccacagataccaatggatcagataactccatcccaatggcttatcttacactggatcaccaactacaggcaagaactagttgcagaactggaccaggatgaaaaggaccagcaaaatacatctcgcctggtacaggaacataaaaagcttttagatgaaaacaaaagcctttctacttactaccagcaatgcaaaaaacaactagaggtcatcagaagtcagcagcagaaacgacaaggcacttcatgattctctgggaccgttacattttgaaatatgcaaagaaagactttttttttaaggaaaggaaaaccttataatgacgattcatgagtgttagctttttggcgtgttctgaatgccaactgcctatatttgctgcatttttttcattgtttattttccttttctcatggtggacatacaattttactgtttcattgcataacatggtagcatctgtgacttgaatgagcagcactttgcaacttcaaaacagatgcagtgaactgtggctgtatatgcatgctcattgtgtgaaggctagcctaacagaacaggaggtatcaaactagctgctatgtgcaaacagcgtccattttttcatattagaggtggaacctcaagaatgactttattcttgtatctcatctcaaaatattaataatttttttcccaaaagatggtatataccaagttaaagacagggtattataaatttagagtgattggtggtatattacggaaatacggaacctttagggatagttccgtgtaagggctttgatgccagcatccttggatcagtactgaactcagttccatccgtaaaatatgtaaaggtaagtggcagctgctctatttaatgaaagcagttttaccggattttgttagactaaaatttgattgtgatacattgaacaaaatggaactcatttttttttaaggagtaaagatttttaattctgtgattgtgtgtatgtgtgttgaaactgtaaagcttttatgactctaatattaatctcttaaatgaaattaaaaggcaaaagaacatgattgagcttaaatgatcatttcttcctgcagtgattcttggattgttttctcatgtatttgaaaaaaaaaaaatgaagaaaaataatggaaaatggaagtaattactccagctaaaaaaagcttggacttagatttctttttatgataccaaatgagaaataaaccaggcaaatcagaaggaagttaaagaagcaaatataaattcaacaagtgtcctaattatcctggatattggaatatttgattttccttacaatcccgttctagaatgcctgccgcctttcaacactttcaagagaatttcaacacttacagagtatttatattgttaacagtaattttgctaccaaaaccttcagaataactttaataataaaatgacactgaaataatagactatacaaactctatattttttcagttggtgttaaaataagtcacattttgataccagtacaagatgtcttttaaataaggatgtcatcagtctgatttttatagcattaatgttttatgaagaaaaagttcaaaatgaaagcattaattgctgtgattattagaattctatcatgactgtattgtagtttttgctctatttcagataagcaagatctaagaagttatcaaaactattctttaaaatgctaaagcaggtaactttttcttccattattttttcctcctaccactgagttttgtaatgaattccttgtgtatacaagcaatacaggtgaatactaaactgttatttttagcttcttcaaaagctattttagaaagcttcctggaaataaatgtcttctgtcatttaatttaaataaaaggagtgttaattgttcccaaatttgattacctagctgaaacagatattggattcagcatagtaatagtaaaataaaattggcagagaaaataactgtagactaggataaagcatgactcctccatagcattgttgcttgtatgtacatctgtcactccactgaaagggacctagtcactttaaagaggccttttatctcagcacgagatatccaagcgtgaatgctaaggcttgatgtttccattaggatttagcattcgagatttcagattttatttatagtcattgatgtgttttgctgtattataacacatttaagggaaattttattatggtttttacatgtagtcatttcataaaaatatccagataggtaaatggaagaaaatagtagattttagtcatggtaccaaatgcaagaggctgttgaacagttgcttgtttgtttacagtaagttccttgagattttcagtactgtagttgccctggacattgagtacagttcagccttactctgtttttaagtagttgtgttgtcaatttcatgcttttaagtcctgatgatccttggagatgggagaaaaagataccagggataattaaaatccacagccagtttcatcagtttcctcatccatcctgcaaataaaaatgttaacaaggagccaaacttattcgttctggttttacaatttattttgaccgttttttgggtgaaaattgcaaacagccaagcaagtggctggaatgccccagtctaagaaattcaaaaacaatcactgagtaagccctaattacattaattacattttactcttgactccaggaaaagaaagcaagcttttatctaatctagagggaagtattcgtgagcaataaaaatcacttttttgagttgaataataatcagttaagaatatttaccgcatagcaacacaacatataaagatttgttacaagttgtttacggatgtttgactatttttgctgaagtattttagagtattgaatgtcttctctcttcaagtttctttcatgttcctaatttcagctcctgtagccagagatcacaggtcttccctgtgaaactttggtttctttctataaatgtgtgtggttttcagcgctcaactcctgtcttcaaatggtagtaagttctacttctacttctgtcattcagaacattttatgtcaaatgatgtaatgcagaaattcttgtgcatatttgtaactgaaggaagctttttagatttatttttgtttttaataaaattcagattcctattctaaactggta

SEQ ID NO: 155032 - DNA, 4558 bp, Homo sapiens
  Payload ID: 10478
  Gene Symbol: MAP3K7
  Gene Name: mitogen-activated protein kinase kinase kinase 7
  Uniprot ID: O43318
  ENST ID: ENST00000369327
  CDS Start-End: 7-1482
gggatcatgtctacagcctctgccgcctcctcctcctcctcgtcttcggccggtgagatgatcgaagccccttcccaggtcctcaactttgaagagatcgactacaaggagatcgaggtggaagaggttgttggaagaggagcctttggagttgtttgcaaagctaagtggagagcaaaagatgttgctattaaacaaatagaaagtgaatctgagaggaaagcgtttattgtagagcttcggcagttatcccgtgtgaaccatcctaatattgtaaagctttatggagcctgcttgaatccagtgtgtcttgtgatggaatatgctgaagggggctctttatataatgtgctgcatggtgctgaaccattgccatattatactgctgcccacgcaatgagttggtgtttacagtgttcccaaggagtggcttatcttcacagcatgcaacccaaagcgctaattcacagggacctgaaaccaccaaacttactgctggttgcaggggggacagttctaaaaatttgtgattttggtacagcctgtgacattcagacacacatgaccaataacaaggggagtgctgcttggatggcacctgaagtttttgaaggtagtaattacagtgaaaaatgtgacgtcttcagctggggtattattctttgggaagtgataacgcgtcggaaaccctttgatgagattggtggcccagctttccgaatcatgtgggctgttcataatggtactcgaccaccactgataaaaaatttacctaagcccattgagagcctgatgactcgttgttggtctaaagatccttcccagcgcccttcaatggaggaaattgtgaaaataatgactcacttgatgcggtactttccaggagcagatgagccattacagtatccttgtcagtattcagatgaaggacagagcaactctgccaccagtacaggctcattcatggacattgcttctacaaatacgagtaacaaaagtgacactaatatggagcaagttcctgccacaaatgatactattaagcgcttagaatcaaaattgttgaaaaatcaggcaaagcaacagagtgaatctggacgtttaagcttgggagcctcccgtgggagcagtgtggagagcttgcccccaacctctgagggcaagaggatgagtgctgacatgtctgaaatagaagctaggatcgccgcaaccacaggcaacggacagccaagacgtagatccatccaagacttgactgtaactggaacagaacctggtcaggtgagcagtaggtcatccagtcccagtgtcagaatgattactacctcaggaccaacctcagaaaagccaactcgaagtcatccatggacccctgatgattccacagataccaatggatcagataactccatcccaatggcttatcttacactggatcaccaactacaggcaagaactagttgcagaactggaccaggatgaaaaggaccagcaaaatacatctcgcctggtacaggaacataaaaagcttttagatgaaaacaaaagcctttctacttactaccagcaatgcaaaaaacaactagaggtcatcagaagtcagcagcagaaacgacaaggcacttcatgattctctgggaccgttacattttgaaatatgcaaagaaagactttttttttaaggaaaggaaaaccttataatgacgattcatgagtgttagctttttggcgtgttctgaatgccaactgcctatatttgctgcatttttttcattgtttattttccttttctcatggtggacatacaattttactgtttcattgcataacatggtagcatctgtgacttgaatgagcagcactttgcaacttcaaaacagatgcagtgaactgtggctgtatatgcatgctcattgtgtgaaggctagcctaacagaacaggaggtatcaaactagctgctatgtgcaaacagcgtccattttttcatattagaggtggaacctcaagaatgactttattcttgtatctcatctcaaaatattaataatttttttcccaaaagatggtatataccaagttaaagacagggtattataaatttagagtgattggtggtatattacggaaatacggaacctttagggatagttccgtgtaagggctttgatgccagcatccttggatcagtactgaactcagttccatccgtaaaatatgtaaaggtaagtggcagctgctctatttaatgaaagcagttttaccggattttgttagactaaaatttgattgtgatacattgaacaaaatggaactcatttttttttaaggagtaaagatttttaattctgtgattgtgtgtatgtgtgttgaaactgtaaagcttttatgactctaatattaatctcttaaatgaaattaaaaggcaaaagaacatgattgagcttaaatgatcatttcttcctgcagtgattcttggattgttttctcatgtatttgaaaaaaaaaaaatgaagaaaaataatggaaaatggaagtaattactccagctaaaaaaagcttggacttagatttctttttatgataccaaatgagaaataaaccaggcaaatcagaaggaagttaaagaagcaaatataaattcaacaagtgtcctaattatcctggatattggaatatttgattttccttacaatcccgttctagaatgcctgccgcctttcaacactttcaagagaatttcaacacttacagagtatttatattgttaacagtaattttgctaccaaaaccttcagaataactttaataataaaatgacactgaaataatagactatacaaactctatattttttcagttggtgttaaaataagtcacattttgataccagtacaagatgtcttttaaataaggatgtcatcagtctgatttttatagcattaatgttttatgaagaaaaagttcaaaatgaaagcattaattgctgtgattattagaattctatcatgactgtattgtagtttttgctctatttcagataagcaagatctaagaagttatcaaaactattctttaaaatgctaaagcaggtaactttttcttccattattttttcctcctaccactgagttttgtaatgaattccttgtgtatacaagcaatacaggtgaatactaaactgttatttttagcttcttcaaaagctattttagaaagcttcctggaaataaatgtcttctgtcatttaatttaaataaaaggagtgttaattgttcccaaatttgattacctagctgaaacagatattggattcagcatagtaatagtaaaataaaattggcagagaaaataactgtagactaggataaagcatgactcctccatagcattgttgcttgtatgtacatctgtcactccactgaaagggacctagtcactttaaagaggccttttatctcagcacgagatatccaagcgtgaatgctaaggcttgatgtttccattaggatttagcattcgagatttcagattttatttatagtcattgatgtgttttgctgtattataacacatttaagggaaattttattatggtttttacatgtagtcatttcataaaaatatccagataggtaaatggaagaaaatagtagattttagtcatggtaccaaatgcaagaggctgttgaacagttgcttgtttgtttacagtaagttccttgagattttcagtactgtagttgccctggacattgagtacagttcagccttactctgtttttaagtagttgtgttgtcaatttcatgcttttaagtcctgatgatccttggagatgggagaaaaagataccagggataattaaaatccacagccagtttcatcagtttcctcatccatcctgcaaataaaaatgttaacaaggagccaaacttattcgttctggttttacaatttattttgaccgttttttgggtgaaaattgcaaacagccaagcaagtggctggaatgccccagtctaagaaattcaaaaacaatcactgagtaagccctaattacattaattacattttactcttgactccaggaaaagaaagcaagcttttatctaatctagagggaagtattcgtgagcaataaaaatcacttttttgagttgaataataatcagttaagaatatttaccgcatagcaacacaacatataaagatttgttacaagttgtttacggatgtttgactatttttgctgaagtattttagagtattgaatgtcttctctcttcaagtttctttcatgttcctaatttcagctcctgtagccagagatcacaggtcttccctgtgaaactttggtttctttctataaatgtgtgtggttttcagcgctcaactcctgtcttcaaatggtagtaagttctacttctacttctgtcattcagaacattttatgtcaaatgatgtaatgcagaaattcttgtgcatatttgtaactgaaggaagctttttagatttatttttgtttttaataaaattcagattcctattctaaactggta

SEQ ID NO: 155033 - DNA, 4911 bp, Homo sapiens
  Payload ID: 10478
  Gene Symbol: MAP3K7
  Gene Name: mitogen-activated protein kinase kinase kinase 7
  Uniprot ID: O43318
  ENST ID: ENST00000369329
  CDS Start-End: 163-1983
ggacacggctgtggccgctgcctctacccccgccacggatcgccgggtagtaggactgcgcggctccaggctgagggtcggtccggaggcgggtgggcgcgggtctcacccggattgtccgggtggcaccgttcccggccccaccgggcgccgcgagggatcatgtctacagcctctgccgcctcctcctcctcctcgtcttcggccggtgagatgatcgaagccccttcccaggtcctcaactttgaagagatcgactacaaggagatcgaggtggaagaggttgttggaagaggagcctttggagttgtttgcaaagctaagtggagagcaaaagatgttgctattaaacaaatagaaagtgaatctgagaggaaagcgtttattgtagagcttcggcagttatcccgtgtgaaccatcctaatattgtaaagctttatggagcctgcttgaatccagtgtgtcttgtgatggaatatgctgaagggggctctttatataatgtgctgcatggtgctgaaccattgccatattatactgctgcccacgcaatgagttggtgtttacagtgttcccaaggagtggcttatcttcacagcatgcaacccaaagcgctaattcacagggacctgaaaccaccaaacttactgctggttgcaggggggacagttctaaaaatttgtgattttggtacagcctgtgacattcagacacacatgaccaataacaaggggagtgctgcttggatggcacctgaagtttttgaaggtagtaattacagtgaaaaatgtgacgtcttcagctggggtattattctttgggaagtgataacgcgtcggaaaccctttgatgagattggtggcccagctttccgaatcatgtgggctgttcataatggtactcgaccaccactgataaaaaatttacctaagcccattgagagcctgatgactcgttgttggtctaaagatccttcccagcgcccttcaatggaggaaattgtgaaaataatgactcacttgatgcggtactttccaggagcagatgagccattacagtatccttgtcagtattcagatgaaggacagagcaactctgccaccagtacaggctcattcatggacattgcttctacaaatacgagtaacaaaagtgacactaatatggagcaagttcctgccacaaatgatactattaagcgcttagaatcaaaattgttgaaaaatcaggcaaagcaacagagtgaatctggacgtttaagcttgggagcctcccgtgggagcagtgtggagagcttgcccccaacctctgagggcaagaggatgagtgctgacatgtctgaaatagaagctaggatcgccgcaaccacagcctattccaagcctaaacggggccaccgtaaaactgcttcatttggcaacattctggatgtccctgagatcgtcatatcaggcaacggacagccaagacgtagatccatccaagacttgactgtaactggaacagaacctggtcaggtgagcagtaggtcatccagtcccagtgtcagaatgattactacctcaggaccaacctcagaaaagccaactcgaagtcatccatggacccctgatgattccacagataccaatggatcagataactccatcccaatggcttatcttacactggatcaccaactacagcctctagcaccgtgcccaaactccaaagaatctatggcagtgtttgaacagcattgtaaaatggcacaagaatatatgaaagttcaaacagaaattgcattgttattacagagaaagcaagaactagttgcagaactggaccaggatgaaaaggaccagcaaaatacatctcgcctggtacaggaacataaaaagcttttagatgaaaacaaaagcctttctacttactaccagcaatgcaaaaaacaactagaggtcatcagaagtcagcagcagaaacgacaaggcacttcatgattctctgggaccgttacattttgaaatatgcaaagaaagactttttttttaaggaaaggaaaaccttataatgacgattcatgagtgttagctttttggcgtgttctgaatgccaactgcctatatttgctgcatttttttcattgtttattttccttttctcatggtggacatacaattttactgtttcattgcataacatggtagcatctgtgacttgaatgagcagcactttgcaacttcaaaacagatgcagtgaactgtggctgtatatgcatgctcattgtgtgaaggctagcctaacagaacaggaggtatcaaactagctgctatgtgcaaacagcgtccattttttcatattagaggtggaacctcaagaatgactttattcttgtatctcatctcaaaatattaataatttttttcccaaaagatggtatataccaagttaaagacagggtattataaatttagagtgattggtggtatattacggaaatacggaacctttagggatagttccgtgtaagggctttgatgccagcatccttggatcagtactgaactcagttccatccgtaaaatatgtaaaggtaagtggcagctgctctatttaatgaaagcagttttaccggattttgttagactaaaatttgattgtgatacattgaacaaaatggaactcatttttttttaaggagtaaagatttttaattctgtgattgtgtgtatgtgtgttgaaactgtaaagcttttatgactctaatattaatctcttaaatgaaattaaaaggcaaaagaacatgattgagcttaaatgatcatttcttcctgcagtgattcttggattgttttctcatgtatttgaaaaaaaaaaaatgaagaaaaataatggaaaatggaagtaattactccagctaaaaaaagcttggacttagatttctttttatgataccaaatgagaaataaaccaggcaaatcagaaggaagttaaagaagcaaatataaattcaacaagtgtcctaattatcctggatattggaatatttgattttccttacaatcccgttctagaatgcctgccgcctttcaacactttcaagagaatttcaacacttacagagtatttatattgttaacagtaattttgctaccaaaaccttcagaataactttaataataaaatgacactgaaataatagactatacaaactctatattttttcagttggtgttaaaataagtcacattttgataccagtacaagatgtcttttaaataaggatgtcatcagtctgatttttatagcattaatgttttatgaagaaaaagttcaaaatgaaagcattaattgctgtgattattagaattctatcatgactgtattgtagtttttgctctatttcagataagcaagatctaagaagttatcaaaactattctttaaaatgctaaagcaggtaactttttcttccattattttttcctcctaccactgagttttgtaatgaattccttgtgtatacaagcaatacaggtgaatactaaactgttatttttagcttcttcaaaagctattttagaaagcttcctggaaataaatgtcttctgtcatttaatttaaataaaaggagtgttaattgttcccaaatttgattacctagctgaaacagatattggattcagcatagtaatagtaaaataaaattggcagagaaaataactgtagactaggataaagcatgactcctccatagcattgttgcttgtatgtacatctgtcactccactgaaagggacctagtcactttaaagaggccttttatctcagcacgagatatccaagcgtgaatgctaaggcttgatgtttccattaggatttagcattcgagatttcagattttatttatagtcattgatgtgttttgctgtattataacacatttaagggaaattttattatggtttttacatgtagtcatttcataaaaatatccagataggtaaatggaagaaaatagtagattttagtcatggtaccaaatgcaagaggctgttgaacagttgcttgtttgtttacagtaagttccttgagattttcagtactgtagttgccctggacattgagtacagttcagccttactctgtttttaagtagttgtgttgtcaatttcatgcttttaagtcctgatgatccttggagatgggagaaaaagataccagggataattaaaatccacagccagtttcatcagtttcctcatccatcctgcaaataaaaatgttaacaaggagccaaacttattcgttctggttttacaatttattttgaccgttttttgggtgaaaattgcaaacagccaagcaagtggctggaatgccccagtctaagaaattcaaaaacaatcactgagtaagccctaattacattaattacattttactcttgactccaggaaaagaaagcaagcttttatctaatctagagggaagtattcgtgagcaataaaaatcacttttttgagttgaataataatcagttaagaatatttaccgcatagcaacacaacatataaagatttgttacaagttgtttacggatgtttgactatttttgctgaagtattttagagtattgaatgtcttctctcttcaagtttctttcatgttcctaatttcagctcctgtagccagagatcacaggtcttccctgtgaaactttggtttctttctataaatgtgtgtggttttcagcgctcaactcctgtcttcaaatggtagtaagttctacttctacttctgtcattcagaacattttatgtcaaatgatgtaatgcagaaattcttgtgcatatttgtaactgaaggaagctttttagatttatttttgtttttaataaaattcagattcctattctaaactggta

SEQ ID NO: 155034 - DNA, 4830 bp, Homo sapiens
  Payload ID: 10478
  Gene Symbol: MAP3K7
  Gene Name: mitogen-activated protein kinase kinase kinase 7
  Uniprot ID: O43318
  ENST ID: ENST00000369332
  CDS Start-End: 163-1902
ggacacggctgtggccgctgcctctacccccgccacggatcgccgggtagtaggactgcgcggctccaggctgagggtcggtccggaggcgggtgggcgcgggtctcacccggattgtccgggtggcaccgttcccggccccaccgggcgccgcgagggatcatgtctacagcctctgccgcctcctcctcctcctcgtcttcggccggtgagatgatcgaagccccttcccaggtcctcaactttgaagagatcgactacaaggagatcgaggtggaagaggttgttggaagaggagcctttggagttgtttgcaaagctaagtggagagcaaaagatgttgctattaaacaaatagaaagtgaatctgagaggaaagcgtttattgtagagcttcggcagttatcccgtgtgaaccatcctaatattgtaaagctttatggagcctgcttgaatccagtgtgtcttgtgatggaatatgctgaagggggctctttatataatgtgctgcatggtgctgaaccattgccatattatactgctgcccacgcaatgagttggtgtttacagtgttcccaaggagtggcttatcttcacagcatgcaacccaaagcgctaattcacagggacctgaaaccaccaaacttactgctggttgcaggggggacagttctaaaaatttgtgattttggtacagcctgtgacattcagacacacatgaccaataacaaggggagtgctgcttggatggcacctgaagtttttgaaggtagtaattacagtgaaaaatgtgacgtcttcagctggggtattattctttgggaagtgataacgcgtcggaaaccctttgatgagattggtggcccagctttccgaatcatgtgggctgttcataatggtactcgaccaccactgataaaaaatttacctaagcccattgagagcctgatgactcgttgttggtctaaagatccttcccagcgcccttcaatggaggaaattgtgaaaataatgactcacttgatgcggtactttccaggagcagatgagccattacagtatccttgtcagtattcagatgaaggacagagcaactctgccaccagtacaggctcattcatggacattgcttctacaaatacgagtaacaaaagtgacactaatatggagcaagttcctgccacaaatgatactattaagcgcttagaatcaaaattgttgaaaaatcaggcaaagcaacagagtgaatctggacgtttaagcttgggagcctcccgtgggagcagtgtggagagcttgcccccaacctctgagggcaagaggatgagtgctgacatgtctgaaatagaagctaggatcgccgcaaccacaggcaacggacagccaagacgtagatccatccaagacttgactgtaactggaacagaacctggtcaggtgagcagtaggtcatccagtcccagtgtcagaatgattactacctcaggaccaacctcagaaaagccaactcgaagtcatccatggacccctgatgattccacagataccaatggatcagataactccatcccaatggcttatcttacactggatcaccaactacagcctctagcaccgtgcccaaactccaaagaatctatggcagtgtttgaacagcattgtaaaatggcacaagaatatatgaaagttcaaacagaaattgcattgttattacagagaaagcaagaactagttgcagaactggaccaggatgaaaaggaccagcaaaatacatctcgcctggtacaggaacataaaaagcttttagatgaaaacaaaagcctttctacttactaccagcaatgcaaaaaacaactagaggtcatcagaagtcagcagcagaaacgacaaggcacttcatgattctctgggaccgttacattttgaaatatgcaaagaaagactttttttttaaggaaaggaaaaccttataatgacgattcatgagtgttagctttttggcgtgttctgaatgccaactgcctatatttgctgcatttttttcattgtttattttccttttctcatggtggacatacaattttactgtttcattgcataacatggtagcatctgtgacttgaatgagcagcactttgcaacttcaaaacagatgcagtgaactgtggctgtatatgcatgctcattgtgtgaaggctagcctaacagaacaggaggtatcaaactagctgctatgtgcaaacagcgtccattttttcatattagaggtggaacctcaagaatgactttattcttgtatctcatctcaaaatattaataatttttttcccaaaagatggtatataccaagttaaagacagggtattataaatttagagtgattggtggtatattacggaaatacggaacctttagggatagttccgtgtaagggctttgatgccagcatccttggatcagtactgaactcagttccatccgtaaaatatgtaaaggtaagtggcagctgctctatttaatgaaagcagttttaccggattttgttagactaaaatttgattgtgatacattgaacaaaatggaactcatttttttttaaggagtaaagatttttaattctgtgattgtgtgtatgtgtgttgaaactgtaaagcttttatgactctaatattaatctcttaaatgaaattaaaaggcaaaagaacatgattgagcttaaatgatcatttcttcctgcagtgattcttggattgttttctcatgtatttgaaaaaaaaaaaatgaagaaaaataatggaaaatggaagtaattactccagctaaaaaaagcttggacttagatttctttttatgataccaaatgagaaataaaccaggcaaatcagaaggaagttaaagaagcaaatataaattcaacaagtgtcctaattatcctggatattggaatatttgattttccttacaatcccgttctagaatgcctgccgcctttcaacactttcaagagaatttcaacacttacagagtatttatattgttaacagtaattttgctaccaaaaccttcagaataactttaataataaaatgacactgaaataatagactatacaaactctatattttttcagttggtgttaaaataagtcacattttgataccagtacaagatgtcttttaaataaggatgtcatcagtctgatttttatagcattaatgttttatgaagaaaaagttcaaaatgaaagcattaattgctgtgattattagaattctatcatgactgtattgtagtttttgctctatttcagataagcaagatctaagaagttatcaaaactattctttaaaatgctaaagcaggtaactttttcttccattattttttcctcctaccactgagttttgtaatgaattccttgtgtatacaagcaatacaggtgaatactaaactgttatttttagcttcttcaaaagctattttagaaagcttcctggaaataaatgtcttctgtcatttaatttaaataaaaggagtgttaattgttcccaaatttgattacctagctgaaacagatattggattcagcatagtaatagtaaaataaaattggcagagaaaataactgtagactaggataaagcatgactcctccatagcattgttgcttgtatgtacatctgtcactccactgaaagggacctagtcactttaaagaggccttttatctcagcacgagatatccaagcgtgaatgctaaggcttgatgtttccattaggatttagcattcgagatttcagattttatttatagtcattgatgtgttttgctgtattataacacatttaagggaaattttattatggtttttacatgtagtcatttcataaaaatatccagataggtaaatggaagaaaatagtagattttagtcatggtaccaaatgcaagaggctgttgaacagttgcttgtttgtttacagtaagttccttgagattttcagtactgtagttgccctggacattgagtacagttcagccttactctgtttttaagtagttgtgttgtcaatttcatgcttttaagtcctgatgatccttggagatgggagaaaaagataccagggataattaaaatccacagccagtttcatcagtttcctcatccatcctgcaaataaaaatgttaacaaggagccaaacttattcgttctggttttacaatttattttgaccgttttttgggtgaaaattgcaaacagccaagcaagtggctggaatgccccagtctaagaaattcaaaaacaatcactgagtaagccctaattacattaattacattttactcttgactccaggaaaagaaagcaagcttttatctaatctagagggaagtattcgtgagcaataaaaatcacttttttgagttgaataataatcagttaagaatatttaccgcatagcaacacaacatataaagatttgttacaagttgtttacggatgtttgactatttttgctgaagtattttagagtattgaatgtcttctctcttcaagtttctttcatgttcctaatttcagctcctgtagccagagatcacaggtcttccctgtgaaactttggtttctttctataaatgtgtgtggttttcagcgctcaactcctgtcttcaaatggtagtaagttctacttctacttctgtcattcagaacattttatgtcaaatgatgtaatgcagaaattcttgtgcatatttgtaactgaaggaagctttttagatttatttttgtttttaataaaattcagattcctattctaaactggta

SEQ ID NO: 155035 - DNA, 3096 bp, Homo sapiens
  Payload ID: 10479
  Gene Symbol: MAP3K8
  Gene Name: mitogen-activated protein kinase kinase kinase 8
  Uniprot ID: P41279
  ENST ID: ENST00000263056
  CDS Start-End: 697-2100
cgggcgcccagagggcaaatgaggggcggcggggtggcgggtgggggggagacgcggaatttcccagcgcgggggctctggcttaccctgcaaccgggcagtctctttctgtttacggagagaaaggggaaatggaaaagtcggggaggcggtggctggcgtccgctgcgccgcccctgggcaggctcagacgccgtgagtcaggggcagagcagggcggtctgagcgtgcgggcgacgcgggtctcactcgtccgctccgctctggactgcgcgccacgctctggggtccggcgccctggttcctgcttctgccgctgccgccgccggatcccagtggcccggcgtgctcggctcccacaggcctgcagccagcatcgcaccgaaccttcggggggccgcggctggagcgctcggccggcgtgggagcgccaaggccgcagatgcaatcttcttaccgcgaagaagccaggggaataggtagccacatcttgtttgcagataagaaaggaagctaacgcagtatctgcaaagccaggagtctgactcagtacttttctcactcatgcatacaaagcagctaaaaatgacacagcttatttaccatgcccctgacactgcactgagcactttatgagcttgaactctgttaatcctcacgaccacctcatgagactctccagaaagagcaacagtaatggagtacatgagcactggaagtgacaataaagaagagattgatttattaattaaacatttaaatgtgtctgatgtaatagacattatggaaaatctttatgcaagtgaagagccagcagtttatgaacccagtctaatgaccatgtgtcaagacagtaatcaaaacgatgagcgttctaagtctctgctgcttagtggccaagaggtaccatggttgtcatcagtcagatatggaactgtggaggatttgcttgcttttgcaaaccatatatccaacactgcaaagcatttttatggacaacgaccacaggaatctggaattttattaaacatggtcatcactccccaaaatggacgttaccaaatagattccgatgttctcctgatcccctggaagctgacttacaggaatattggttctgattttattcctcggggcgcctttggaaaggtatacttggcacaagatataaagacgaagaaaagaatggcgtgtaaactgatcccagtagatcaatttaagccatctgatgtggaaatccaggcttgcttccggcacgagaacatcgcagagctgtatggcgcagtcctgtggggtgaaactgtccatctctttatggaagcaggcgagggagggtctgttctggagaaactggagagctgtggaccaatgagagaatttgaaattatttgggtgacaaagcatgttctcaagggacttgattttctacactcaaagaaagtgatccatcatgatattaaacctagcaacattgttttcatgtccacaaaagctgttttggtggattttggcctaagtgttcaaatgaccgaagatgtctattttcctaaggacctccgaggaacagagatttacatgagcccagaggtcatcctgtgcaggggccattcaaccaaagcagacatctacagcctgggggccacgctcatccacatgcagacgggcaccccaccctgggtgaagcgctaccctcgctcagcctatccctcctacctgtacataatccacaagcaagcacctccactggaagacattgcagatgactgcagtccagggatgagagagctgatagaagcttccctggagagaaaccccaatcaccgcccaagagccgcagacctactaaaacatgaggccctgaacccgcccagagaggatcagccacgctgtcagagtctggactctgccctcttggagcgcaagaggctgctgagtaggaaggagctggaacttcctgagaacattgctgattcttcgtgcacaggaagcaccgaggaatctgagatgctcaagaggcaacgctctctctacatcgacctcggcgctctggctggctacttcaatcttgttcggggaccaccaacgcttgaatatggctgaaggatgccatgtttgctctaaattaagacagcattgatctcctggaggctggttctgctgcctctacacaggggccctgtacagtgaatggtgccattttcgaaggagcagtgtgacctcctgtgacccgtgaatgtgcctccaagcggccctgtgtgtttgacatgtgaagctatttgatatgcaccaggtctcaaggttctcatttctcaggtgacgtgattctaaggcaggaatttgagagttcacagaaggatcgtgtctgctgactgtttcattcactgtgcactttgctcaaaattttaaaaataccaatcacaaggataatagagtagcctaaaattactattcttggttcttatttaagtatggaatattcattttactcagaatagctgttttgtgtatattggtgtatattatataactctttgagcctttattggtaaattctggtatacattgaattcattataatttgggtgactagaacaacttgaagattgtagcaataagctggactagtgtcctaaaaatggctaactgatgaattagaagccatctgacagcaggccactagtgacagtttcttttgtgttcctatggaaacattttatactgtacatgctatgctgaagacattcaaaacgtgatgttttgaatgtggataaaactgtgtaaaccacataatttttgtacatcccaaaggatgagaatgtgacctttaagaaaaatgaaaacttttgtaaattattgatgattttgtaattcttatgactaaattttcttttaagcatttgtatattaaaatagcatactgtgtatgttttatatcaaatgccttcatgaatctttcatacatatatatatttgtaacattgtaaagtatgtgagtagtcttatgtaaagtatgtttttacattatgcaaataaaacccaatacttttgtccaatgtggttggtcaaatcaactgaataaattcagtattttgcctt

SEQ ID NO: 155036 - DNA, 2518 bp, Homo sapiens
  Payload ID: 10479
  Gene Symbol: MAP3K8
  Gene Name: mitogen-activated protein kinase kinase kinase 8
  Uniprot ID: P41279
  ENST ID: ENST00000375321
  CDS Start-End: 118-1521
aaatcctgttgccaatccttgtatgtcagtttcccatgggtcttgaatgcaaatacaaatatcgtaaactaaatatttgtgttttctttcctagactctccagaaagagcaacagtaatggagtacatgagcactggaagtgacaataaagaagagattgatttattaattaaacatttaaatgtgtctgatgtaatagacattatggaaaatctttatgcaagtgaagagccagcagtttatgaacccagtctaatgaccatgtgtcaagacagtaatcaaaacgatgagcgttctaagtctctgctgcttagtggccaagaggtaccatggttgtcatcagtcagatatggaactgtggaggatttgcttgcttttgcaaaccatatatccaacactgcaaagcatttttatggacaacgaccacaggaatctggaattttattaaacatggtcatcactccccaaaatggacgttaccaaatagattccgatgttctcctgatcccctggaagctgacttacaggaatattggttctgattttattcctcggggcgcctttggaaaggtatacttggcacaagatataaagacgaagaaaagaatggcgtgtaaactgatcccagtagatcaatttaagccatctgatgtggaaatccaggcttgcttccggcacgagaacatcgcagagctgtatggcgcagtcctgtggggtgaaactgtccatctctttatggaagcaggcgagggagggtctgttctggagaaactggagagctgtggaccaatgagagaatttgaaattatttgggtgacaaagcatgttctcaagggacttgattttctacactcaaagaaagtgatccatcatgatattaaacctagcaacattgttttcatgtccacaaaagctgttttggtggattttggcctaagtgttcaaatgaccgaagatgtctattttcctaaggacctccgaggaacagagatttacatgagcccagaggtcatcctgtgcaggggccattcaaccaaagcagacatctacagcctgggggccacgctcatccacatgcagacgggcaccccaccctgggtgaagcgctaccctcgctcagcctatccctcctacctgtacataatccacaagcaagcacctccactggaagacattgcagatgactgcagtccagggatgagagagctgatagaagcttccctggagagaaaccccaatcaccgcccaagagccgcagacctactaaaacatgaggccctgaacccgcccagagaggatcagccacgctgtcagagtctggactctgccctcttggagcgcaagaggctgctgagtaggaaggagctggaacttcctgagaacattgctgattcttcgtgcacaggaagcaccgaggaatctgagatgctcaagaggcaacgctctctctacatcgacctcggcgctctggctggctacttcaatcttgttcggggaccaccaacgcttgaatatggctgaaggatgccatgtttgctctaaattaagacagcattgatctcctggaggctggttctgctgcctctacacaggggccctgtacagtgaatggtgccattttcgaaggagcagtgtgacctcctgtgacccgtgaatgtgcctccaagcggccctgtgtgtttgacatgtgaagctatttgatatgcaccaggtctcaaggttctcatttctcaggtgacgtgattctaaggcaggaatttgagagttcacagaaggatcgtgtctgctgactgtttcattcactgtgcactttgctcaaaattttaaaaataccaatcacaaggataatagagtagcctaaaattactattcttggttcttatttaagtatggaatattcattttactcagaatagctgttttgtgtatattggtgtatattatataactctttgagcctttattggtaaattctggtatacattgaattcattataatttgggtgactagaacaacttgaagattgtagcaataagctggactagtgtcctaaaaatggctaactgatgaattagaagccatctgacagcaggccactagtgacagtttcttttgtgttcctatggaaacattttatactgtacatgctatgctgaagacattcaaaacgtgatgttttgaatgtggataaaactgtgtaaaccacataatttttgtacatcccaaaggatgagaatgtgacctttaagaaaaatgaaaacttttgtaaattattgatgattttgtaattcttatgactaaattttcttttaagcatttgtatattaaaatagcatactgtgtatgttttatatcaaatgccttcatgaatctttcatacatatatatatttgtaacattgtaaagtatgtgagtagtcttatgtaaagtatgtttttacattatgcaaataaaacccaatacttttgtccaatgtggttggtcaaatcaactgaataaattcagtattttgcctta

SEQ ID NO: 155037 - DNA, 932 bp, Homo sapiens
  Payload ID: 10479
  Gene Symbol: MAP3K8
  Gene Name: mitogen-activated protein kinase kinase kinase 8
  ENST ID: ENST00000375322
  CDS Start-End: 390-788
cttctgccgctgccgccgccggatcccagtggcccggcgtgctcggctcccacaggcctgcagccagcatcgcaccgaaccttcggggggccgcggctggagcgctcggccggcgtgggagcgccaaggccgcagatgcaatcttcttaccgcgaagaagccaggggaataggtagccacatcttgtttgcagataagaaaggaagctaacgcagtatctgcaaagccaggagtctgactcagtacttttctcactcatgcatacaaagcagctaaaaatgacacagcttatttaccatgcccctgacactgcactgagcactttatgagcttgaactctgttaatcctcacgaccacctcatgagactctccagaaagagcaacagtaatggagtacatgagcactggaagtgacaataaagaagagattgatttattaattaaacatttaaatgtgtctgatgtaatagacattatggaaaatctttatgcaagtgaagagccagcagtttatgaacccagtctaatgaccatgtgtcaagacagtaatcaaaacgatgagcgttctaagtctctgctgcttagtggccaagaggtaccatggttgtcatcagtcagatatggaactgtggaggatttgcttgcttttgcaaaccatatatccaacactgcaaagcatttttatggacaacgaccacaggaatctggaattttattaaacatggtacgtttctttccgatcagttgggtgctatgtgctcagctttcctactgcagcttcatttaatgcagagtggtgtttgaatttggcttagatgggctggcaggcatgattttaaaaaatgtaatcatcagtaagaagtacttccatgttaaagatgcaaaaaaaaaagtcttcattaaaatttctatttaaagattcttgatcata

SEQ ID NO: 155038 - DNA, 776 bp, Homo sapiens
  Payload ID: 10479
  Gene Symbol: MAP3K8
  Gene Name: mitogen-activated protein kinase kinase kinase 8
  ENST ID: ENST00000413724
  CDS Start-End: 108-776
cgcggggaagcggggacccgctgtcactgcgcctcccgctgccgacgccgcctggacggccgcactctccctgcccgagacccgactctccagaaagagcaacagtaatggagtacatgagcactggaagtgacaataaagaagagattgatttattaattaaacatttaaatgtgtctgatgtaatagacattatggaaaatctttatgcaagtgaagagccagcagtttatgaacccagtctaatgaccatgtgtcaagacagtaatcaaaacgatgagcgttctaagtctctgctgcttagtggccaagaggtaccatggttgtcatcagtcagatatggaactgtggaggatttgcttgcttttgcaaaccatatatccaacactgcaaagcatttttatggacaacgaccacaggaatctggaattttattaaacatggtcatcactccccaaaatggacgttaccaaatagattccgatgttctcctgatcccctggaagctgacttacaggaatattggttctgattttattcctcggggcgcctttggaaaggtatacttggcacaagatataaagacgaagaaaagaatggcgtgtaaactgatcccagtagatcaatttaagccatctgatgtggaaatccaggcttgcttccggcacgagaacatcgcagagctgtatggcgcagtcctgtggggtgaaactgtccatctctttatggaagcaggcgagggagggtctgttctggagaaactggagagctgtgga

SEQ ID NO: 155039 - DNA, 1026 bp, Homo sapiens
  Payload ID: 10479
  Gene Symbol: MAP3K8
  Gene Name: mitogen-activated protein kinase kinase kinase 8
  ENST ID: ENST00000415139
  CDS Start-End: 262-1026
gggcagagcagggcggtctgagcgtgcgggcgacgcgggtctcactcgtccgctccgctctggactgcgcgccacgctctggggtccggcgccctggttcctgcttctgccgctgccgccgccggatcccagtggcccggcgtgctcggctcccacaggcctgcagccagcatcgcaccgaaccttcggggggccgcggctggagcgctcggccggcgtgggagcgccaaggccgcagactctccagaaagagcaacagtaatggagtacatgagcactggaagtgacaataaagaagagattgatttattaattaaacatttaaatgtgtctgatgtaatagacattatggaaaatctttatgcaagtgaagagccagcagtttatgaacccagtctaatgaccatgtgtcaagacagtaatcaaaacgatgagcgttctaagtctctgctgcttagtggccaagaggtaccatggttgtcatcagtcagatatggaactgtggaggatttgcttgcttttgcaaaccatatatccaacactgcaaagcatttttatggacaacgaccacaggaatctggaattttattaaacatggtcatcactccccaaaatggacgttaccaaatagattccgatgttctcctgatcccctggaagctgacttacaggaatattggttctgattttattcctcggggcgcctttggaaaggtatacttggcacaagatataaagacgaagaaaagaatggcgtgtaaactgatcccagtagatcaatttaagccatctgatgtggaaatccaggcttgcttccggcacgagaacatcgcagagctgtatggcgcagtcctgtggggtgaaactgtccatctctttatggaagcaggcgagggagggtctgttctggagaaactggagagctgtggaccaatgagagaatttgaaattatttgggtgacaaagcatgttctcaagggacttgattttctacactcaaagaaagtgatccatcatgatattaaa

SEQ ID NO: 155040 - DNA, 2782 bp, Homo sapiens
  Payload ID: 10479
  Gene Symbol: MAP3K8
  Gene Name: mitogen-activated protein kinase kinase kinase 8
  Uniprot ID: P41279
  ENST ID: ENST00000542547
  CDS Start-End: 382-1785
accctgcaaccgggcagtctctttctgtttacggagagaaaggggaaatggaaaagtcggggaggcggtggctggcgtccgctgcgccgcccctgggcaggctcagacgccgtgagtcaggggcagagcagggcggtctgagcgtgcgggcgacgcgggtctcactcgtccgctccgctctggactgcgcgccacgctctggggtccggcgccctggttcctgcttctgccgctgccgccgccggatcccagtggcccggcgtgctcggctcccacaggcctgcagccagcatcgcaccgaaccttcggggggccgcggctggagcgctcggccggcgtgggagcgccaaggccgcagactctccagaaagagcaacagtaatggagtacatgagcactggaagtgacaataaagaagagattgatttattaattaaacatttaaatgtgtctgatgtaatagacattatggaaaatctttatgcaagtgaagagccagcagtttatgaacccagtctaatgaccatgtgtcaagacagtaatcaaaacgatgagcgttctaagtctctgctgcttagtggccaagaggtaccatggttgtcatcagtcagatatggaactgtggaggatttgcttgcttttgcaaaccatatatccaacactgcaaagcatttttatggacaacgaccacaggaatctggaattttattaaacatggtcatcactccccaaaatggacgttaccaaatagattccgatgttctcctgatcccctggaagctgacttacaggaatattggttctgattttattcctcggggcgcctttggaaaggtatacttggcacaagatataaagacgaagaaaagaatggcgtgtaaactgatcccagtagatcaatttaagccatctgatgtggaaatccaggcttgcttccggcacgagaacatcgcagagctgtatggcgcagtcctgtggggtgaaactgtccatctctttatggaagcaggcgagggagggtctgttctggagaaactggagagctgtggaccaatgagagaatttgaaattatttgggtgacaaagcatgttctcaagggacttgattttctacactcaaagaaagtgatccatcatgatattaaacctagcaacattgttttcatgtccacaaaagctgttttggtggattttggcctaagtgttcaaatgaccgaagatgtctattttcctaaggacctccgaggaacagagatttacatgagcccagaggtcatcctgtgcaggggccattcaaccaaagcagacatctacagcctgggggccacgctcatccacatgcagacgggcaccccaccctgggtgaagcgctaccctcgctcagcctatccctcctacctgtacataatccacaagcaagcacctccactggaagacattgcagatgactgcagtccagggatgagagagctgatagaagcttccctggagagaaaccccaatcaccgcccaagagccgcagacctactaaaacatgaggccctgaacccgcccagagaggatcagccacgctgtcagagtctggactctgccctcttggagcgcaagaggctgctgagtaggaaggagctggaacttcctgagaacattgctgattcttcgtgcacaggaagcaccgaggaatctgagatgctcaagaggcaacgctctctctacatcgacctcggcgctctggctggctacttcaatcttgttcggggaccaccaacgcttgaatatggctgaaggatgccatgtttgctctaaattaagacagcattgatctcctggaggctggttctgctgcctctacacaggggccctgtacagtgaatggtgccattttcgaaggagcagtgtgacctcctgtgacccgtgaatgtgcctccaagcggccctgtgtgtttgacatgtgaagctatttgatatgcaccaggtctcaaggttctcatttctcaggtgacgtgattctaaggcaggaatttgagagttcacagaaggatcgtgtctgctgactgtttcattcactgtgcactttgctcaaaattttaaaaataccaatcacaaggataatagagtagcctaaaattactattcttggttcttatttaagtatggaatattcattttactcagaatagctgttttgtgtatattggtgtatattatataactctttgagcctttattggtaaattctggtatacattgaattcattataatttgggtgactagaacaacttgaagattgtagcaataagctggactagtgtcctaaaaatggctaactgatgaattagaagccatctgacagcaggccactagtgacagtttcttttgtgttcctatggaaacattttatactgtacatgctatgctgaagacattcaaaacgtgatgttttgaatgtggataaaactgtgtaaaccacataatttttgtacatcccaaaggatgagaatgtgacctttaagaaaaatgaaaacttttgtaaattattgatgattttgtaattcttatgactaaattttcttttaagcatttgtatattaaaatagcatactgtgtatgttttatatcaaatgccttcatgaatctttcatacatatatatatttgtaacattgtaaagtatgtgagtagtcttatgtaaagtatgtttttacattatgcaaataaaacccaatacttttgtccaatgtggttggtcaaatcaactgaataaattcagtattttgcctta

SEQ ID NO: 155041 - DNA, 4025 bp, Homo sapiens
  Payload ID: 10480
  Gene Symbol: MAP3K9
  Gene Name: mitogen-activated protein kinase kinase kinase 9
  ENST ID: ENST00000381250
  CDS Start-End: 336-3581
ggagagcggcggccggctggcagcggcgggcaccggctgcgcgagcaggtaccggcggcagaggtgacgaggccgcccccgggggggcgagcgggcaggcggggactcggcccgctgcgcccctaggctgcgcgaagagctcgcgctcggcgctcttctcgtaccgcggtaacagcgccggcgagccggctctcccagccctgccagcccgggccctacctgcggccgccgtcgttgggggggggtcctcccagctctgcggaggcgcatgaacaataggcggcggcggctcctgcgggcggcggcggccccgcaccctatggatcggccgctccatggagccctccagagcgcttctcggctgcctagcgagcgccgccgctgccgccccgccgggggaggatggagcaggggccggggccgaggaggaggaggaggaggaggaggaggcggcggcggcggtgggccccggggagctgggctgcgacgcgccgctgccctactggacggccgtgttcgagtacgaggcggcgggcgaggacgagctgaccctgcggctgggcgacgtggtggaggtgctgtccaaggactcgcaggtgtccggcgacgagggctggtggaccgggcagctgaaccagcgggtgggcatcttccccagcaactacgtgaccccgcgcagcgccttctccagccgctgccagcccggcggcgaggaccccagttgctacccgcccattcagttgttagaaattgattttgcggagctcaccttggaagagattattggcatcgggggctttgggaaggtctatcgtgctttctggataggggatgaggttgctgtgaaagcagctcgccacgaccctgatgaggacatcagccagaccatagagaatgttcgccaagaggccaagctcttcgccatgctgaagcaccccaacatcattgccctaagaggggtatgtctgaaggagcccaacctctgcttggtcatggagtttgctcgtggaggacctttgaatagagtgttatctgggaaaaggattcccccagacatcctggtgaattgggctgtgcagattgccagagggatgaactacttacatgatgaggcaattgttcccatcatccaccgcgaccttaagtccagcaacatattgatcctccagaaggtggagaatggagacctgagcaacaagattctgaagatcactgattttggcctggctcgggaatggcaccgaaccaccaagatgagtgcggcagggacgtatgcttggatggcacccgaagtcatccgggcctccatgttttccaaaggcagtgatgtgtggagctatggggtgctactttgggagttgctgactggtgaggtgccctttcgaggcattgatggcttagcagtcgcttatggagtggccatgaacaaactcgcccttcctattccttctacgtgcccagaaccttttgccaaactcatggaagactgctggaatcctgatccccactcacgaccatctttcacgaatatcctggaccagctaaccaccatagaggagtctggtttctttgaaatgcccaaggactccttccactgcctgcaggacaactggaaacacgagattcaggagatgtttgaccaactcagggccaaagaaaaggaacttcgcacctgggaggaggagctgacgcgggctgcactgcagcagaagaaccaggaggaactgctgcggcgtcgggagcaggagctggccgagcgggagattgacatcctggaacgggagctcaacatcatcatccaccagctgtgccaggagaagccccgggtgaagaaacgcaagggcaagttcaggaagagccggctgaagctcaaggatggcaaccgcatcagcctcccttctgatttccagcacaagttcacggtgcaggcctcccctaccatggataaaaggaagagtcttatcaacagccgctccagtcctcctgcaagccccaccatcattcctcgccttcgagccatccagttgacaccaggtgaaagcagcaaaacctggggcaggagctcagtcgtcccaaaggaggaaggggaggaggaggagaagagggccccaaagaagaagggacggacgtgggggccagggacgcttggtcagaaggagcttgcctcgggagatgaaggcctcaagtccctggtagatggatataagcagtggtcgtccagtgcccccaacctggtgaagggcccaaggagtagcccggccctgccagggttcaccagccttatggagatggaggatgaggacagtgaaggcccagggagtggagagagtcgcctacagcattcacccagccagtcctacctctgtatcccattccctcgtggagaggatggcgatggcccctccagtgatggaatccatgaggagcccaccccagtcaactcggccacgagtacccctcagctgacgccaaccaacagcctcaagcggggcggtgcccaccaccgccgctgcgaggtggctctgctcggctgtggggctgttctggcagccacaggcctagggtttgacttgctggaagctggcaagtgccagctgcttcccctggaggagcctgagccaccagcccgggaggagaagaaaagacgggagggtctttttcagaggtccagccgtcctcgtcggagcaccagccccccatcccgaaagcttttcaagaaggaggagcccatgctgttgctaggagacccctctgcctccctgacgctgctctccctctcctccatctccgagtgcaactccacacgctccctgctgcgctccgacagcgatgaaattgtcgtgtatgagatgccagtcagcccagtcgaggcccctcccctgagtccatgtacccacaaccccctggtcaatgtccgagtagagcgcttcaaacgagatcctaaccaatctctgactcccacccatgtcaccctcaccaccccctcgcagcccagcagtcaccggcggactccttctgatggggcccttaagccagagactctcctagccagcaggagcccctccagcaatgggttgagccccagtcctggagcaggaatgttgaaaacccccagtcccagccgagacccaggtgaattcccccgtctccctgaccccaatgtggtcttccccccaaccccaaggcgctggaacactcagcaggactctaccttggagagacccaagactctggagtttctgcctcggccgcgtccttctgccaaccggcaacggctggacccttggtggtttgtgtcccccagccatgcccgcagcacctccccagccaacagctccagcacagagacgcccagcaacctggactcctgctttgctagcagtagcagcactgtagaggagcggcctggacttccagccctgctcccgttccaggcagggccgctgcccccgactgagcggacgctcctggacctggatgcagaggggcagagtcaggacagcaccgtgccgctgtgcagagcggaactgaacacacacaggcctgccccttatgagatccagcaggagttctggtcttagcacgaaaaggattggggcgggcaagggggacagccagcggagatgaggggagctggcgggcacagccctttctcagggttggaccccctgagatccagccctacttcttgcactgataatgcactttgaagatggaagggatggaaacagggccacttcagagggtctcctgccctgcagggcctttctacccgtgtccactggaggggctgtggccatcagctctggctgtgtaggggaggaaggggtgcatgcatgtcccccaccctccacagtcttccttgcctttagagtgaccctgcagagtcactcagccaaatctgtctgctgctccctctcctcagccagttgggtgtgcgcagagctgtcatagggtccctttgtcagccccgagttcagcttcccaaacaccagtgttggatattctgtgattgattttggtcc

SEQ ID NO: 155042 - DNA, 3544 bp, Homo sapiens
  Payload ID: 10480
  Gene Symbol: MAP3K9
  Gene Name: mitogen-activated protein kinase kinase kinase 9
  ENST ID: ENST00000553414
  CDS Start-End: 317-2830
gggaggaattttgagcaggaaatgagggagcttctttctataaggacagtggatggaattaaaaaggggtatttgaggaagcgttgctgtggatcatatgaaacctttggatgctcaagaaaaataagagtcagactaatttgaatttactttaggatgccgtcttccttcccaccttaccgttgtttggacacagtactgtcctgggcttctaacattattgatcctccagaaggtggagaatggagacctgagcaacaagattctgaagatcactgattttggcctggctcgggaatggcaccgaaccaccaagatgagtgcggcagggacgtatgcttggatggcacccgaagtcatccgggcctccatgttttccaaaggcagtgatgtgtggagctatggggtgctactttgggagttgctgactggtgaggtgccctttcgaggcattgatggcttagcagtcgcttatggagtggccatgaacaaactcgcccttcctattccttctacgtgcccagaaccttttgccaaactcatggaagactgctggaatcctgatccccactcacgaccatctttcacgaatatcctggaccagctaaccaccatagaggagtctggtttctttgaaatgcccaaggactccttccactgcctgcaggacaactggaaacacgagattcaggagatgtttgaccaactcagggccaaagaaaaggaacttcgcacctgggaggaggagctgacgcgggctgcactgcagcagaagaaccaggaggaactgctgcggcgtcgggagcaggagctggccgagcgggagattgacatcctggaacgggagctcaacatcatcatccaccagctgtgccaggagaagccccgggtgaagaaacgcaagggcaagttcaggaagagccggctgaagctcaaggatggcaaccgcatcagcctcccttctgatttccagcacaagttcacggtgcaggcctcccctaccatggataaaaggaagagtcttatcaacagccgctccagtcctcctgcaagccccaccatcattcctcgccttcgagccatccagtgtgagactgtttcccaaattagctggggccagaacacacaggggcacctgtcccctgctctgtccagccaccgactggtccaggcttgctccatccataacttctgccacctctcctcgacaatgtgtatatacatgcacatattgacaccaggtgaaagcagcaaaacctggggcaggagctcagtcgtcccaaaggaggaaggggaggaggaggagaagagggccccaaagaagaagggacggacgtgggggccagggacgcttggtcagaaggagcttgcctcgggagatgaaggcctcaagtccctggtagatggatataagcagtggtcgtccagtgcccccaacctggtgaagggcccaaggagtagcccggccctgccagggttcaccagccttatggagatggccttgctggcagccagttgggtggtgcccatcgacattgaagaggatgaggacagtgaaggcccagggagtggagagagtcgcctacagcattcacccagccagtcctacctctgtatcccattccctcgtggagaggatggcgatggcccctccagtgatggaatccatgaggagcccaccccagtcaactcggccacgagtacccctcagctgacgccaaccaacagcctcaagcggggcggtgcccaccaccgccgctgcgaggtggctctgctcggctgtggggctgttctggcagccacaggcctagggtttgacttgctggaagctggcaagtgccagctgcttcccctggaggagcctgagccaccagcccgggaggagaagaaaagacgggagggtctttttcagaggtccagccgtcctcgtcggagcaccagccccccatcccgaaagcttttcaagaaggaggagcccatgctgttgctaggagacccctctgcctccctgacgctgctctccctctcctccatctccgagtgcaactccacacgctccctgctgcgctccgacagcgatgaaattgtcgtgtatgagatgccagtcagcccagtcgaggcccctcccctgagtccatgtacccacaaccccctggtcaatgtccgagtagagcgcttcaaacgagatcctaaccaatctctgactcccacccatgtcaccctcaccaccccctcgcagcccagcagtcaccggcggactccttctgatggggcccttaagccagagactctcctagccagcaggagcccctccagcaatgggttgagccccagtcctggagcaggaatgttgaaaacccccagtcccagccgagacccaggtgaattcccccgtctccctgaccccaatgtggtcttccccccaaccccaaggcgctggaacactcagcaggactctaccttggagagacccaagactctggagtttctgcctcggccgcgtccttctgccaaccggcaacggctggacccttggtggtttgtgtcccccagccatgcccgcagcacctccccagccaacagctccagcacagagacgcccagcaacctggactcctgctttgctagcagtagcagcactgtagaggagcggcctggacttccagccctgctcccgttccaggcagggccgctgcccccgactgagcggacgctcctggacctggatgcagaggggcagagtcaggacagcaccgtgccgctgtgcagagcggaactgaacacacacaggcctgccccttatgagatccagcaggagttctggtcttagcacgaaaaggattggggcgggcaagggggacagccagcggagatgaggggagctggcgggcacagccctttctcagggttggaccccctgagatccagccctacttcttgcactgataatgcactttgaagatggaagggatggaaacagggccacttcagagggtctcctgccctgcagggcctttctacccgtgtccactggaggggctgtggccatcagctctggctgtgtaggggaggaaggggtgcatgcatgtcccccaccctccacagtcttccttgcctttagagtgaccctgcagagtcactcagccaaatctgtctgctgctccctctcctcagccagttgggtgtgcgcagagctgtcatagggtccctttgtcagccccgagttcagcttcccaaacaccagtgttggatattctgtgattgattttggtcctcctccgctgtcccccaacacccaggaatgggaatctggcttggttcgagataggagcttttctgtgtcctaagccctttcatgctagcaggaagactgaaagcaaggtggcccagtgtggggtcatagggcttgatagacctggcactgcctatctgcacttccaggtgccccacctatttatctgagcccacaggtggaaaggggaactgcctcagtgagaacggggggacggggatgttaggaaaaatacagtaaagttgcaatgaa

SEQ ID NO: 155043 - DNA, 4449 bp, Homo sapiens
  Payload ID: 10480
  Gene Symbol: MAP3K9
  Gene Name: mitogen-activated protein kinase kinase kinase 9
  Uniprot ID: P80192
  ENST ID: ENST00000555993
  CDS Start-End: 364-3720
gggggcggggcacggcacggcgcggagaggagagcggcggccggctggcagcggcgggcaccggctgcgcgagcaggtaccggcggcagaggtgacgaggccgcccccgggggggcgagcgggcaggcggggactcggcccgctgcgcccctaggctgcgcgaagagctcgcgctcggcgctcttctcgtaccgcggtaacagcgccggcgagccggctctcccagccctgccagcccgggccctacctgcggccgccgtcgttgggggggggtcctcccagctctgcggaggcgcatgaacaataggcggcggcggctcctgcgggcggcggcggccccgcaccctatggatcggccgctccatggagccctccagagcgcttctcggctgcctagcgagcgccgccgctgccgccccgccgggggaggatggagcaggggccggggccgaggaggaggaggaggaggaggaggaggcggcggcggcggtgggccccggggagctgggctgcgacgcgccgctgccctactggacggccgtgttcgagtacgaggcggcgggcgaggacgagctgaccctgcggctgggcgacgtggtggaggtgctgtccaaggactcgcaggtgtccggcgacgagggctggtggaccgggcagctgaaccagcgggtgggcatcttccccagcaactacgtgaccccgcgcagcgccttctccagccgctgccagcccggcggcgaggaccccagttgctacccgcccattcagttgttagaaattgattttgcggagctcaccttggaagagattattggcatcgggggctttgggaaggtctatcgtgctttctggataggggatgaggttgctgtgaaagcagctcgccacgaccctgatgaggacatcagccagaccatagagaatgttcgccaagaggccaagctcttcgccatgctgaagcaccccaacatcattgccctaagaggggtatgtctgaaggagcccaacctctgcttggtcatggagtttgctcgtggaggacctttgaatagagtgttatctgggaaaaggattcccccagacatcctggtgaattgggctgtgcagattgccagagggatgaactacttacatgatgaggcaattgttcccatcatccaccgcgaccttaagtccagcaacatattgatcctccagaaggtggagaatggagacctgagcaacaagattctgaagatcactgattttggcctggctcgggaatggcaccgaaccaccaagatgagtgcggcagggacgtatgcttggatggcacccgaagtcatccgggcctccatgttttccaaaggcagtgatgtgtggagctatggggtgctactttgggagttgctgactggtgaggtgccctttcgaggcattgatggcttagcagtcgcttatggagtggccatgaacaaactcgcccttcctattccttctacgtgcccagaaccttttgccaaactcatggaagactgctggaatcctgatccccactcacgaccatctttcacgaatatcctggaccagctaaccaccatagaggagtctggtttctttgaaatgcccaaggactccttccactgcctgcaggacaactggaaacacgagattcaggagatgtttgaccaactcagggccaaagaaaaggaacttcgcacctgggaggaggagctgacgcgggctgcactgcagcagaagaaccaggaggaactgctgcggcgtcgggagcaggagctggccgagcgggagattgacatcctggaacgggagctcaacatcatcatccaccagctgtgccaggagaagccccgggtgaagaaacgcaagggcaagttcaggaagagccggctgaagctcaaggatggcaaccgcatcagcctcccttctgatttccagcacaagttcacggtgcaggcctcccctaccatggataaaaggaagagtcttatcaacagccgctccagtcctcctgcaagccccaccatcattcctcgccttcgagccatccagttgacaccaggtgaaagcagcaaaacctggggcaggagctcagtcgtcccaaaggaggaaggggaggaggaggagaagagggccccaaagaagaagggacggacgtgggggccagggacgcttggtcagaaggagcttgcctcgggagatgaaggatcccctcagagacgtgagaaagctaatggtttaagtaccccatcagaatctccacatttccacttgggcctcaagtccctggtagatggatataagcagtggtcgtccagtgcccccaacctggtgaagggcccaaggagtagcccggccctgccagggttcaccagccttatggagatggccttgctggcagccagttgggtggtgcccatcgacattgaagaggatgaggacagtgaaggcccagggagtggagagagtcgcctacagcattcacccagccagtcctacctctgtatcccattccctcgtggagaggatggcgatggcccctccagtgatggaatccatgaggagcccaccccagtcaactcggccacgagtacccctcagctgacgccaaccaacagcctcaagcggggcggtgcccaccaccgccgctgcgaggtggctctgctcggctgtggggctgttctggcagccacaggcctagggtttgacttgctggaagctggcaagtgccagctgcttcccctggaggagcctgagccaccagcccgggaggagaagaaaagacgggagggtctttttcagaggtccagccgtcctcgtcggagcaccagccccccatcccgaaagcttttcaagaaggaggagcccatgctgttgctaggagacccctctgcctccctgacgctgctctccctctcctccatctccgagtgcaactccacacgctccctgctgcgctccgacagcgatgaaattgtcgtgtatgagatgccagtcagcccagtcgaggcccctcccctgagtccatgtacccacaaccccctggtcaatgtccgagtagagcgcttcaaacgagatcctaaccaatctctgactcccacccatgtcaccctcaccaccccctcgcagcccagcagtcaccggcggactccttctgatggggcccttaagccagagactctcctagccagcaggagcccctccagcaatgggttgagccccagtcctggagcaggaatgttgaaaacccccagtcccagccgagacccaggtgaattcccccgtctccctgaccccaatgtggtcttccccccaaccccaaggcgctggaacactcagcaggactctaccttggagagacccaagactctggagtttctgcctcggccgcgtccttctgccaaccggcaacggctggacccttggtggtttgtgtcccccagccatgcccgcagcacctccccagccaacagctccagcacagagacgcccagcaacctggactcctgctttgctagcagtagcagcactgtagaggagcggcctggacttccagccctgctcccgttccaggcagggccgctgcccccgactgagcggacgctcctggacctggatgcagaggggcagagtcaggacagcaccgtgccgctgtgcagagcggaactgaacacacacaggcctgccccttatgagatccagcaggagttctggtcttagcacgaaaaggattggggcgggcaagggggacagccagcggagatgaggggagctggcgggcacagccctttctcagggttggaccccctgagatccagccctacttcttgcactgataatgcactttgaagatggaagggatggaaacagggccacttcagagggtctcctgccctgcagggcctttctacccgtgtccactggaggggctgtggccatcagctctggctgtgtaggggaggaaggggtgcatgcatgtcccccaccctccacagtcttccttgcctttagagtgaccctgcagagtcactcagccaaatctgtctgctgctccctctcctcagccagttgggtgtgcgcagagctgtcatagggtccctttgtcagccccgagttcagcttcccaaacaccagtgttggatattctgtgattgattttggtcctcctccgctgtcccccaacacccaggaatgggaatctggcttggttcgagataggagcttttctgtgtcctaagccctttcatgctagcaggaagactgaaagcaaggtggcccagtgtggggtcatagggcttgatagacctggcactgcctatctgcacttccaggtgccccacctatttatctgagcccacaggtggaaaggggaactgcctcagtgagaacggggggacggggatgttaggaaaaatacagtaaagttgcaatgaagaggttcatgaagta

SEQ ID NO: 155044 - DNA, 11169 bp, Homo sapiens
  Payload ID: 10480
  Gene Symbol: MAP3K9
  Gene Name: mitogen-activated protein kinase kinase kinase 9
  Uniprot ID: P80192
  ENST ID: ENST00000554752
  CDS Start-End: 1-3315
atggagccctccagagcgcttctcggctgcctagcgagcgccgccgctgccgccccgccgggggaggatggagcaggggccggggccgaggaggaggaggaggaggaggaggaggcggcggcggcggtgggccccggggagctgggctgcgacgcgccgctgccctactggacggccgtgttcgagtacgaggcggcgggcgaggacgagctgaccctgcggctgggcgacgtggtggaggtgctgtccaaggactcgcaggtgtccggcgacgagggctggtggaccgggcagctgaaccagcgggtgggcatcttccccagcaactacgtgaccccgcgcagcgccttctccagccgctgccagcccggcggcgaggaccccagttgctacccgcccattcagttgttagaaattgattttgcggagctcaccttggaagagattattggcatcgggggctttgggaaggtctatcgtgctttctggataggggatgaggttgctgtgaaagcagctcgccacgaccctgatgaggacatcagccagaccatagagaatgttcgccaagaggccaagctcttcgccatgctgaagcaccccaacatcattgccctaagaggggtatgtctgaaggagcccaacctctgcttggtcatggagtttgctcgtggaggacctttgaatagagtgttatctgggaaaaggattcccccagacatcctggtgaattgggctgtgcagattgccagagggatgaactacttacatgatgaggcaattgttcccatcatccaccgcgaccttaagtccagcaacatattgatcctccagaaggtggagaatggagacctgagcaacaagattctgaagatcactgattttggcctggctcgggaatggcaccgaaccaccaagatgagtgcggcagggacgtatgcttggatggcacccgaagtcatccgggcctccatgttttccaaaggcagtgatgtgtggagctatggggtgctactttgggagttgctgactggtgaggtgccctttcgaggcattgatggcttagcagtcgcttatggagtggccatgaacaaactcgcccttcctattccttctacgtgcccagaaccttttgccaaactcatggaagactgctggaatcctgatccccactcacgaccatctttcacgaatatcctggaccagctaaccaccatagaggagtctggtttctttgaaatgcccaaggactccttccactgcctgcaggacaactggaaacacgagattcaggagatgtttgaccaactcagggccaaagaaaaggaacttcgcacctgggaggaggagctgacgcgggctgcactgcagcagaagaaccaggaggaactgctgcggcgtcgggagcaggagctggccgagcgggagattgacatcctggaacgggagctcaacatcatcatccaccagctgtgccaggagaagccccgggtgaagaaacgcaagggcaagttcaggaagagccggctgaagctcaaggatggcaaccgcatcagcctcccttctgatttccagcacaagttcacggtgcaggcctcccctaccatggataaaaggaagagtcttatcaacagccgctccagtcctcctgcaagccccaccatcattcctcgccttcgagccatccagttgacaccaggtgaaagcagcaaaacctggggcaggagctcagtcgtcccaaaggaggaaggggaggaggaggagaagagggccccaaagaagaagggacggacgtgggggccagggacgcttggtcagaaggagcttgcctcgggagatgaaggatcccctcagagacgtgagaaagctaatggtttaagtaccccatcagaatctccacatttccacttgggcctcaagtccctggtagatggatataagcagtggtcgtccagtgcccccaacctggtgaagggcccaaggagtagcccggccctgccagggttcaccagccttatggagatggaggatgaggacagtgaaggcccagggagtggagagagtcgcctacagcattcacccagccagtcctacctctgtatcccattccctcgtggagaggatggcgatggcccctccagtgatggaatccatgaggagcccaccccagtcaactcggccacgagtacccctcagctgacgccaaccaacagcctcaagcggggcggtgcccaccaccgccgctgcgaggtggctctgctcggctgtggggctgttctggcagccacaggcctagggtttgacttgctggaagctggcaagtgccagctgcttcccctggaggagcctgagccaccagcccgggaggagaagaaaagacgggagggtctttttcagaggtccagccgtcctcgtcggagcaccagccccccatcccgaaagcttttcaagaaggaggagcccatgctgttgctaggagacccctctgcctccctgacgctgctctccctctcctccatctccgagtgcaactccacacgctccctgctgcgctccgacagcgatgaaattgtcgtgtatgagatgccagtcagcccagtcgaggcccctcccctgagtccatgtacccacaaccccctggtcaatgtccgagtagagcgcttcaaacgagatcctaaccaatctctgactcccacccatgtcaccctcaccaccccctcgcagcccagcagtcaccggcggactccttctgatggggcccttaagccagagactctcctagccagcaggagcccctccagcaatgggttgagccccagtcctggagcaggaatgttgaaaacccccagtcccagccgagacccaggtgaattcccccgtctccctgaccccaatgtggtcttccccccaaccccaaggcgctggaacactcagcaggactctaccttggagagacccaagactctggagtttctgcctcggccgcgtccttctgccaaccggcaacggctggacccttggtggtttgtgtcccccagccatgcccgcagcacctccccagccaacagctccagcacagagacgcccagcaacctggactcctgctttgctagcagtagcagcactgtagaggagcggcctggacttccagccctgctcccgttccaggcagggccgctgcccccgactgagcggacgctcctggacctggatgcagaggggcagagtcaggacagcaccgtgccgctgtgcagagcggaactgaacacacacaggcctgccccttatgagatccagcaggagttctggtcttagcacgaaaaggattggggcgggcaagggggacagccagcggagatgaggggagctggcgggcacagccctttctcagggttggaccccctgagatccagccctacttcttgcactgataatgcactttgaagatggaagggatggaaacagggccacttcagagggtctcctgccctgcagggcctttctacccgtgtccactggaggggctgtggccatcagctctggctgtgtaggggaggaaggggtgcatgcatgtcccccaccctccacagtcttccttgcctttagagtgaccctgcagagtcactcagccaaatctgtctgctgctccctctcctcagccagttgggtgtgcgcagagctgtcatagggtccctttgtcagccccgagttcagcttcccaaacaccagtgttggatattctgtgattgattttggtcctcctccgctgtcccccaacacccaggaatgggaatctggcttggttcgagataggagcttttctgtgtcctaagccctttcatgctagcaggaagactgaaagcaaggtggcccagtgtggggtcatagggcttgatagacctggcactgcctatctgcacttccaggtgccccacctatttatctgagcccacaggtggaaaggggaactgcctcagtgagaacggggggacggggatgttaggaaaaatacagtaaagttgcaatgaagaggttcatgaagtatgtccttgttctttttggaaactctcggcaaagggcaaaccagcaagtattgagggtacccatctagctacttggggtcaggacctcgtcagaccaggttcggatacaatcatctgctcatcccaggaatagtttcttgggggactcactcactggtgccagttctaagtcagagacaaaattccactgtctgttccttttgctgtctgaactttatgtgttactcccttcctttggtcttcactctaatccctggagtttgtgggcttttggttatgtttggttagtagatatcaccgcaatgccctagaacagctatgaagcagaataccatatggccacctggacattgggacttgggaattcactctcaactgggccatccatgttgtgatgcccttgaagtaaaatggagccagcaggagtaccttctgtaaatgcatgtggcaaagtgctatttatagggtgcccagggagccgctgatgtacaataaccttgaggtcccccatactgaaaactgaccaaggcctgtgcacaggtagcccctcatgctgggctctggaccatgagctgagtaggaaggatagcagaggccaaccctgaccttcctggaagttgtttccttaacttgaatgttgagcttcctctaaagctttctcgtgtatgtcttctccatgccactactctgaggcctcctgtgttatgtgtgaacagttgtctttatgtgggaatgacgacttgattgggagtagagtctcaaggtcattcccctcttccctcaagactctctgaatgctgctccactgtcttttgtcttggaggtcactcagcaggttccttgcatttgctgcctggatgtgcagctggcaacagtgatgaattggtcactgctctttctctataactgggatagatgtcctgccttggggtcactaaaggggtgaccttgttccttgctttatgagcccattagcactttggttcaaggggcccaccaagtcttggacgggaaggcgctactggttttattgcccaaggttttgttattgcttctcttctgtgtccttctctttgttcagtgaagccaatatgtaagatactgtttttgtccccattcccctactcctgagctaggaggaaaaaatgtgaatcttaccagcagttccagccaaccaagtgattcttcttcattcttgatggggagaagtacatacaaagtttgttctgacagggcgcggtggctcacgcctgtaatcccagcgctttgggaggcagaggcaggtggatcacctgaggtcgggagttcgagaccagcctgaccaacatggagatatcctgtctctactaaaaatacaaaaaaattagccaggcatggtggcacgtgcctgtaatcccagctactcgcaaggctgaggcaggagaatcgcttgaacctgggaggcggaggttgcagtgagccaagattgcgccattgcactccagcctgggcaacaagagagaaactctgtctcaaaaaaaaaaaaaaaaaaaaaaaaagtctgttctgtggcctccttcccccgggccctccataacctcaggctaaaccatgagcacatctgtatatccttggctccactaaatggccctcttgtggccctccaaaccatgctgcctatacacagtgctctgtggtatgaagcagagatttttcctttgctcatttttaacttttgccattgtggtaggttgcagccatctttctagatgtagtgtaactgatgtagtgtaactgaatgatggtcacctgccattgagtgagaggttgagtgccatccttacttgtccactgtggggaaagataaagcaagcctgggtctttgctaaggaaataattgtacctgaaagaagcaaaagcagggctatccaaaggtgctactgtgagcatccatgaagaaggaacagttaccatctctcagctcctacacacctggtctctgatgggcccctgactgctgcactctctcagtggggcaaggttggagatgggctaaggatctgtatagtagtagcaggtctcagtggctttctattcgctcaggttcccttgttctgtggtcctggtcgggagcaggccctggagctgtggatgaagccacttgagtggcagtagccggcccccctttcctctgccttccctttgcacaaagacacgttccttctgctcttggcaggtgctaacttcatggaagatggtaataggaacagatactgctctctgcccctgcttcttggattcttcagctcctaccgctgattcggattatccccttttgaccctcttggggatccagactgctgccaggaggctgagtagatacctcagttatctgtatgttatttctgagaggctttggcggatcctcttcacttggcatcctgtggcatccctagggtctggtggtagcagtaatagcaacaatgatatcttacatctggacaactcagaatagtgctaacttttcctcctgacctttgcaaaatgacatcattttccttgtacatttgatacccttgctagtagagaaggggaaatgcttaaagatgaaaattcaagtgaagagaaatgaaaaagtggcttggactaattgctgagtgaggccactgggctcagaactgaacaggttggctgcattccccattctgcttttgctgtgtggccataggcttgtctctttagcccctctcagatttccttcctttaaaagcaatcatcacatgctttcctctcaagggagttgggtgtatgtatcagagaaggtcagtgaaacaccatagctccttgccagctcctagaggaagcttctttcatctatacaggatgaatcgctgaagttgagagtgtggctctcatcacctttgccttgagggaacttgccttttctttcgtcctttggcttctggaagaggagtgatttggaggtggttgagcatgactaatgggggccctggtcgggcccatgcccttctgccgcatttatatagcatctggtgttgacaagcattctttcctaattcccccacttaacttgtctgatgctgtctgccaatgtcatcctcaccacttgtgtcttacagagaaggaaatgggagagggaggttgtgtcttacagagaaggaaatgagagagggaggttggtagcaacatcagagtgacagttggctgtctctcatttcttggggtcatcagtctgatttgtttagagcctgggatcatcccagttcctggaagaatctttggaaaagggtccccttgttcttgggacatgtgtcatggtcactaagccccctttccctcaggctactgttgctcagggacacaatgagataccccaaggacatctagacctgacttttcatgaactctcttgcctctgtggtccccacattggagacctccctccctcctccttcccttgtgtgaaggagacacctcccgagcaatcctaactcatccagctcacttttaacaaagcaaagagcagagggcactgaagactggatggctgtgaatggtacaccttggggttgaaaccgtgttggcaggaacctggtgataaaagctgcctacttcctgggtgtgtgaatttgcacatatcttttcccctcactggacttcagaagcctactgtgaactggggacgatgctatctactttccctcctgaagcccttctaactttcaaatgtatggtcctggggccatgagtcctgcacagaaactgcagccttgccagattgcttcccttggtgcagaaaagtgtgtgtgtgtgtgtgtgtgaaatatacgtacggttttacgtcaaaaacagtcgaatatcagctatttcatatggttcaccctaatgtacctgcctctctctttggctttaggtctgagaatgacttgtctttgtcaaggtatactattgttagaaacgcattaccaaatgcatctcttctgtcggatcagcgtattcctagattaggaattcaaattaatgaaaattcacatatgaaaggaaaatccattgctatttctggagaggacctcagtcctgggcttttccctggcattgctacctgggtgggtgctcaccactcaggtgctggtgttggaaggcaggaggaggaagctgaaatcctgccgattaaggctaattaacagggtttaggtgcctaattatcatgactcagcccgggacttatggttagccgtgcaggccaggtgagtctcttatggacttcctctcagactgctctttctcattttgtcctgatgagatattgacagtcatgtccacccgcttcctcatccatttcccgtcttgggccctggaagtacgggggcctctgtaggctgcctagggagccctggctttgctcttcgtgttgggctcactccatgatcaggagccggtgggactggtccttcctgattcttactgtctgtggttccccatcccctacggggagcctgctttgggccttgagctggatagagagaagagctttggggcccagctggttataggagctgagcttttccacacctctctttgttaacccttggaaacagacctgcctttcacctgacccatcttcctacctgtctggtctgacctgccctctttgaaagcactcatcacctagttttactaggctgattggcagatgtggacatgacaggtgtctatcgagataggtgtctaactagttaggtgtctcaggattggacagcagaataccattccaggggtgcacagacaggcctctcctaccggaacatgagggatagacgtctgggcattctgaacccagaggtcagagtagtcacaagcggagccctggggagcgagggccccagggccgtggtgttccttgccctgcgctcactgaagtccaaggccaggtttcagaaatagtgtgctgcctgttcctgagatccttcacacctggacaccaacccagacaaagcctgacttaaaattttgatactgtattcatcgtggaatttttcaataactctgatttttaaaaaatactgcattgcaatatgatttaccttgattactgaggctcttttttttttggcacccctttaaattttaacccaaggtgagggcctcactccactctatacccagccctgcctgcccctcacctggacctgtgagaggggcttaggtaccactgtgaaatacgttttaaatttttacttgcccttcccctcaggtcctgagtgaggcagtggctctctggcggtgctcgcatttaaataggagtgtgtaggcttacagcaatgaaacatctaggagcttttaactttggatctatacctgggtgtgacatttccttggtgttctctggctgcctttctggctctgcagccctgagggcacttgtgtgtgtgtgtgttctctggagaagggaagtgattatggcagagaggctcctttagattctcctcttaaacctctttggaacatgtttgaattccagaagtgaatgaacttcattcattctctcgtccagatttcagaagggactaaagtgaacggaggctttttcactccctggcatgctaagagccacattccctagctctgtgcctgcacagtgagtcttcagaatttggcccatcacaccctctgctagtatcgtttccaccaccctcctcatcctctgtcatctttatttcattctcatcgtttatctctacctccagttcagatgccatgctggctgtggctcttttcttcatcaccatcagagtgaggcaaagatgtatcctggcctagttataaagacgaataatacatgataagaaatcattaatttttttccacgtggggggcggtgctgtcctagtgattcatatatatataatttttgactccttacaataattctgggatgtgggtattacccccatttaagaatgtggaaaccaaggctctgatggctctgtaatttgcccagggtcacacagctaggaagcaagttgctgatctgcttggttccaaagtcacctctctttttcctctgagcacatttctaagccactacttagaagctcttgagataaagttggcctagctcaggtccaccgaggttttgagattgccctttgcccaaggaggagttgtgtccttggctcacctgtcatctgcctgtgactggacttgaaccctcgcacgtctcagctgacatccttgatgctgctggctgccttcctcgccctgtttcctctccatgactccaggggtttgaagcacacaggagctggacatgtcaattctgtagctcttctcccaataccactgaaggccgtgagcctctctcctgtttccagcctgcaggtgccctgttgctgctcttcattccagcttctcctcacttttctctcagtctcttgagcttggaagccttattgtagcttgtgtctcctccctgggcacttgaggtcaggcttttgcctttttgtcacattgagccacatgcctttgatacacagttgtagcaaagaagggaggtgatgaacttgctcactttcttttctgatttccctccctactcatcctgcactccccaccgaaacccagatatcttatagtctaaggcttgtagaggattaaggaaaggaattggagatgggttttacttagttcacagaaaagctttctttgggatttttcctcccccttagggcttttaagtctaggtgaagtgaaagttcacacatgtgtttgtttggttgctctgtaattagctactagtttttatccctagaccttctctgctccagtgtcttgttcatgtgtcctgaccccgtgtccttgaattcccactttgctttgggatttaagttattgtatgttgtcaacaatatttaaagatgaaaaagtcctgaaggaaacttaccaggttctttcctttggcttttttttttttttctttcgaggtactgtaaattgttaactagggatgccaagcaggcttggttcaatggctaaacctcttattgtattacagtgtaatgctgatctcagcctggtctcaatgccagagcacacagagacttgaataaaactgttataacgatta

SEQ ID NO: 155045 - DNA, 2982 bp, Homo sapiens
  Payload ID: 10480
  Gene Symbol: MAP3K9
  Gene Name: mitogen-activated protein kinase kinase kinase 9
  ENST ID: ENST00000554146
  CDS Start-End: 239-2737
cttttgggaggaattttgagcaggaaatgagggagcttctttctataaggacagtggatggaattaaaaaggggtatttgaggaagcgttgctgtggatcatatgaaacctttggatgctcaagaaaaataagagtcagactaatttgaatttactttaggatgccgtcttccttcccaccttaccgttgtttggacacagtactgtcctgggcttctaacataacactcaccatgaaatggagcttacaggactggaagttgccctggtattgatcctccagaaggtggagaatggagacctgagcaacaagattctgaagatcactgattttggcctggctcgggaatggcaccgaaccaccaagatgagtgcggcagggacgtatgcttggatggcacccgaagtcatccgggcctccatgttttccaaaggcagtgatgtgtggagctatggggtgctactttgggagttgctgactggtgaggtgccctttcgaggcattgatggcttagcagtcgcttatggagtggccatgaacaaactcgcccttcctattccttctacgtgcccagaaccttttgccaaactcatggaagactgctggaatcctgatccccactcacgaccatctttcacgaatatcctggaccagctaaccaccatagaggagtctggtttctttgaaatgcccaaggactccttccactgcctgcaggacaactggaaacacgagattcaggagatgtttgaccaactcagggccaaagaaaaggaacttcgcacctgggaggaggagctgacgcgggctgcactgcagcagaagaaccaggaggaactgctgcggcgtcgggagcaggagctggccgagcgggagattgacatcctggaacgggagctcaacatcatcatccaccagctgtgccaggagaagccccgggtgaagaaacgcaagggcaagttcaggaagagccggctgaagctcaaggatggcaaccgcatcagcctcccttctgatttccagcacaagttcacggtgcaggcctcccctaccatggataaaaggaagagtcttatcaacagccgctccagtcctcctgcaagccccaccatcattcctcgccttcgagccatccagttgacaccaggtgaaagcagcaaaacctggggcaggagctcagtcgtcccaaaggaggaaggggaggaggaggagaagagggccccaaagaagaagggacggacgtgggggccagggacgcttggtcagaaggagcttgcctcgggagatgaaggcctcaagtccctggtagatggatataagcagtggtcgtccagtgcccccaacctggtgaagggcccaaggagtagcccggccctgccagggttcaccagccttatggagatggccttgctggcagccagttgggtggtgcccatcgacattgaagaggatgaggacagtgaaggcccagggagtggagagagtcgcctacagcattcacccagccagtcctacctctgtatcccattccctcgtggagaggatggcgatggcccctccagtgatggaatccatgaggagcccaccccagtcaactcggccacgagtacccctcagctgacgccaaccaacagcctcaagcggggcggtgcccaccaccgccgctgcgaggtggctctgctcggctgtggggctgttctggcagccacaggcctagggtttgacttgctggaagctggcaagtgccagctgcttcccctggaggagcctgagccaccagcccgggaggagaagaaaagacgggagggtctttttcagaggtccagccgtcctcgtcggagcaccagccccccatcccgaaagcttttcaagaaggaggagcccatgctgttgctaggagacccctctgcctccctgacgctgctctccctctcctccatctccgagtgcaactccacacgctccctgctgcgctccgacagcgatgaaattgtcgtgtatgagatgccagtcagcccagtcgaggcccctcccctgagtccatgtacccacaaccccctggtcaatgtccgagtagagcgcttcaaacgagatcctaaccaatctctgactcccacccatgtcaccctcaccaccccctcgcagcccagcagtcaccggcggactccttctgatggggcccttaagccagagactctcctagccagcaggagcccctccagcaatgggttgagccccagtcctggagcaggaatgttgaaaacccccagtcccagccgagacccaggtgaattcccccgtctccctgaccccaatgtggtcttccccccaaccccaaggcgctggaacactcagcaggactctaccttggagagacccaagactctggagtttctgcctcggccgcgtccttctgccaaccggcaacggctggacccttggtggtttgtgtcccccagccatgcccgcagcacctccccagccaacagctccagcacagagacgcccagcaacctggactcctgctttgctagcagtagcagcactgtagaggagcggcctggacttccagccctgctcccgttccaggcagggccgctgcccccgactgagcggacgctcctggacctggatgcagaggggcagagtcaggacagcaccgtgccgctgtgcagagcggaactgaacacacacaggcctgccccttatgagatccagcaggagttctggtcttagcacgaaaaggattggggcgggcaagggggacagccagcggagatgaggggagctggcgggcacagccctttctcagggttggaccccctgagatccagccctacttcttgcactgataatgcactttgaagatggaagggatggaaacagggccacttcagagggtctcctgccctgcagggcctttctacccgtgtccactggaggggctgtggccatcagctctggctgtgtaggggaggaag

SEQ ID NO: 155046 - DNA, 10497 bp, Homo sapiens
  Payload ID: 10480
  Gene Symbol: MAP3K9
  Gene Name: mitogen-activated protein kinase kinase kinase 9
  ENST ID: ENST00000611979
  CDS Start-End: 1-2643
atggagcttacaggactggaagttgccctggtattgatcctccagaaggtggagaatggagacctgagcaacaagattctgaagatcactgattttggcctggctcgggaatggcaccgaaccaccaagatgagtgcggcagggacgtatgcttggatggcacccgaagtcatccgggcctccatgttttccaaaggcagtgatgtgtggagctatggggtgctactttgggagttgctgactggtgaggtgccctttcgaggcattgatggcttagcagtcgcttatggagtggccatgaacaaactcgcccttcctattccttctacgtgcccagaaccttttgccaaactcatggaagactgctggaatcctgatccccactcacgaccatctttcacgaatatcctggaccagctaaccaccatagaggagtctggtttctttgaaatgcccaaggactccttccactgcctgcaggacaactggaaacacgagattcaggagatgtttgaccaactcagggccaaagaaaaggaacttcgcacctgggaggaggagctgacgcgggctgcactgcagcagaagaaccaggaggaactgctgcggcgtcgggagcaggagctggccgagcgggagattgacatcctggaacgggagctcaacatcatcatccaccagctgtgccaggagaagccccgggtgaagaaacgcaagggcaagttcaggaagagccggctgaagctcaaggatggcaaccgcatcagcctcccttctgatttccagcacaagttcacggtgcaggcctcccctaccatggataaaaggaagagtcttatcaacagccgctccagtcctcctgcaagccccaccatcattcctcgccttcgagccatccagtgtgagactgtttcccaaattagctggggccagaacacacaggggcacctgtcccctgctctgtccagccaccgactggtccaggcttgctccatccataacttctgccacctctcctcgacaatgtgtatatacatgcacatattgacaccaggtgaaagcagcaaaacctggggcaggagctcagtcgtcccaaaggaggaaggggaggaggaggagaagagggccccaaagaagaagggacggacgtgggggccagggacgcttggtcagaaggagcttgcctcgggagatgaaggcctcaagtccctggtagatggatataagcagtggtcgtccagtgcccccaacctggtgaagggcccaaggagtagcccggccctgccagggttcaccagccttatggagatggccttgctggcagccagttgggtggtgcccatcgacattgaagaggatgaggacagtgaaggcccagggagtggagagagtcgcctacagcattcacccagccagtcctacctctgtatcccattccctcgtggagaggatggcgatggcccctccagtgatggaatccatgaggagcccaccccagtcaactcggccacgagtacccctcagctgacgccaaccaacagcctcaagcggggcggtgcccaccaccgccgctgcgaggtggctctgctcggctgtggggctgttctggcagccacaggcctagggtttgacttgctggaagctggcaagtgccagctgcttcccctggaggagcctgagccaccagcccgggaggagaagaaaagacgggagggtctttttcagaggtccagccgtcctcgtcggagcaccagccccccatcccgaaagcttttcaagaaggaggagcccatgctgttgctaggagacccctctgcctccctgacgctgctctccctctcctccatctccgagtgcaactccacacgctccctgctgcgctccgacagcgatgaaattgtcgtgtatgagatgccagtcagcccagtcgaggcccctcccctgagtccatgtacccacaaccccctggtcaatgtccgagtagagcgcttcaaacgagatcctaaccaatctctgactcccacccatgtcaccctcaccaccccctcgcagcccagcagtcaccggcggactccttctgatggggcccttaagccagagactctcctagccagcaggagcccctccagcaatgggttgagccccagtcctggagcaggaatgttgaaaacccccagtcccagccgagacccaggtgaattcccccgtctccctgaccccaatgtggtcttccccccaaccccaaggcgctggaacactcagcaggactctaccttggagagacccaagactctggagtttctgcctcggccgcgtccttctgccaaccggcaacggctggacccttggtggtttgtgtcccccagccatgcccgcagcacctccccagccaacagctccagcacagagacgcccagcaacctggactcctgctttgctagcagtagcagcactgtagaggagcggcctggacttccagccctgctcccgttccaggcagggccgctgcccccgactgagcggacgctcctggacctggatgcagaggggcagagtcaggacagcaccgtgccgctgtgcagagcggaactgaacacacacaggcctgccccttatgagatccagcaggagttctggtcttagcacgaaaaggattggggcgggcaagggggacagccagcggagatgaggggagctggcgggcacagccctttctcagggttggaccccctgagatccagccctacttcttgcactgataatgcactttgaagatggaagggatggaaacagggccacttcagagggtctcctgccctgcagggcctttctacccgtgtccactggaggggctgtggccatcagctctggctgtgtaggggaggaaggggtgcatgcatgtcccccaccctccacagtcttccttgcctttagagtgaccctgcagagtcactcagccaaatctgtctgctgctccctctcctcagccagttgggtgtgcgcagagctgtcatagggtccctttgtcagccccgagttcagcttcccaaacaccagtgttggatattctgtgattgattttggtcctcctccgctgtcccccaacacccaggaatgggaatctggcttggttcgagataggagcttttctgtgtcctaagccctttcatgctagcaggaagactgaaagcaaggtggcccagtgtggggtcatagggcttgatagacctggcactgcctatctgcacttccaggtgccccacctatttatctgagcccacaggtggaaaggggaactgcctcagtgagaacggggggacggggatgttaggaaaaatacagtaaagttgcaatgaagaggttcatgaagtatgtccttgttctttttggaaactctcggcaaagggcaaaccagcaagtattgagggtacccatctagctacttggggtcaggacctcgtcagaccaggttcggatacaatcatctgctcatcccaggaatagtttcttgggggactcactcactggtgccagttctaagtcagagacaaaattccactgtctgttccttttgctgtctgaactttatgtgttactcccttcctttggtcttcactctaatccctggagtttgtgggcttttggttatgtttggttagtagatatcaccgcaatgccctagaacagctatgaagcagaataccatatggccacctggacattgggacttgggaattcactctcaactgggccatccatgttgtgatgcccttgaagtaaaatggagccagcaggagtaccttctgtaaatgcatgtggcaaagtgctatttatagggtgcccagggagccgctgatgtacaataaccttgaggtcccccatactgaaaactgaccaaggcctgtgcacaggtagcccctcatgctgggctctggaccatgagctgagtaggaaggatagcagaggccaaccctgaccttcctggaagttgtttccttaacttgaatgttgagcttcctctaaagctttctcgtgtatgtcttctccatgccactactctgaggcctcctgtgttatgtgtgaacagttgtctttatgtgggaatgacgacttgattgggagtagagtctcaaggtcattcccctcttccctcaagactctctgaatgctgctccactgtcttttgtcttggaggtcactcagcaggttccttgcatttgctgcctggatgtgcagctggcaacagtgatgaattggtcactgctctttctctataactgggatagatgtcctgccttggggtcactaaaggggtgaccttgttccttgctttatgagcccattagcactttggttcaaggggcccaccaagtcttggacgggaaggcgctactggttttattgcccaaggttttgttattgcttctcttctgtgtccttctctttgttcagtgaagccaatatgtaagatactgtttttgtccccattcccctactcctgagctaggaggaaaaaatgtgaatcttaccagcagttccagccaaccaagtgattcttcttcattcttgatggggagaagtacatacaaagtttgttctgacagggcgcggtggctcacgcctgtaatcccagcgctttgggaggcagaggcaggtggatcacctgaggtcgggagttcgagaccagcctgaccaacatggagatatcctgtctctactaaaaatacaaaaaaattagccaggcatggtggcacgtgcctgtaatcccagctactcgcaaggctgaggcaggagaatcgcttgaacctgggaggcggaggttgcagtgagccaagattgcgccattgcactccagcctgggcaacaagagagaaactctgtctcaaaaaaaaaaaaaaaaaaaaaaaaagtctgttctgtggcctccttcccccgggccctccataacctcaggctaaaccatgagcacatctgtatatccttggctccactaaatggccctcttgtggccctccaaaccatgctgcctatacacagtgctctgtggtatgaagcagagatttttcctttgctcatttttaacttttgccattgtggtaggttgcagccatctttctagatgtagtgtaactgatgtagtgtaactgaatgatggtcacctgccattgagtgagaggttgagtgccatccttacttgtccactgtggggaaagataaagcaagcctgggtctttgctaaggaaataattgtacctgaaagaagcaaaagcagggctatccaaaggtgctactgtgagcatccatgaagaaggaacagttaccatctctcagctcctacacacctggtctctgatgggcccctgactgctgcactctctcagtggggcaaggttggagatgggctaaggatctgtatagtagtagcaggtctcagtggctttctattcgctcaggttcccttgttctgtggtcctggtcgggagcaggccctggagctgtggatgaagccacttgagtggcagtagccggcccccctttcctctgccttccctttgcacaaagacacgttccttctgctcttggcaggtgctaacttcatggaagatggtaataggaacagatactgctctctgcccctgcttcttggattcttcagctcctaccgctgattcggattatccccttttgaccctcttggggatccagactgctgccaggaggctgagtagatacctcagttatctgtatgttatttctgagaggctttggcggatcctcttcacttggcatcctgtggcatccctagggtctggtggtagcagtaatagcaacaatgatatcttacatctggacaactcagaatagtgctaacttttcctcctgacctttgcaaaatgacatcattttccttgtacatttgatacccttgctagtagagaaggggaaatgcttaaagatgaaaattcaagtgaagagaaatgaaaaagtggcttggactaattgctgagtgaggccactgggctcagaactgaacaggttggctgcattccccattctgcttttgctgtgtggccataggcttgtctctttagcccctctcagatttccttcctttaaaagcaatcatcacatgctttcctctcaagggagttgggtgtatgtatcagagaaggtcagtgaaacaccatagctccttgccagctcctagaggaagcttctttcatctatacaggatgaatcgctgaagttgagagtgtggctctcatcacctttgccttgagggaacttgccttttctttcgtcctttggcttctggaagaggagtgatttggaggtggttgagcatgactaatgggggccctggtcgggcccatgcccttctgccgcatttatatagcatctggtgttgacaagcattctttcctaattcccccacttaacttgtctgatgctgtctgccaatgtcatcctcaccacttgtgtcttacagagaaggaaatgggagagggaggttgtgtcttacagagaaggaaatgagagagggaggttggtagcaacatcagagtgacagttggctgtctctcatttcttggggtcatcagtctgatttgtttagagcctgggatcatcccagttcctggaagaatctttggaaaagggtccccttgttcttgggacatgtgtcatggtcactaagccccctttccctcaggctactgttgctcagggacacaatgagataccccaaggacatctagacctgacttttcatgaactctcttgcctctgtggtccccacattggagacctccctccctcctccttcccttgtgtgaaggagacacctcccgagcaatcctaactcatccagctcacttttaacaaagcaaagagcagagggcactgaagactggatggctgtgaatggtacaccttggggttgaaaccgtgttggcaggaacctggtgataaaagctgcctacttcctgggtgtgtgaatttgcacatatcttttcccctcactggacttcagaagcctactgtgaactggggacgatgctatctactttccctcctgaagcccttctaactttcaaatgtatggtcctggggccatgagtcctgcacagaaactgcagccttgccagattgcttcccttggtgcagaaaagtgtgtgtgtgtgtgtgtgtgaaatatacgtacggttttacgtcaaaaacagtcgaatatcagctatttcatatggttcaccctaatgtacctgcctctctctttggctttaggtctgagaatgacttgtctttgtcaaggtatactattgttagaaacgcattaccaaatgcatctcttctgtcggatcagcgtattcctagattaggaattcaaattaatgaaaattcacatatgaaaggaaaatccattgctatttctggagaggacctcagtcctgggcttttccctggcattgctacctgggtgggtgctcaccactcaggtgctggtgttggaaggcaggaggaggaagctgaaatcctgccgattaaggctaattaacagggtttaggtgcctaattatcatgactcagcccgggacttatggttagccgtgcaggccaggtgagtctcttatggacttcctctcagactgctctttctcattttgtcctgatgagatattgacagtcatgtccacccgcttcctcatccatttcccgtcttgggccctggaagtacgggggcctctgtaggctgcctagggagccctggctttgctcttcgtgttgggctcactccatgatcaggagccggtgggactggtccttcctgattcttactgtctgtggttccccatcccctacggggagcctgctttgggccttgagctggatagagagaagagctttggggcccagctggttataggagctgagcttttccacacctctctttgttaacccttggaaacagacctgcctttcacctgacccatcttcctacctgtctggtctgacctgccctctttgaaagcactcatcacctagttttactaggctgattggcagatgtggacatgacaggtgtctatcgagataggtgtctaactagttaggtgtctcaggattggacagcagaataccattccaggggtgcacagacaggcctctcctaccggaacatgagggatagacgtctgggcattctgaacccagaggtcagagtagtcacaagcggagccctggggagcgagggccccagggccgtggtgttccttgccctgcgctcactgaagtccaaggccaggtttcagaaatagtgtgctgcctgttcctgagatccttcacacctggacaccaacccagacaaagcctgacttaaaattttgatactgtattcatcgtggaatttttcaataactctgatttttaaaaaatactgcattgcaatatgatttaccttgattactgaggctcttttttttttggcacccctttaaattttaacccaaggtgagggcctcactccactctatacccagccctgcctgcccctcacctggacctgtgagaggggcttaggtaccactgtgaaatacgttttaaatttttacttgcccttcccctcaggtcctgagtgaggcagtggctctctggcggtgctcgcatttaaataggagtgtgtaggcttacagcaatgaaacatctaggagcttttaactttggatctatacctgggtgtgacatttccttggtgttctctggctgcctttctggctctgcagccctgagggcacttgtgtgtgtgtgtgttctctggagaagggaagtgattatggcagagaggctcctttagattctcctcttaaacctctttggaacatgtttgaattccagaagtgaatgaacttcattcattctctcgtccagatttcagaagggactaaagtgaacggaggctttttcactccctggcatgctaagagccacattccctagctctgtgcctgcacagtgagtcttcagaatttggcccatcacaccctctgctagtatcgtttccaccaccctcctcatcctctgtcatctttatttcattctcatcgtttatctctacctccagttcagatgccatgctggctgtggctcttttcttcatcaccatcagagtgaggcaaagatgtatcctggcctagttataaagacgaataatacatgataagaaatcattaatttttttccacgtggggggcggtgctgtcctagtgattcatatatatataatttttgactccttacaataattctgggatgtgggtattacccccatttaagaatgtggaaaccaaggctctgatggctctgtaatttgcccagggtcacacagctaggaagcaagttgctgatctgcttggttccaaagtcacctctctttttcctctgagcacatttctaagccactacttagaagctcttgagataaagttggcctagctcaggtccaccgaggttttgagattgccctttgcccaaggaggagttgtgtccttggctcacctgtcatctgcctgtgactggacttgaaccctcgcacgtctcagctgacatccttgatgctgctggctgccttcctcgccctgtttcctctccatgactccaggggtttgaagcacacaggagctggacatgtcaattctgtagctcttctcccaataccactgaaggccgtgagcctctctcctgtttccagcctgcaggtgccctgttgctgctcttcattccagcttctcctcacttttctctcagtctcttgagcttggaagccttattgtagcttgtgtctcctccctgggcacttgaggtcaggcttttgcctttttgtcacattgagccacatgcctttgatacacagttgtagcaaagaagggaggtgatgaacttgctcactttcttttctgatttccctccctactcatcctgcactccccaccgaaacccagatatcttatagtctaaggcttgtagaggattaaggaaaggaattggagatgggttttacttagttcacagaaaagctttctttgggatttttcctcccccttagggcttttaagtctaggtgaagtgaaagttcacacatgtgtttgtttggttgctctgtaattagctactagtttttatccctagaccttctctgctccagtgtcttgttcatgtgtcctgaccccgtgtccttgaattcccactttgctttgggatttaagttattgtatgttgtcaacaatatttaaagatgaaaaagtcctgaaggaaacttaccaggttctttcctttggcttttttttttttttctttcgaggtactgtaaattgttaactagggatgccaagcaggcttggttcaatggctaaacctcttattgtattacagtgtaatgctgatctcagcctggtctcaatgccagagcacacagagacttgaataaaactgttataacgatta

SEQ ID NO: 155047 - DNA, 2653 bp, Homo sapiens
  Payload ID: 10481
  Gene Symbol: MAP4K1
  Gene Name: mitogen-activated protein kinase kinase kinase kinase 1
  Uniprot ID: Q92918
  ENST ID: ENST00000396857
  CDS Start-End: 109-2574
gcggaggcaaggcgggtgcagggcttctggggacggagggaggtgccagaagttgagccctgaggccctgctggcccctgggcgcaggcccagctcaggcccccagggatggacgtcgtggaccctgacattttcaatagagacccccgggaccactatgacctgctacagcggctgggtggcggcacgtatggggaagtctttaaggctcgagacaaggtgtcaggggacctggtggcactgaagatggtgaagatggagcctgatgatgatgtctccacccttcagaaggaaatcctcatattgaaaacttgccggcacgccaacatcgtggcctaccatgggagttatctctggttgcagaaactctggatctgcatggaattctgtggggctggttctctccaggacatctaccaagtgacaggctccctgtcagagctccagattagctatgtctgccgggaagtgctccagggactggcctatttgcactcacagaagaagatacacagggacatcaagggagctaacatcctcatcaatgatgctggggaggtcagattggctgactttggcatctcggcccagattggggctacactggccagacgcctctctttcattgggacaccctactggatggctccggaagtggcagctgtggccctgaagggaggatacaatgagctgtgtgacatctggtccctgggcatcacggccatcgaactggccgagctacagccaccgctctttgatgtgcaccctctcagagttctcttcctcatgaccaagagtggctaccagcctccccgactgaaggaaaaaggcaaatggtcggctgccttccacaacttcatcaaagtcactctgactaagagtcccaagaaacgacccagcgccaccaagatgctcagtcatcaactggtatcccagcctgggctgaatcgaggcctgatcctggatcttcttgacaaactgaagaatcccgggaaaggaccctccattggggacattgaggatgaggagcccgagctaccccctgctatccctcggcggatcagatccacccaccgctccagctctctggggatcccagatgcagactgctgtcggcggcacatggagttcaggaagctccgaggaatggagaccagacccccagccaacaccgctcgcctacagcctcctcgagacctcaggagcagcagccccaggaagcaactgtcagagtcgtctgacgatgactatgacgacgtggacatccccacccctgcagaggacacacctcctccacttccccccaagcccaagttccgttctccatcagacgagggtcctgggagcatgggggatgatgggcagctgagcccgggggtgctggtccggtgtgccagtgggcccccaccaaacagcccccgtcctgggcctcccccatccaccagcagcccccacctcaccgcccattcagaaccctcactctggaacccaccctcccgggagcttgacaagcccccacttctgccccccaagaaggaaaagatgaagagaaagggatgtgcccttctcgtaaagttgttcaatggctgccccctccggatccacagcacggccgcctggacacatccctccaccaaggaccagcacctgctcctgggggcagaggaaggcatcttcatcctgaaccggaatgaccaggaggccacgctggaaatgctctttcctagccggactacgtgggtgtactccatcaacaacgttctcatgtctctctcaggaaagaccccccacctgtattctcatagcatccttggcctgctggaacggaaagagaccagagcaggaaaccccatcgctcacattagcccccaccgcctactggcaaggaagaacatggtttccaccaagatccaggacaccaaaggctgccgggcgtgctgtgtggcggagggtgcgagctctgggggcccgttcctgtgcggtgcattggagacgtccgttgtcctgcttcagtggtaccagcccatgaacaaattcctgcttgtccggcaggtgctgttcccactgccgacgcctctgtccgtgttcgcgctgctgaccgggccaggctctgagctgcccgctgtgtgcatcggcgtgagccccgggcggccggggaagtcggtgctcttccacacggtgcgctttggcgcgctctcttgctggctgggcgagatgagcaccgagcacaggggacccgtgcaggtgacccaggtagaggaagatatggtgatggtgttgatggatggctctgtgaagctggtgaccccggaggggtccccagtccggggacttcgcacacctgagatccccatgaccgaagcggtggaggccgtggctatggttggaggtcagcttcaggccttctggaagcatggagtgcaggtgtgggctctaggctcggatcagctgctacaggagctgagagaccctaccctcactttccgtctgcttggctcccccaggcctgtagtggtggagacacgcccagtggatgatcctactgctcccagcaacctctacatccaggaatgagtccctaggggggtgtcaggaactagtccttgcaccccctcccccatagacacactagtggtcatggcatgtcctcatc

SEQ ID NO: 155048 - DNA, 2700 bp, Homo sapiens
  Payload ID: 10481
  Gene Symbol: MAP4K1
  Gene Name: mitogen-activated protein kinase kinase kinase kinase 1
  Uniprot ID: Q92918
  ENST ID: ENST00000591517
  CDS Start-End: 30-2531
gggcgcaggcccagctcaggcccccagggatggacgtcgtggaccctgacattttcaatagagacccccgggaccactatgacctgctacagcggctgggtggcggcacgtatggggaagtctttaaggctcgagacaaggtgtcaggggacctggtggcactgaagatggtgaagatggagcctgatgatgatgtctccacccttcagaaggaaatcctcatattgaaaacttgccggcacgccaacatcgtggcctaccatgggagttatctctggttgcagaaactctggatctgcatggaattctgtggggctggttctctccaggacatctaccaagtgacaggctccctgtcagagctccagattagctatgtctgccgggaagtgctccagggactggcctatttgcactcacagaagaagatacacagggacatcaagggagctaacatcctcatcaatgatgctggggaggtcagattggctgactttggcatctcggcccagattggggctacactggccagacgcctctctttcattgggacaccctactggatggctccggaagtggcagctgtggccctgaagggaggatacaatgagctgtgtgacatctggtccctgggcatcacggccatcgaactggccgagctacagccaccgctctttgatgtgcaccctctcagagttctcttcctcatgaccaagagtggctaccagcctccccgactgaaggaaaaaggcaaatggtcggctgccttccacaacttcatcaaagtcactctgactaagagtcccaagaaacgacccagcgccaccaagatgctcagtcatcaactggtatcccagcctgggctgaatcgaggcctgatcctggatcttcttgacaaactgaagaatcccgggaaaggaccctccattggggacattgaggatgaggagcccgagctaccccctgctatccctcggcggatcagatccacccaccgctccagctctctggggatcccagatgcagactgctgtcggcggcacatggagttcaggaagctccgaggaatggagaccagacccccagccaacaccgctcgcctacagcctcctcgagacctcaggagcagcagccccaggaagcaactgtcagagtcgtctgacgatgactatgacgacgtggacatccccacccctgcagaggacacacctcctccacttccccccaagcccaagttccgttctccatcagacgagggtcctgggagcatgggggatgatgggcagctgagcccgggggtgctggtccggtgtgccagtgggcccccaccaaacagcccccgtcctgggcctcccccatccaccagcagcccccacctcaccgcccattcagaaccctcactctggaacccaccctcccgggagcttgacaagcccccacttctgccccccaagaaggaaaagatgaagagaaagggatgtgcccttctcgtaaagttgttcaatggctgccccctccggatccacagcacggccgcctggacacatccctccaccaaggaccagcacctgctcctgggggcagaggaaggcatcttcatcctgaaccggaatgaccaggaggccacgctggaaatgctctttcctagccggactacgtgggtgtactccatcaacaacgttctcatgtctctctcaggaaagaccccccacctgtattctcatagcatccttggcctgctggaacggaaagagaccagagcaggaaaccccatcgctcacattagcccccaccgcctactggcaaggaagaacatggtttccaccaagatccaggacaccaaaggctgccgggcgtgctgtgtggcggagggtgcgagctctgggggcccgttcctgtgcggtgcattggagacgtccgttgtcctgcttcagtggtaccagcccatgaacaaattcctgcttgtccggcaggtgctgttcccactgccgacgcctctgtccgtgttcgcgctgctgaccgggccaggctctgagctgcccgctgtgtgcatcggcgtgagccccgggcggccggggaagtcggtgctcttccacacggtgcgctttggcgcgctctcttgctggctgggcgagatgagcaccgagcacaggggacccgtgcaggtgacccaggtagaggaagatatggtgatggtgttgatggatggctctgtgaagctggtgaccccggaggggtccccagtccggggacttcgcacacctgagatccccatgaccgaagcggtggaggccgtggctatggttggaggtcagcttcaggccttctggaagcatggagtgcaggtgtgggctctaggctcggatcagctgctacaggagctgagagaccctaccctcactttccgtctgcttggctcccccaggctggagtgcagtggcacgatctcgcctcactgcaacctcctcctcccaggttcaagcaattctcctgcctcagcctcccgagtagctgggattacaggcctgtagtggtggagacacgcccagtggatgatcctactgctcccagcaacctctacatccaggaatgagtccctaggggggtgtcaggaactagtccttgcaccccctcccccatagacacactagtggtcatggcatgtcctcatctcccaataaacatgactttagcctctgc

SEQ ID NO: 155049 - DNA, 1625 bp, Homo sapiens
  Payload ID: 10481
  Gene Symbol: MAP4K1
  Gene Name: mitogen-activated protein kinase kinase kinase kinase 1
  ENST ID: ENST00000591921
  CDS Start-End: 1-1577
gctccagctctctggggatcccagatgcagactgctgtcggcggcacatggagttcaggaagctccgaggaatggagaccagacccccagccaacaccgctcgcctacagcctcctcgagacctcaggagcagcagccccaggtcagggaccccagggaggatggggagggggctggaatgtggacaaggcccccaaggctcatacctgtcacccttcaggaagcaactgtcagagtcgtctgacgatgactatgacgacgtggacatccccacccctgcagaggacacacctcctccacttccccccaagcccaagttccgttctccatcagacgagggtcctgggagcatgggggatgatgggcagctgagcccgggggtgctggtccggtgtgccagtgggcccccaccaaacagcccccgtcctgggcctcccccatccaccagcagcccccacctcaccgcccattcagaaccctcactctggaacccaccctcccgggagcttgacaagcccccacttctgccccccaagaaggaaaagatgaagagaaagggatgtgcccttctcgtaaagttgttcaatggctgccccctccggatccacagcacggccgcctggacacatccctccaccaaggaccagcacctgctcctgggggcagaggaaggcatcttcatcctgaaccggaatgaccaggaggccacgctggaaatgctctttcctagccggactacgtgggtgtactccatcaacaacgttctcatgtctctctcaggaaagaccccccacctgtattctcatagcatccttggcctgctggaacggaaagagaccagagcaggaaaccccatcgctcacattagcccccaccgcctactggcaaggaagaacatggtttccaccaagatccaggacaccaaaggctgccgggcgtgctgtgtggcggagggtgcgagctctgggggcccgttcctgtgcggtgcattggagacgtccgttgtcctgcttcagtggtaccagcccatgaacaaattcctgcttgtccggcaggtgctgttcccactgccgacgcctctgtccgtgttcgcgctgctgaccgggccaggctctgagctgcccgctgtgtgcatcggcgtgagccccgggcggccggggaagtcggtgctcttccacacggtgcgctttggcgcgctctcttgctggctgggcgagatgagcaccgagcacaggggacccgtgcaggtgacccaggtagaggaagatatggtgatggtgttgatggatggctctgtgaagctggtgaccccggaggggtccccagtccggggacttcgcacacctgagatccccatgaccgaagcggtggaggccgtggctatggttggaggtcagcttcaggccttctggaagcatggagtgcaggtgtgggctctaggctcggatcagctgctacaggagctgagagaccctaccctcactttccgtctgcttggctcccccaggcctgtagtggtggagacacgcccagtggatgatcctactgctcccagcaacctctacatccaggaatgagtccctaggggggtgtcaggaactagtccttgcaccccctcccccata

SEQ ID NO: 155050 - DNA, 1363 bp, Homo sapiens
  Payload ID: 10481
  Gene Symbol: MAP4K1
  Gene Name: mitogen-activated protein kinase kinase kinase kinase 1
  ENST ID: ENST00000586296
  CDS Start-End: 72-1259
gggaggtgccagaagttgagccctgaggccctgctggcccctgggcgcaggcccagctcaggcccccagggatggacgtcgtggaccctgacattttcaatagagacccccgggaccactatgacctgctacagcggctgggtggcggcacgtatggggaagtctttaaggctcgagacaaggtgtcaggggacctggtggcactgaagatggtgaagatggagcctgatgatgatgtctccacccttcagaaggaaatcctcatattgaaaacttgccggcacgccaacatcgtggcctaccatgggagttatctctggttgcagaaactctggatctgcatggaattctgtggggctggttctctccaggacatctaccaagtgacaggctccctgtcagagctccagattagctatgtctgccgggaagtgctccagggactggcctatttgcactcacagaagaagatacacagggacatcaagggagctaacatcctcatcaatgatgctggggaggtcagattggctgactttggcatctcggcccagattggggctacactggccagacgcctctctttcattgggacaccctactggatggctccggaagtggcagctgtggccctgaagggaggatacaatgagctgtgtgacatctggtccctgggcatcacggccatcgaactggccgagctacagccaccgctctttgatgtgcaccctctcagagttctcttcctcatgaccaagagtggctaccagcctccccgactgaaggaaaaaggcaaatggtcggctgccttccacaacttcatcaaagtcactctgactaagagtcccaagaaacgacccagcgccaccaagatgctcagtcatcaactggtatcccagcctgggctgaatcgaggcctgatcctggatcttcttgacaaactgaagaatcccgggaaaggaccctccattggggacattgaggatgaggagcccgagctaccccctgctatccctcggcggatcagatccacccaccgctccagctctctggggatcccagatgcagactgctgtcagcttcaggccttctggaagcatggagtgcaggtgtgggctctaggctcggatcagctgctacaggagctgagagaccctaccctcactttccgtctgcttggctcccccaggcctgtagtggtggagacacgcccagtggatgatcctactgctcccagcaacctctacatccaggaatgagtccctaggggggtgtcaggaactagtccttgcaccccctcccccatagacacactagtggtcatggcatgtcctcatctcccaataaacatgactttagcctc

SEQ ID NO: 155051 - DNA, 2654 bp, Homo sapiens
  Payload ID: 10481
  Gene Symbol: MAP4K1
  Gene Name: mitogen-activated protein kinase kinase kinase kinase 1
  ENST ID: ENST00000589130
  CDS Start-End: 99-2552
acccggagctctggcggcgtgcgcgcgcgttgtattgcgcgcggccatgaggccacggagctctgcgggaatgcacgcagcagccttacgtttaggccatggccaagttccgagggagagacccccgggaccactatgacctgctacagcggctgggtggcggcacgtatggggaagtctttaaggctcgagacaaggtgtcaggggacctggtggcactgaagatggtgaagatggagcctgatgatgatgtctccacccttcagaaggaaatcctcatattgaaaacttgccggcacgccaacatcgtggcctaccatgggagttatctctggttgcagaaactctggatctgcatggaattctgtggggctggttctctccaggacatctaccaagtgacaggctccctgtcagagctccagattagctatgtctgccgggaagtgctccagggactggcctatttgcactcacagaagaagatacacagggacatcaagggagctaacatcctcatcaatgatgctggggaggtcagattggctgactttggcatctcggcccagattggggctacactggccagacgcctctctttcattgggacaccctactggatggctccggaagtggcagctgtggccctgaagggaggatacaatgagctgtgtgacatctggtccctgggcatcacggccatcgaactggccgagctacagccaccgctctttgatgtgcaccctctcagagttctcttcctcatgaccaagagtggctaccagcctccccgactgaaggaaaaaggcaaatggtcggctgccttccacaacttcatcaaagtcactctgactaagagtcccaagaaacgacccagcgccaccaagatgctcagtcatcaactggtatcccagcctgggctgaatcgaggcctgatcctggatcttcttgacaaactgaagaatcccgggaaaggaccctccattggggacattgaggatgaggagcccgagctaccccctgctatccctcggcggatcagatccacccaccgctccagctctctggggatcccagatgcagactgctgtcggcggcacatggagttcaggaagctccgaggaatggagaccagacccccagccaacaccgctcgcctacagcctcctcgagacctcaggagcagcagccccaggaagcaactgtcagagtcgtctgacgatgactatgacgacgtggacatccccacccctgcagaggacacacctcctccacttccccccaagcccaagttccgttctccatcagacgagggtcctgggagcatgggggatgatgggcagctgagcccgggggtgctggtccggtgtgccagtgggcccccaccaaacagcccccgtcctgggcctcccccatccaccagcagcccccacctcaccgcccattcagaaccctcactctggaacccaccctcccgggagcttgacaagcccccacttctgccccccaagaaggaaaagatgaagagaaagggatgtgcccttctcgtaaagttgttcaatggctgccccctccggatccacagcacggccgcctggacacatccctccaccaaggaccagcacctgctcctgggggcagaggaaggcatcttcatcctgaaccggaatgaccaggaggccacgctggaaatgctctttcctagccggactacgtgggtgtactccatcaacaacgttctcatgtctctctcaggaaagaccccccacctgtattctcatagcatccttggcctgctggaacggaaagagaccagagcaggaaaccccatcgctcacattagcccccaccgcctactggcaaggaagaacatggtttccaccaagatccaggacaccaaaggctgccgggcgtgctgtgtggcggagggtgcgagctctgggggcccgttcctgtgcggtgcattggagacgtccgttgtcctgcttcagtggtaccagcccatgaacaaattcctgcttgtccggcaggtgctgttcccactgccgacgcctctgtccgtgttcgcgctgctgaccgggccaggctctgagctgcccgctgtgtgcatcggcgtgagccccgggcggccggggaagtcggtgctcttccacacggtgcgctttggcgcgctctcttgctggctgggcgagatgagcaccgagcacaggggacccgtgcaggtgacccaggtagaggaagatatggtgatggtgttgatggatggctctgtgaagctggtgaccccggaggggtccccagtccggggacttcgcacacctgagatccccatgaccgaagcggtggaggccgtggctatggttggaggtcagcttcaggccttctggaagcatggagtgcaggtgtgggctctaggctcggatcagctgctacaggagctgagagaccctaccctcactttccgtctgcttggctcccccaggcctgtagtggtggagacacgcccagtggatgatcctactgctcccagcaacctctacatccaggaatgagtccctaggggggtgtcaggaactagtccttgcaccccctcccccatagacacactagtggtcatggcatgtcctcatctcccaataaacatgactttagcc

SEQ ID NO: 155052 - DNA, 1225 bp, Homo sapiens
  Payload ID: 10481
  Gene Symbol: MAP4K1
  Gene Name: mitogen-activated protein kinase kinase kinase kinase 1
  ENST ID: ENST00000585583
  CDS Start-End: 1-208
tggggctacactggccagacgcctctctttcattgggacaccctactggatggctccggaagtggcagctgtggccctgaagggaggatacaatgagctgtgtgacatctggtccctgggcatcacggccatcgaactggccgagctacagccaccgctctttgatgtgcaccctctcagcatcaactggtatcccagcctgggctgaatcgaggcctgatcctggatcttcttgacaaactgaagaatcccgggaaaggaccctccattggggacattgaggatgaggagcccgagctaccccctgctatccctcggcggatcagatccacccaccgctccagctctctggggatcccagatgcagactgctgtcggcggcacatggagttcaggaagctccgaggaatggagaccagacccccagccaacaccgctcgcctacagcctcctcgagacctcaggagcagcagccccaggaagcaactgtcagagtcgtctgacgatgactatgacgacgtggacatccccacccctgcagaggacacacctcctccacttccccccaagcccaagttccgttctccatcagacgagggtcctgggagcatgggggatgatgggcagctgagcccgggggtgctggtccggtgtgccagtgggcccccaccaaacagcccccgtcctgggcctcccccatccaccagcagcccccacctcaccgcccattcagaaccctcactctggaacccaccctcccgggagcttgacaagcccccacttctgccccccaagaaggaaaagatgaagagaaagggatgtgcccttctcgtaaagttgttcaatggctgccccctccggatccacagcacggccgcctggacacatccctccaccaaggaccagcacctgctcctgggggcagaggaaggcatcttcatcctgaaccggaatgaccaggaggccacgctggaaatggaaagaccccccacctgtattctcatagcatccttggcctgctggaacggaaagagaccagagcaggaaaccccatcgctcacattagcccccaccgcctactggcaaggtaccagctcccaatgaatggcaccacacagccttataattcctcccatgcccctctgcctcctgctgtcctaccccccttcacacctacctattctccaggaagaacatggtttccaccaagatccaggacaccaaa

SEQ ID NO: 155053 - DNA, 2654 bp, Homo sapiens; identical to SEQ ID NO: 155051
  Payload ID: 10481
  Gene Symbol: MAP4K1
  Gene Name: mitogen-activated protein kinase kinase kinase kinase 1
  ENST ID: ENST00000634456
  CDS Start-End: 99-2552

SEQ ID NO: 155054 - DNA, 2700 bp, Homo sapiens; identical to SEQ ID NO: 155048
  Payload ID: 10481
  Gene Symbol: MAP4K1
  Gene Name: mitogen-activated protein kinase kinase kinase kinase 1
  ENST ID: ENST00000634395
  CDS Start-End: 30-2531

SEQ ID NO: 155055 - DNA, 1363 bp, Homo sapiens; identical to SEQ ID NO: 155050
  Payload ID: 10481
  Gene Symbol: MAP4K1
  Gene Name: mitogen-activated protein kinase kinase kinase kinase 1
  ENST ID: ENST00000634814
  CDS Start-End: 72-1259

SEQ ID NO: 155056 - DNA, 1225 bp, Homo sapiens; identical to SEQ ID NO: 155052
  Payload ID: 10481
  Gene Symbol: MAP4K1
  Gene Name: mitogen-activated protein kinase kinase kinase kinase 1
  ENST ID: ENST00000634236
  CDS Start-End: 1-208

SEQ ID NO: 155057 - DNA, 2653 bp, Homo sapiens; identical to SEQ ID NO: 155047
  Payload ID: 10481
  Gene Symbol: MAP4K1
  Gene Name: mitogen-activated protein kinase kinase kinase kinase 1
  ENST ID: ENST00000634494
  CDS Start-End: 109-2574

SEQ ID NO: 155058 - DNA, 1625 bp, Homo sapiens; identical to SEQ ID NO: 155049
  Payload ID: 10481
  Gene Symbol: MAP4K1
  Gene Name: mitogen-activated protein kinase kinase kinase kinase 1
  ENST ID: ENST00000634475
  CDS Start-End: 1-1577

SEQ ID NO: 155059 - DNA, 7178 bp, Homo sapiens
  Payload ID: 10482
  Gene Symbol: MAP4K2
  Gene Name: mitogen-activated protein kinase kinase kinase kinase 2
  Uniprot ID: Q12851
  ENST ID: ENST00000294066
  CDS Start-End: 93-2555
cagagccacgggcgcccgccccgccccgcgccgccccgcgccggctccgcagctcgcgcccgcccgcctgccggcccgcccggcgccgggccatggcgctgctgcgggatgtgtcgctgcaggacccgcgggaccgcttcgagctgctgcagcgcgtgggggccgggacctatggcgacgtctacaaggcccgcgacacggtcacgtccgaactggccgccgtgaagatagtcaagctagacccaggggacgacatcagctccctccagcaggaaatcaccatcctgcgtgagtgccgccaccccaatgtggtggcctacattggcagctacctcaggaatgaccgcttgtggatctgcatggagttctgcggagggggctccctgcaggagatttaccatgccactgggcccctggaggagcggcagattgcctacgtctgccgagaggcactgaaggggctccaccacctgcattctcaggggaagatccacagagacatcaagggagccaaccttctcctcactctccagggagatgtcaaactggctgactttggggtgtcaggcgagctgacagcgtctgtggccaagaggaggtctttcattgggactccctactggatggctcccgaggtggctgctgtggagcgcaaaggtggctacaatgagctatgtgacgtctgggccctgggcatcactgccattgagctgggcgagctgcagccccctctgttccacctgcaccccatgagggccctgatgctcatgtcgaagagcagcttccagccgcccaaactgagagataagactcgctggacccagaatttccaccactttctcaaactggccctgaccaagaatcctaagaagaggccgacagcagagaagctcctgcagcacccgttcacgactcagcagctccctcgggccctcctcacacagctgctggacaaagccagtgaccctcatctggggaccccctcccctgaggactgtgagctggagacctatgacatgtttccagacaccattcactcccgggggcagcacggcccagccgagaggaccccctcggagatccagtttcaccaggtgaaatttggcgccccacgcaggaaggaaactgacccactgaatgagccgtgggaggaagagtggacactactgggaaaggaagagttgagtgggagcctgctgcagtcggtccaggaggccctggaggaaaggagtctgactattcggtcagcctcagaattccaggagctggactccccagacgataccatgggaaccatcaagcgggccccgttcctagggccactccccactgaccctccagcagaggagcctctgtccagtcccccaggaaccctgcccccacctccttcaggccccaacagctccccactgctgcccacggcctgggccaccatgaagcagcgggaggatcctgagaggtcatcctgccacgggctccccccaactcccaaggtgcatatgggcgcctgcttctccaaggtcttcaatggctgccccctgcggatccacgctgctgtcacctggattcaccctgttactcgggaccagttcctggtggtaggggccgaggaaggcatctacacactcaacctgcatgaactgcatgaggatacgctggagaagctgatttcacatcgctgctcctggctctactgcgtgaacaacgtgctgctgtcactctcagggaaatccacgcacatctgggcccatgacctcccaggcctgtttgagcagcggaggctacagcaacaggttcccctctccatccccaccaaccgcctcacccagcgcatcatccccaggcgctttgctctgtccaccaagattcctgacaccaaaggctgcttgcagtgtcgtgtggtgcggaacccctacacgggtgccaccttcctgctggccgccctgcccaccagcctgctcctgctgcagtggtatgagccgctgcagaagtttctgctgctgaagaacttctccagccctctgcccagcccagctgggatgctggagccgctggtgctggatgggaaggagctgccgcaggtgtgtgttggggccgaggggcctgaggggcccggctgccgcgtcctgttccatgtcctgcccctggaggctggcctgacgcccgacatcctcatcccacctgaggggatcccaggctcggcccagcaggtgatccaggtggacagggacacaatcctagtcagctttgaacgctgtgtgaggattgtcaacatgcagggcgagcccacggccacactggcacctgagctgacctttgatttccccatcgagactgtggtgtgcctgcaggacagtgtgctggccttctggagccatgggatgcaaggccgaagcctggataccaatgaggtgacccaggagatcacagatgaaacaaggatcttccgagtgcttggggcccacagagacatcatcctggagagcattcccactgacaacccagaggcgcacagcaacctctacatcctcacgggccaccagagcacctactaagagcagcgggcctgtccaggggctccccgccccaccccacgccttagctgcaggcccttttgggcaaaggggcccatcctagaccagaggagcccaggccctggccctgctggggctgaaggtcagaagtaatcctgagaaatgtttcaggcctggggagggaggggagcccccgacgcctctgcaataactggaccagggggagctgctgtcactcccccatccccgaggcagcccagtccctagtgcccaaggcagggaccctgggcctgggccatccattccattttgttccacatttcctttctactctttctgccaagagcctgcccctgcatttgtcctgggaaacacggtatttaagagagaactatattggtattaaagctggtttgttttagtcctctggtccctctgggtagggggagtgaacccacctcatctcccgcctccttccctccaacacacgtttctgtgggcaccacagaagggcagggcccccagggttttggagaagccaggtagaggtgacaggaggccatggcccccagcagccttctaggggcactgtgccttcccctgcatccttgctcagaactgaccctcagctttgcagtttgagggctctgctgtagtttagcaccccaaggactcatgcagatggggggacctcaacaaagggactctcatccagggcacccttgccccacgtaggatctcactgggtgacccctggaagggcccaggaggagcccccagagggctgttccctccattcccatggaggctgctgcccatggaggtagcctgtgtgacctgtatcccctgcctccacctactgcctaggtgttagaccaggaacatcagatgacagcacgatcatcagattggatgggaaggctagcctgtgtccgtctaccagactcccaagggctgcctcagtgccaggccctggggtcactaccagaaacagaccagcccccagggagggcgtcctccttgctggagcctgcatcttgagggcatggccattctcctgtagcttgtgcttacgctgtcattctccaagggtctgtctgctcagctctgaatgccagggcccccagggctgggcatcctcttttgccccaggcactgatcagccgctcttgactggagcctttgggcagctgcagcccaggaggcaggatgggaactgccttgagggcccacagctggggggctgggaaggtgggggcagggtggggggaacagctggagcaaaggccccatggtcacccctacattcaaggcaggtgttggaggaagacctttgcacctggtgggtggcaataaagacttgcggagtgacgtggtaggtggatggcagccatgcgagtaggctcagtggttcccagggtgtcacactgtcccctcagccaccctccagcagagtttcaactgttctgactctgtccagtgactgggagggtttcttggctggaatggggagccagcccaggggagggaacacatctcttcacaccaggcattcacacccatgttcccgtgagccccaaggagggtgaggggcaccttccaaattggggtcggtggtaacagggatacaaagtgaattcctaacttccaattttccagatttctcggaggaatgttgggaccagggtggggtaagtggggacagggaggtgagctcctgctcagcaaaggccctgaccaaaggcgccctggggaggactggctttccgttcaccaaccggccagcagcagacagtgcctccttgtggcggatcttcccggacctcagattcagtctggaaacggggtttggactgcagagtgtaaactgccaaagtgggggcctcccataaaacgcttgctgccagcaaaggcaggccaagagcaaagaaaggccgagaaaccagggaatatgcactgagagactaacactttaaattttatttatgtatttttaaatgcgtaacctttgcccatggtacatatttttttaaatacagcagagatataatgaagtctccctcttaccccgtccccagccaccctggtctcagttacttatgaacccttctagaagtattttgcgtatttaagcaatttggtatattttattcttggcgattttttatatacgtattaacatattccacatactgtactgaccttgccctttaaaaatatatcctggggggccaggtgtggtggctcacacctgtaatccaagcactttgggaggccgaggcgggcgaatcacgaggtcaggggttcgagaccagcctggccaacatggtgaaaccccgtctctactaaaaatacaaaaaattagctgggcatggtggcgagtgcctgtaatcccagctactcgggaggctgaggcaggagaatcgcttgaacctgggaggcggaggttgcagtgagcctagaacatgccactgcactccagcctgggcgacagtgcaagactccgtctcaaaaaaaaaaaaaagagaaaaaaatatatatatatcctggagaatatgaatgtattaaattatcacatgcaccctgaaaagatatgtatatatcctggagagttttgcgttaaagatctccctttaaaaaaaaatttttttttttttacagctagtggtattccattgtgtatgtttcccataacaaatgttaatgacctgcagtgagatccctattggtggaaatttgagttgtttttactacttttatattacaaacaatgctgcaataaatattattaggctagtgcccctctgtacatattcaagcacttctagaagataagttcctggaagcagcattaatgagttagcggtggctacatatgccgtggtgatagctgctgtccagttgcccctccatgggcagaaacctgtgggagggtcagaccagactctttaagtcattcttgaggacaagtagaagggacgtgggcccccccaggatgttcaggtaactggcccatacccggagtcatcctggtgaaagtcaaggggagcaccatgatgtgtgcttcgggacggcggaggatctgccgtgttccctgtggcatgtccagcacctgctcactaccagtgctcaggagaccctcacgagtaagggaatggacaagatgtggtgaagaggagtccctgcaatctgcccttggactgggtgagccaccccagctcgctgagctttactttccttaggtttaccatatccaaagccaactgcagggctgtcaggaggatcagaaatactgtaacagacataatgcaataacatagatgactcttagaggtaaattaaaacagcactttatgcacagtacgatagcatattataaagctcaaaaacaaaatgaaaccatctattgtttagcaatacatgcccaagatacaaccctattaaaaaatcatgggaaggaaaagcacaaaatctgagatggtcgtccctgagaggagtgtgggatgggataaggaaggagcccaggaatttttaaaggtattggtaatatcttagctctcaggtttggtggtaggttcatgggtatttaagttataactcagttcctaactcacataaggtgccacacatccttttgtatgtatcaaatattatgtcataaaattttagtttgggcatggtggttcatgtctgtaatcccagcactttgggaaactgaggcaggcagatcacttgaacccaggagttctagaccagcctgggcaacatgacaaaaccctgtctctacaaaagatacacaaattagctggacatggtggcactcgcctgcagtcccagctactctggaggctaaggtgggaggattgcttgagcctaggagttcaaggctgcagtgagctatgaacttgccactgcactccagcctgggtgacagagtgagaacctgtctcaaaaagaaaaaaaaaaaaaggaaaaaaatttttaaaaaatatttaaaagtaatcaccgaaaaaatagaactcgcttgaaagacaagaccaaaaacgaagaggacgtttccctagatggtgaaaacaagtggggcggaatcactgcagcgtcctgcacagaactctggaattgccactttgcagttgctgccttctagtgtgtattgttgaaagacagttttattgaggcataattggcatacaataagctgcatataaaaatgtgtacgtgatgacttttgacatacgtgtacacccgtgaagctatttccacaatcaagataatcaccatccccttcactctggaaagtttcccatgcccttggtaagcccaccctcctgcttcttgcctcccatccccaagtaacaactgtgctgctttctgtcactacaggttaatctgcactttctagaatgtatgtaaatagaatcacacagtatgtacttgtgttttgtctggcttcttgcttagctgagcataaggatttgcgagtcatccctgttgcatgcattaatattttattcctttttattgccaagtagtattccattgtttggatgcaccagtttggttagctgttcacctgttgatggacatttggaccatgttccgttgtgaactattacaaataaagctgctataaacattcatgta

SEQ ID NO: 155060 - DNA, 2931 bp, Homo sapiens
  Payload ID: 10482
  Gene Symbol: MAP4K2
  Gene Name: mitogen-activated protein kinase kinase kinase kinase 2
  Uniprot ID: Q12851
  ENST ID: ENST00000377350
  CDS Start-End: 93-2531
cagagccacgggcgcccgccccgccccgcgccgccccgcgccggctccgcagctcgcgcccgcccgcctgccggcccgcccggcgccgggccatggcgctgctgcgggatgtgtcgctgcaggacccgcgggaccgcttcgagctgctgcagcgcgtgggggccgggacctatggcgacgtctacaaggcccgcgacacggtcacgtccgaactggccgccgtgaagatagtcaagctagacccaggggacgacatcagctccctccagcaggaaatcaccatcctgcgtgagtgccgccaccccaatgtggtggcctacattggcagctacctcaggaatgaccgcttgtggatctgcatggagttctgcggagggggctccctgcaggagatttaccatgccactgggcccctggaggagcggcagattgcctacgtctgccgagaggcactgaaggggctccaccacctgcattctcaggggaagatccacagagacatcaagggagccaaccttctcctcactctccagggagatgtcaaactggctgactttggggtgtcaggcgagctgacagcgtctgtggccaagaggaggtctttcattgggactccctactggatggctcccgaggtggctgctgtggagcgcaaaggtggctacaatgagctatgtgacgtctgggccctgggcatcactgccattgagctgggcgagctgcagccccctctgttccacctgcaccccatgagggccctgatgctcatgtcgaagagcagcttccagccgcccaaactgagagataagactcgctggacccagaatttccaccactttctcaaactggccctgaccaagaatcctaagaagaggccgacagcagagaagctcctgcagcacccgttcacgactcagcagctccctcgggccctcctcacacagctgctggacaaagccagtgaccctcatctggggaccccctcccctgaggactgtgagctggagacctatgacatgtttccagacaccattcactcccgggggcagcacggcccagccgagaggaccccctcggagatccagtttcaccaggtgaaatttggcgccccacgcaggaaggaaactgacccactgaatgagccgtgggaggaagagtggacactactgggaaaggaagagttgagtgggagcctgctgcagtcggtccaggaggccctggaggaaaggagtctgactattcggtcagcctcagaattccaggagctggactccccagacgataccatgggaaccatcaagcgggccccgttcctagggccactccccactgaccctccagcagaggagcctctgtccagtcccccaggccccaacagctccccactgctgcccacggcctgggccaccatgaagcagcgggaggatcctgagaggtcatcctgccacgggctccccccaactcccaaggtgcatatgggcgcctgcttctccaaggtcttcaatggctgccccctgcggatccacgctgctgtcacctggattcaccctgttactcgggaccagttcctggtggtaggggccgaggaaggcatctacacactcaacctgcatgaactgcatgaggatacgctggagaagctgatttcacatcgctgctcctggctctactgcgtgaacaacgtgctgctgtcactctcagggaaatccacgcacatctgggcccatgacctcccaggcctgtttgagcagcggaggctacagcaacaggttcccctctccatccccaccaaccgcctcacccagcgcatcatccccaggcgctttgctctgtccaccaagattcctgacaccaaaggctgcttgcagtgtcgtgtggtgcggaacccctacacgggtgccaccttcctgctggccgccctgcccaccagcctgctcctgctgcagtggtatgagccgctgcagaagtttctgctgctgaagaacttctccagccctctgcccagcccagctgggatgctggagccgctggtgctggatgggaaggagctgccgcaggtgtgtgttggggccgaggggcctgaggggcccggctgccgcgtcctgttccatgtcctgcccctggaggctggcctgacgcccgacatcctcatcccacctgaggggatcccaggctcggcccagcaggtgatccaggtggacagggacacaatcctagtcagctttgaacgctgtgtgaggattgtcaacatgcagggcgagcccacggccacactggcacctgagctgacctttgatttccccatcgagactgtggtgtgcctgcaggacagtgtgctggccttctggagccatgggatgcaaggccgaagcctggataccaatgaggtgacccaggagatcacagatgaaacaaggatcttccgagtgcttggggcccacagagacatcatcctggagagcattcccactgacaacccagaggcgcacagcaacctctacatcctcacgggccaccagagcacctactaagagcagcgggcctgtccaggggctccccgccccaccccacgccttagctgcaggcccttttgggcaaaggggcccatcctagaccagaggagcccaggccctggccctgctggggctgaaggtcagaagtaatcctgagaaatgtttcaggcctggggagggaggggagcccccgacgcctctgcaataactggaccagggggagctgctgtcactcccccatccccgaggcagcccagtccctagtgcccaaggcagggaccctgggcctgggccatccattccattttgttccacatttcctttctactctttctgccaagagcctgcccctgcatttgtcctgggaaacacggtatttaagagagaactatattggtattaaagctggtttgtttta

SEQ ID NO: 155061 - DNA, 3169 bp, Homo sapiens
  Payload ID: 10482
  Gene Symbol: MAP4K2
  Gene Name: mitogen-activated protein kinase kinase kinase kinase 2
  ENST ID: ENST00000435926
  CDS Start-End: 14-187
ccggcgccgggccatggcgctgctgcgggatgtgtcgctgcaggacccgcgggaccgcttcgagctgctgcagcgcgtgggggccgggacctatggcgacgtctacaaggcccgcgacacggtcacgtccgaactggccgccgtgaagatagtcaagctagacccaggaaatcaccatcctgcgtgagtgccgccaccccaatgtggtggcctacattggcagctacctcaggaatgaccgcttgtggatctgcatggagttctgcggagggggctccctgcaggagatttaccatgccactgggcccctggaggagcggcagattgcctacgtctgccgagaggcactgaaggggctccaccacctgcattctcaggggaagatccacagagacatcaagggagccaaccttctcctcactctccagggagatgtcaaactggctgactttggggtgtcaggcgagctgacagcgtctgtggccaagaggaggtctttcattgggactccctactggatggctcccgaggtggctgctgtggagcgcaaaggtggctacaatgagctatgtgacgtctgggccctgggcatcactgccattgagctgggcgagctgcagccccctctgttccacctgcaccccatgagggccctgatgctcatgtcgaagagcagcttccagccgcccaaactgagagataagactcgctggacccagaatttccaccactttctcaaactggccctgaccaagaatcctaagaagaggccgacagcagagaagctcctgcagcacccgttcacgactcagcagctccctcgggccctcctcacacagctgctggacaaagccagtgaccctcatctggggaccccctcccctgaggactgtgagctggagacctatgacatgtttccagacaccattcactcccgggggcagcacggcccagccgagaggaccccctcggagatccagtttcaccaggtgaaatttggcgccccacgcaggaaggaaactgacccactgaatgagccgtgggaggaagagtggacactactgggaaaggaagagttgagtgggagcctgctgcagtcggtccaggaggccctggaggaaaggagtctgactattcggtcagcctcagaattccaggagctggactccccagacgataccatgggaaccatcaagcgggccccgttcctagggccactccccactgaccctccagcagaggagcctctgtccagtcccccaggaaccctgcccccacctccttcaggccccaacagctccccactgctgcccacggcctgggccaccatgaagcagcgggaggatcctgagaggtcatcctgccacgggctccccccaactcccaaggtgcatatgggcgcctgcttctccaaggtcttcaatggctgccccctgcggatccacgctgctgtcacctggattcaccctgttactcgggaccagttcctggtggtaggggccgaggaaggcatctacacactcaacctgcatgaactgcatgaggatacgctggagaagctgatttcacatcgctgctcctggctctactgcgtgaacaacgtgctgctgtcactctcagggaaatccacgcacatctgggcccatgacctcccaggcctgtttgagcagcggaggctacagcaacaggttcccctctccatccccaccaaccgcctcacccagcgcatcatccccaggcgctttgctctgtccaccaagattcctgacaccaaaggctgcttgcagtgtcgtgtggtgcggaacccctacacgggtgccaccttcctgctggccgccctgcccaccagcctgctcctgctgcagtggtatgagccgctgcagaagtttctgctgctgaagaacttctccagccctctgcccagcccagctgggatgctggagccgctggtgctggatgggaaggagctgccgcaggtgtgtgttggggccgaggggcctgaggggcccggctgccgcgtcctgttccatgtcctgcccctggaggctggcctgacgcccgacatcctcatcccacctgaggggatcccaggctcggcccagcaggtgatccaggtggacagggacacaatcctagtcagctttgaacgctgtgtgaggattgtcaacatgcagggcgagcccacggccacactggcacctgagctgacctttgatttccccatcgagactgtggtgtgcctgcaggacagtgtgctggccttctggagccatgggatgcaaggccgaagcctggataccaatgaggtgacccaggagatcacagatgaaacaaggatcttccgagtgcttggggcccacagagacatcatcctggagagcattcccactgacaacccagaggcgcacagcaacctctacatcctcacgggccaccagagcacctactaagagcagcgggcctgtccaggggctccccgccccaccccacgccttagctgcaggcccttttgggcaaaggggcccatcctagaccagaggagcccaggccctggccctgctggggctgaaggtcagaagtaatcctgagaaatgtttcaggcctggggagggaggggagcccccgacgcctctgcaataactggaccagggggagctgctgtcactcccccatccccgaggcagcccagtccctagtgcccaaggcagggaccctgggcctgggccatccattccattttgttccacatttcctttctactctttctgccaagagcctgcccctgcatttgtcctgggaaacacggtatttaagagagaactatattggtattaaagctggtttgttttagtcctctggtccctctgggtagggggagtgaacccacctcatctcccgcctccttccctccaacacacgtttctgtgggcaccacagaagggcagggcccccagggttttggagaagccaggtagaggtgacaggaggccatggcccccagcagccttctaggggcactgtgccttcccctgcatccttgctcagaactgaccctcagctttgcagtttgagggctctgctgtagtttagcaccccaaggactcatgcagatggggggacctcaacaaagggactctcatccagggcacccttgccccacgtaggatct

SEQ ID NO: 155062 - DNA, 1175 bp, Homo sapiens
  Payload ID: 10482
  Gene Symbol: MAP4K2
  Gene Name: mitogen-activated protein kinase kinase kinase kinase 2
  ENST ID: ENST00000424945
  CDS Start-End: 1-434
tctcagggaaatccacgcacatctgggcccatgacctcccaggcctgtttgagcagcggaggctacagcaacaggttcccctctccatccccaccaaccgcctcacccagcgcatcatccccaggcgctttgctctgtccaccaagattcctgacaccaaaggctgcttgcagtgtcgtgtggtgcggaacccctacacgggtgccaccttcctgctggccgccctgcccaccagcctgctcctgctgcagtggtatgagccgctgcagaagtttctgctgctgaagaacttctccagccctctgcccagcccagctgggatgctggagccgctggtgctggatgggaaggagctgccgcaggtgtgtgttggggccgaggggcctgaggggcccggctgccgcgtcctgttccatgctcggcccagcaggtgatccaggtggacagggacacaatcctagtcagctttgaacgctgtgtgaggattgtcaacatgcagggcgagcccacggccacactggcacctgagctgacctttgatttccccatcgagactgtggtgtgcctgcaggacagtgtgctggccttctggagccatgggatgcaaggccgaagcctggataccaatgaggtgacccaggagatcacagatgaaacaaggatcttccgagtgcttggggcccacagagacatcatcctggagagcattcccactgacaacccagaggcgcacagcaacctctacatcctcacgggccaccagagcacctactaagagcagcgggcctgtccaggggctccccgccccaccccacgccttagctgcaggcccttttgggcaaaggggcccatcctagaccagaggagcccaggccctggccctgctggggctgaaggtcagaagtaatcctgagaaatgtttcaggcctggggagggaggggagcccccgacgcctctgcaataactggaccagggggagctgctgtcactcccccatccccgaggcagcccagtccctagtgcccaaggcagggaccctgggcctgggccatccattccattttgttccacatttcctttctactctttctgccaagagcctgcccctgcatttgtcctgggaaacacggtatttaagagagaactatattggtattaaagctggtttgtttta

SEQ ID NO: 155063 - DNA, 947 bp, Homo sapiens
  Payload ID: 10482
  Gene Symbol: MAP4K2
  Gene Name: mitogen-activated protein kinase kinase kinase kinase 2
  ENST ID: ENST00000439069
  CDS Start-End: 27-947
cctgccggcccgcccggcgccgggccatggcgctgctgcgggatgtgtcgctgcaggacccgcgggaccgcttcgagctgctgcagcgcgtgggggccgggacctatggcgacgtctacaaggcccgcgacacggtcacgtccgaactggccgccgtgaagatagtcaagctagacccaggggacgacatcagctccctccagcaggaaatcaccatcctgcgtgagtgccgccaccccaatgtggtggcctacattggcagctacctcaggaatgaccgcttgtggatctgcatggagttctgcggagggggctccctgcaggagatttaccatgccactgggcccctggaggagcggcagattgcctacgtctgccgagaggcactgaaggggctccaccacctgcattctcaggggaagatccacagagacatcaagggagccaaccttctcctcactctccagggagatgtcaaactggctgactttggggtgtcaggcgagctgacagcgtctgtggccaagaggaggtctttcattgggactccctactgggccctgatgctcatgtcgaagagcagcttccagccgcccaaactgagagataagactcgctggacccagaatttccaccactttctcaaactggccctgaccaagaatcctaagaagaggccgacagcagagaagctcctgcagcacccgttcacgactcagcagctccctcgggccctcctcacacagctgctggacaaagccagtgaccctcatctggggaccccctcccctgaggactgtgagctggagacctatgacatgtttccagacaccattcactcccgggggcagcacggcccagccgagaggaccccctcggagatccagtttcaccaggtgaaatttggcgccccacgcaggaaggaaactgacccactgaatgagccg

SEQ ID NO: 155064 - DNA, 469 bp, Homo sapiens
  Payload ID: 10482
  Gene Symbol: MAP4K2
  Gene Name: mitogen-activated protein kinase kinase kinase kinase 2
  ENST ID: ENST00000444560
  CDS Start-End: 79-255
cccgccccgccccgcgccgccccgcgccggctccgcagctcgcgcccgcccgcctgccggcccgcccggcgccgggccatggcgctgctgcgggatgtgtcgctgcaggacccgcgggaccgcttcgagctgctgcagcgcgtgggggccgggacctatggcgacgtctacaaggcccgcgacacggtcacgtccgaactggccgccgtgaagatagtcaagctagacccagcaggaaatcaccatcctgcgtgagtgccgccaccccaatgtggtggcctacattggcagctacctcaggaatgaccgcttgtggatctgcatggagttctgcggagggggctccctgcaggagatttaccatgccactgggcccctggaggagcggcagattgcctacgtctgccgagaggcactgaaggggctccaccacctgcattctcaggggaagatccacagagacatcaag

SEQ ID NO: 155065 - DNA, 2410 bp, Homo sapiens
  Payload ID: 10482
  Gene Symbol: MAP4K2
  Gene Name: mitogen-activated protein kinase kinase kinase kinase 2
  ENST ID: ENST00000433890
  CDS Start-End: 1-174
atggcgctgctgcgggatgtgtcgctgcaggacccgcgggaccgcttcgagctgctgcagcgcgtgggggccgggacctatggcgacgtctacaaggcccgcgacacggtcacgtccgaactggccgccgtgaagatagtcaagctagacccaggaaatcaccatcctgcgtgagtgccgccaccccaatgtggtggcctacattggcagctacctcaggaatgaccgcttgtggatctgcatggagttctgcggagggggctccctgcaggagatttaccatgccactgggcccctggaggagcggcagattgcctacgtctgccgagaggcactgaaggggctccaccacctgcattctcaggggaagatccacagagacatcaagggagccaaccttctcctcactctccagggagatgtcaaactggctgactttggggtgtcaggcgagctgacagcgtctgtggccaagaggaggtctttcattgggactccctactggatggctcccgaggtggctgctgtggagcgcaaaggtggctacaatgagctatgtgacgtctgggccctgggcatcactgccattgagctgggcgagctgcagccccctctgttccacctgcaccccatgagcttccagccgcccaaactgagagataagactcgctggacccagaatttccaccactttctcaaactggccctgaccaagaatcctaagaagaggccgacagcagagaagctcctgcagcacccgttcacgactcagcagctccctcgggccctcctcacacagctgctggacaaagccagtgaccctcatctggggaccccctcccctgaggactgtgagctggagacctatgacatgtttccagacaccattcactcccgggggcagcacggcccagccgagaggaccccctcggagatccagtttcaccaggtgaaatttggcgccccacgcaggaaggaaactgacccactgaatgagccgtgggaggaagagtggacactactgggaaaggaagagttgagtgggagcctgctgcagtcggtccaggaggccctggaggaaaggagtctgactattcggtcagcctcagaattccaggagctggactccccagacgataccatgggaaccatcaagcgggccccgttcctagggccactccccactgaccctccagcagaggagcctctgtccagtcccccaggaaccctgcccccacctccttcaggccccaacagctccccactgctgcccacggcctgggccaccatgaagcagcgggaggatcctgagaggtcatcctgccacgggctccccccaactcccaaggtgcatatgggcgcctgcttctccaaggtcttcaatggctgccccctgcggatccacgctgctgtcacctggattcaccctgttactcgggaccagttcctggtggtaggggccgaggaaggcatctacacactcaacctgcatgaactgcatgaggatacgctggagaagctgatttcacatcgctgctcctggctctactgcgtgaacaacgtgctgctgtcactctcagggaaatccacgcacatctgggcccatgacctcccaggcctgtttgagcagcggaggctacagcaacaggttcccctctccatccccaccaaccgcctcacccagcgcatcatccccaggcgctttgctctgtccaccaagattcctgacaccaaaggctgcttgcagtgtcgtgtggtgcggaacccctacacgggtgccaccttcctgctggccgccctgcccaccagcctgctcctgctgcagtggtatgagccgctgcagaagtttctgctgctgaagaacttctccagccctctgcccagcccagctgggatgctggagccgctggtgctggatgggaaggagctgccgcaggtgtgtgttggggccgaggggcctgaggggcccggctgccgcgtcctgttccatgtcctgcccctggaggctggcctgacgcccgacatcctcatcccacctgaggggatcccaggctcggcccagcaggtgatccaggtggacagggacacaatcctagtcagctttgaacgctgtgtgaggattgtcaacatgcagggcgagcccacggccacactggcacctgagctgacctttgatttccccatcgagactgtggtgtgcctgcaggacagtgtgctggccttctggagccatgggatgcaaggccgaagcctggataccaatgaggtgacccaggagatcacagatgaaacaaggatcttccgagtgcttggggcccacagagacatcatcctggagagcattcccactgacaacccagaggcgcacagcaacctctacatcctcacgggccaccagagcacctactaa

SEQ ID NO: 155066 - DNA, 4362 bp, Homo sapiens
  Payload ID: 10483
  Gene Symbol: MAP4K3
  Gene Name: mitogen-activated protein kinase kinase kinase kinase 3
  Uniprot ID: Q8IVH8
  ENST ID: ENST00000263881
  CDS Start-End: 326-3010
aaggggagggggaggagcggcgaaagcggaagccatgttggagtttcaccccgagcgaggggctgcgagggttctcctctccttgtgggtgtgaccaggttcggcgcggcggcgggccgcggggggcggggacgattggccgcttgtcgtcgtccgcagcggcgtgaggggagcggcggcggcggcggcggccgcagcgtggagccgggtgattgtgaccgccgggggagccgggagccggccgcggcgccctctctccgtgtggccccctgagcggcccccctcccctgcccgggagggaggcggggggcacctggggcccgccatgaaccccggcttcgatttgtcccgccggaacccgcaggaggacttcgagctgattcagcgcatcggcagcggcacctacggcgacgtctacaaggcacggaatgttaacactggtgaattagcagcaattaaagtaataaaattggaaccaggagaagactttgcagttgtgcagcaagaaattattatgatgaaagactgtaaacacccaaatattgttgcttattttggaagctatctcaggcgagataagctttggatttgcatggagttttgtggaggtggttctttacaggatatttatcacgtaactggacctctgtcagaactgcaaattgcatatgttagcagagaaacactgcagggattatattatcttcacagtaaaggaaaaatgcacagagatataaagggagctaacattctattaacggataatggtcatgtgaaattggctgattttggagtatctgcacagataacagctacaattgccaaacggaagtctttcattggcacaccatattggatggctccagaagttgcagctgttgagaggaaggggggttacaatcaactctgtgatctctgggcagtgggaatcactgccatagaacttgcagagcttcagcctcctatgtttgacttacacccaatgagagcattatttctaatgacaaaaagcaattttcagcctcctaaactaaaggataaaatgaaatggtcaaatagttttcatcactttgtgaaaatggcacttaccaaaaatccgaaaaaaagacctactgctgaaaaattattacagcatccttttgtaacacaacatttgacacggtctttggcaatcgagctgttggataaagtaaataatccagatcattccacttaccatgatttcgatgatgatgatcctgagcctcttgttgctgtaccacatagaattcactcaacaagtagaaacgtgagagaagaaaaaacacgctcagagataacctttggccaagtgaaatttgatccacccttaagaaaggagacagaaccacatcatgaacttcccgacagtgatggttttttggacagttcagaagaaatatactacactgcaagatctaatctggatctgcaactggaatatggacaaggacaccaaggtggttactttttaggtgcaaacaagagtcttctcaagtctgttgaagaagaattgcatcagcgaggacacgtcgcacatttagaagatgatgaaggagatgatgatgaatctaaacactcaactctgaaagcaaaaattccacctcctttgccaccaaagcctaagtctatcttcataccacaggaaatgcattctactgaggatgaaaatcaaggaacaatcaagagatgtcccatgtcagggagcccagcaaagccatcccaagttccacctagaccaccacctcccagattacccccacacaaacctgttgccttaggaaatggaatgagctccttccagttaaatggtgaacgagatggctcattatgtcaacaacagaatgaacatagaggcacaaacctttcaagaaaagaaaagaaagatgtaccaaagcctattagtaatggtcttcctccaacacctaaagtgcatatgggtgcatgtttttcaaaagtttttaatgggtgtcccttgaaaattcactgtgcatcatcatggataaacccagatacaagagatcagtacttgatatttggtgccgaagaagggatttataccctcaatcttaatgaacttcatgaaacatcaatggaacagctattccctcgaaggtgtacatggttgtatgtaatgaacaattgcttgctatcaatatctggtaaagcttctcagctttattcccataatttaccagggctttttgattatgcaagacaaatgcaaaagttacctgttgctattccagcacacaaactccctgacagaatactgccaaggaaattttctgtatcagcaaaaatccctgaaaccaaatggtgccagaagtgttgtgttgtaagaaatccttacacgggccataaatacctatgtggagcacttcagactagcattgttctattagaatgggttgaaccaatgcagaaatttatgttaattaagcacatagattttcctataccatgtccacttagaatgtttgaaatgctggtagttcctgaacaggagtaccctttagtttgtgttggtgtcagtagaggtagagacttcaaccaagtggttcgatttgagacggtcaatccaaattctacctcttcatggtttacagaatcagataccccacagacaaatgttactcatgtaacccaactggagagagataccatccttgtatgcttggactgttgtataaaaatagtaaatctccaaggaagattaaaatctagcaggaaattgtcatcagaactcacctttgatttccagattgaatcaatagtgtgcctacaagacagtgtgctagctttctggaaacatggaatgcaaggtagaagttttagatctaatgaggtaacacaagaaatttcagatagcacaagaattttcaggctgcttggatctgacagggtcgtggttttggaaagtaggccaactgataaccccacagcaaatagcaatttgtacatcctggcgggtcatgaaaacagttactgagaattgttgtgctttgacagttaactctagaaagaaagaacactaccactgcaacattaatggatgcttgaagctgtacaaaagctgcagtaacctgtcttcagttactttgtaatttattgtggcatgagataagatggggaaaattttgttttaagtggtatggatatatttagcatattgaaccacacaagtgcttaattcattgttatgtaatctttgtacatataggcagtattttttctgtgaaacttcatattgctgaagacatacactaagaatttatgtagataatgtacttttatgagatgtacaagtaagtgtcttatctgtacagatgtaaatgttgatgaaaatgcaattggggttaatattttaagaattctttagtatattcttgggtgtggctatattacaaaatgggatgctggcaatgaaacaatacatttaacactattgtatttttattatatgtaatttagtaatatgaatataaatcttgtaacttttaaaattgtaatggaggctgtaatcattttataatctttttaattttaatgcaagtacactggtgtttatatttgcacaaagtattgatatgtgatgtattaagtcacaaaagtaagctgtgacattgtctataagcatttggctccacaaatgtatttggattgttttctatgtgaagcaaaccaattataattaaccacatgttgtagtaactggtctttttatatttaagcagaatcctgtaagattgcttgtctttgcttaaaaacaatacctttgaacatttttgaatcacagaatagcggtaccatgatagaatactgcaattgtggtcagaattacagtatgcacaaagaattaattagcattattaaagagtcctcactaaacatttcatatgatcacactgaagaactgtaacattccatagagtgaagtggttcaaatttctcttggaatttttacttttgttggccttattttatgatccttttcatatttcttttgacttagagtattaatacatggccaaaataatttagttactacctcatacaaacaatataatggttactacacatcacaggaacttagttttggtttaagtcatttttgattgcttttttccaatggaatatgtatataccaggttttagcaaaatgcacacttttggctctttttggtatatgttctttatattttaatgtgagtatatacactaagaacaaactaaattgtgatttatgatcttcatttattttaatgataatggttttaaaatatgttcctgattgtacatattgtaaaataaacatgttttttaacatgctgttgtatagta

SEQ ID NO: 155067 - DNA, 4271 bp, Homo sapiens
  Payload ID: 10483
  Gene Symbol: MAP4K3
  Gene Name: mitogen-activated protein kinase kinase kinase kinase 3
  Uniprot ID: Q8IVH8
  ENST ID: ENST00000341681
  CDS Start-End: 315-2936
gaggagcggcgaaagcggaagccatgttggagtttcaccccgagcgaggggctgcgagggttctcctctccttgtgggtgtgaccaggttcggcgcggcggcgggccgcggggggcggggacgattggccgcttgtcgtcgtccgcagcggcgtgaggggagcggcggcggcggcggcggccgcagcgtggagccgggtgattgtgaccgccgggggagccgggagccggccgcggcgccctctctccgtgtggccccctgagcggcccccctcccctgcccgggagggaggcggggggcacctggggcccgccatgaaccccggcttcgatttgtcccgccggaacccgcaggaggacttcgagctgattcagcgcatcggcagcggcacctacggcgacgtctacaaggcacggaatgttaacactggtgaattagcagcaattaaagtaataaaattggaaccaggagaagactttgcagttgtgcagcaagaaattattatgatgaaagactgtaaacacccaaatattgttgcttattttggaagctatctcaggcgagataagctttggatttgcatggagttttgtggaggtggttctttacaggatatttatcacgtaactggacctctgtcagaactgcaaattgcatatgttagcagagaaacactgcagggattatattatcttcacagtaaaggaaaaatgcacagagatataaagggagctaacattctattaacggataatggtcatgtgaaattggctgattttggagtatctgcacagataacagctacaattgccaaacggaagtctttcattggcacaccatattggatggctccagaagttgcagctgttgagaggaaggggggttacaatcaactctgtgatctctgggcagtgggaatcactgccatagaacttgcagagcttcagcctcctatgtttgacttacacccaatgagagcattatttctaatgacaaaaagcaattttcagcctcctaaactaaaggataaaatgaaatggtcaaatagttttcatcactttgtgaaaatggcacttaccaaaaatccgaaaaaaagacctactgctgaaaaattattacagcatccttttgtaacacaacatttgacacggtctttggcaatcgagctgttggataaagtaaataatccagatcattccacttaccatgatttcgatgatgatgatcctgagcctcttgttgctgtaccacatagaattcactcaacaagtagaaacgtgagagaagaaaaaacacgctcagagataacctttggccaagtgaaatttgatccacccttaagaaaggagacagaaccacatcatgaacttgatctgcaactggaatatggacaaggacaccaaggtggttactttttaggtgcaaacaagagtcttctcaagtctgttgaagaagaattgcatcagcgaggacacgtcgcacatttagaagatgatgaaggagatgatgatgaatctaaacactcaactctgaaagcaaaaattccacctcctttgccaccaaagcctaagtctatcttcataccacaggaaatgcattctactgaggatgaaaatcaaggaacaatcaagagatgtcccatgtcagggagcccagcaaagccatcccaagttccacctagaccaccacctcccagattacccccacacaaacctgttgccttaggaaatggaatgagctccttccagttaaatggtgaacgagatggctcattatgtcaacaacagaatgaacatagaggcacaaacctttcaagaaaagaaaagaaagatgtaccaaagcctattagtaatggtcttcctccaacacctaaagtgcatatgggtgcatgtttttcaaaagtttttaatgggtgtcccttgaaaattcactgtgcatcatcatggataaacccagatacaagagatcagtacttgatatttggtgccgaagaagggatttataccctcaatcttaatgaacttcatgaaacatcaatggaacagctattccctcgaaggtgtacatggttgtatgtaatgaacaattgcttgctatcaatatctggtaaagcttctcagctttattcccataatttaccagggctttttgattatgcaagacaaatgcaaaagttacctgttgctattccagcacacaaactccctgacagaatactgccaaggaaattttctgtatcagcaaaaatccctgaaaccaaatggtgccagaagtgttgtgttgtaagaaatccttacacgggccataaatacctatgtggagcacttcagactagcattgttctattagaatgggttgaaccaatgcagaaatttatgttaattaagcacatagattttcctataccatgtccacttagaatgtttgaaatgctggtagttcctgaacaggagtaccctttagtttgtgttggtgtcagtagaggtagagacttcaaccaagtggttcgatttgagacggtcaatccaaattctacctcttcatggtttacagaatcagataccccacagacaaatgttactcatgtaacccaactggagagagataccatccttgtatgcttggactgttgtataaaaatagtaaatctccaaggaagattaaaatctagcaggaaattgtcatcagaactcacctttgatttccagattgaatcaatagtgtgcctacaagacagtgtgctagctttctggaaacatggaatgcaaggtagaagttttagatctaatgaggtaacacaagaaatttcagatagcacaagaattttcaggctgcttggatctgacagggtcgtggttttggaaagtaggccaactgataaccccacagcaaatagcaatttgtacatcctggcgggtcatgaaaacagttactgagaattgttgtgctttgacagttaactctagaaagaaagaacactaccactgcaacattaatggatgcttgaagctgtacaaaagctgcagtaacctgtcttcagttactttgtaatttattgtggcatgagataagatggggaaaattttgttttaagtggtatggatatatttagcatattgaaccacacaagtgcttaattcattgttatgtaatctttgtacatataggcagtattttttctgtgaaacttcatattgctgaagacatacactaagaatttatgtagataatgtacttttatgagatgtacaagtaagtgtcttatctgtacagatgtaaatgttgatgaaaatgcaattggggttaatattttaagaattctttagtatattcttgggtgtggctatattacaaaatgggatgctggcaatgaaacaatacatttaacactattgtatttttattatatgtaatttagtaatatgaatataaatcttgtaacttttaaaattgtaatggaggctgtaatcattttataatctttttaattttaatgcaagtacactggtgtttatatttgcacaaagtattgatatgtgatgtattaagtcacaaaagtaagctgtgacattgtctataagcatttggctccacaaatgtatttggattgttttctatgtgaagcaaaccaattataattaaccacatgttgtagtaactggtctttttatatttaagcagaatcctgtaagattgcttgtctttgcttaaaaacaatacctttgaacatttttgaatcacagaatagcggtaccatgatagaatactgcaattgtggtcagaattacagtatgcacaaagaattaattagcattattaaagagtcctcactaaacatttcatatgatcacactgaagaactgtaacattccatagagtgaagtggttcaaatttctcttggaatttttacttttgttggccttattttatgatccttttcatatttcttttgacttagagtattaatacatggccaaaataatttagttactacctcatacaaacaatataatggttactacacatcacaggaacttagttttggtttaagtcatttttgattgcttttttccaatggaatatgtatataccaggttttagcaaaatgcacacttttggctctttttggtatatgttctttatattttaatgtgagtatatacactaagaacaaactaaattgtgatttatgatcttcatttattttaatgataatggttttaaaatatgttcctgattgtacatattgtaaaataaacatgttttttaa

SEQ ID NO: 155068 - DNA, 558 bp, Homo sapiens
  Payload ID: 10483
  Gene Symbol: MAP4K3
  Gene Name: mitogen-activated protein kinase kinase kinase kinase 3
  ENST ID: ENST00000414968
  CDS Start-End: 1-432
tttcagcctcctaaactaaaggataaaatgaaatggtcaaatagttttcatcactttgtgaaaatggcacttaccaaaaatccgaaaaaaagacctactgctgaaaaattattacagcatccttttgtaacacaacatttgacacggtctttggcaatcgagctgttggataaagtaaataatccagatcattccacttaccatgatttcgatgatgatgatcctgagcctcttgttgctgtaccacatagaattcactcaacaagtagaaacgtgagagaagaaaaaacacgctcagagataacctttggccaagtgaaatttgatccacccttaagaaaggagacagaaccacatcatgaacttcccgacagtgatggttttttggacagttcagaagaaatatactacactgcaagatctaatctgtgaactgtatcaattctattgacttcctgctgctttctcatcaggatctgcaactggaatatggacaaggacaccaaggtggttactttttaggtgcaaacaagagtcttctcaagtctgttgaagaag

SEQ ID NO: 155069 - DNA, 689 bp, Homo sapiens
  Payload ID: 10483
  Gene Symbol: MAP4K3
  Gene Name: mitogen-activated protein kinase kinase kinase kinase 3
  ENST ID: ENST00000429397
  CDS Start-End: 161-556
gaggggagcggcggcggcggcggcggccgcagcgtggagccgggtgattgtgaccgccgggggagccgggagccggccgcggcgccctctctccgtgtggccccctgagcggcccccctcccctgcccgggagggaggcggggggcacctggggcccgccatgaaccccggcttcgatttgtcccgccggaacccgcaggaggacttcgagctgattcagcgcatcggcagcggcacctacggcgacgtctacaaggcacggaatgttaacactggtgaattagcagcaattaaagtaataaaattggaaccaggagaagactttgcagttgtgcagcaagaaattattatgatgaaagactgtaaacacccaaatattgttgcttattttggaagctatctcaggcgagataagctttggatttgcatggagttttgtggaggtggttctttacaggatatttatcacggatggctccagaagttgcagctgttgagaggaaggggggttacaatcaactctgtgatctctgggcagtgggaatcactgccatagaacttgcagagcttcagcctcctatgtttgacttacacccaatgagagcattatttctaatgacaaaaagcaattttcagcctcctaaactaaaggataaaatgaaatggtcaaatagttttcatcactttgt

SEQ ID NO: 155070 - DNA, 500 bp, Homo sapiens
  Payload ID: 10483
  Gene Symbol: MAP4K3
  Gene Name: mitogen-activated protein kinase kinase kinase kinase 3
  ENST ID: ENST00000437968
  CDS Start-End: 242-376
gtgggtgtgaccaggttcggcgcggcggcgggccgcggggggcggggacgattggccgcttgtcgtcgtccgcagcggcgtgaggggagcggcggcggcggcggcggccgcagcgtggagccgggtgattgtgaccgccgggggagccgggagccggccgcggcgccctctctccgtgtggccccctgagcggcccccctcccctgcccgggagggaggcggggggcacctggggcccgccatgaaccccggcttcgatttgtcccgccggaacccgcaggaggacttcgagctgattcagcgcatcggcagcggcacctacggcgacgtctacaaggagaagactttgcagttgtgcagcaagaaattattatgatgaaagactgtaaacacccaaatattgttgcttattttggaagctatctcaggcgagataagctttggatttgcatggagttttgtggaggtggttctttacaggatatttatcacgtaactgg

SEQ ID NO: 155071 - DNA, 3924 bp, Homo sapiens
  Payload ID: 10483
  Gene Symbol: MAP4K3
  Gene Name: mitogen-activated protein kinase kinase kinase kinase 3
  ENST ID: ENST00000437545
  CDS Start-End: 152-2584
agttcacatttgtctgctcttccatagtagaatcacccatactctgaatttcttctcagcacggaatgttaacactggtgaattagcagcaattaaagtaataaaattggaaccaggagaagactttgcagttgtgcagcaagaaattattatgatgaaagactgtaaacacccaaatattgttgcttattttggaagctatctcaggcgagataagctttggatttgcatggagttttgtggaggtggttctttacaggatatttatcacgtaactggacctctgtcagaactgcaaattgcatatgttagcagagaaacactgcagggattatattatcttcacagtaaaggaaaaatgcacagagatataaagggagctaacattctattaacggataatggtcatgtgaaattggctgattttggagtatctgcacagataacagctacaattgccaaacggaagtctttcattggcacaccatattggatggctccagaagttgcagctgttgagaggaaggggggttacaatcaactctgtgatctctgggcagtgggaatcactgccatagaacttgcagagcttcagcctcctatgtttgacttacacccaatgagagcattatttctaatgacaaaaagcaattttcagcctcctaaactaaaggataaaatgaaatggtcaaatagttttcatcactttgtgaaaatggcacttaccaaaaatccgaaaaaaagacctactgctgaaaaattattacagcatccttttgtaacacaacatttgacacggtctttggcaatcgagctgttggataaagtaaataatccagatcattccacttaccatgatttcgatgatgatgatcctgagcctcttgttgctgtaccacatagaattcactcaacaagtagaaacgtgagagaagaaaaaacacgctcagagataacctttggccaagtgaaatttgatccacccttaagaaaggagacagaaccacatcatgaacttgatctgcaactggaatatggacaaggacaccaaggtggttactttttaggtgcaaacaagagtcttctcaagtctgttgaagaagaattgcatcagcgaggacacgtcgcacatttagaagatgatgaaggagatgatgatgaatctaaacactcaactctgaaagcaaaaattccacctcctttgccaccaaagcctaagtctatcttcataccacaggaaatgcattctactgaggatgaaaatcaaggaacaatcaagagatgtcccatgtcagggagcccagcaaagccatcccaagttccacctagaccaccacctcccagattacccccacacaaacctgttgccttaggaaatggaatgagctccttccagttaaatggtgaacgagatggctcattatgtcaacaacagaatgaacatagaggcacaaacctttcaagaaaagaaaagaaagatgtaccaaagcctattagtaatggtcttcctccaacacctaaagtgcatatgggtgcatgtttttcaaaagtttttaatgggtgtcccttgaaaattcactgtgcatcatcatggataaacccagatacaagagatcagtacttgatatttggtgccgaagaagggatttataccctcaatcttaatgaacttcatgaaacatcaatggaacagctattccctcgaaggtgtacatggttgtatgtaatgaacaattgcttgctatcaatatctggtaaagcttctcagctttattcccataatttaccagggctttttgattatgcaagacaaatgcaaaagttacctgttgctattccagcacacaaactccctgacagaatactgccaaggaaattttctgtatcagcaaaaatccctgaaaccaaatggtgccagaagtgttgtgttgtaagaaatccttacacgggccataaatacctatgtggagcacttcagactagcattgttctattagaatgggttgaaccaatgcagaaatttatgttaattaagcacatagattttcctataccatgtccacttagaatgtttgaaatgctggtagttcctgaacaggagtaccctttagtttgtgttggtgtcagtagaggtagagacttcaaccaagtggttcgatttgagacggtcaatccaaattctacctcttcatggtttacagaatcagataccccacagacaaatgttactcatgtaacccaactggagagagataccatccttgtatgcttggactgttgtataaaaatagtaaatctccaaggaagattaaaatctagcaggaaattgtcatcagaactcacctttgatttccagattgaatcaatagtgtgcctacaagacagtgtgctagctttctggaaacatggaatgcaaggtagaagttttagatctaatgaggtaacacaagaaatttcagatagcacaagaattttcaggctgcttggatctgacagggtcgtggttttggaaagtaggccaactgataaccccacagcaaatagcaatttgtacatcctggcgggtcatgaaaacagttactgagaattgttgtgctttgacagttaactctagaaagaaagaacactaccactgcaacattaatggatgcttgaagctgtacaaaagctgcagtaacctgtcttcagttactttgtaatttattgtggcatgagataagatggggaaaattttgttttaagtggtatggatatatttagcatattgaaccacacaagtgcttaattcattgttatgtaatctttgtacatataggcagtattttttctgtgaaacttcatattgctgaagacatacactaagaatttatgtagataatgtacttttatgagatgtacaagtaagtgtcttatctgtacagatgtaaatgttgatgaaaatgcaattggggttaatattttaagaattctttagtatattcttgggtgtggctatattacaaaatgggatgctggcaatgaaacaatacatttaacactattgtatttttattatatgtaatttagtaatatgaatataaatcttgtaacttttaaaattgtaatggaggctgtaatcattttataatctttttaattttaatgcaagtacactggtgtttatatttgcacaaagtattgatatgtgatgtattaagtcacaaaagtaagctgtgacattgtctataagcatttggctccacaaatgtatttggattgttttctatgtgaagcaaaccaattataattaaccacatgttgtagtaactggtctttttatatttaagcagaatcctgtaagattgcttgtctttgcttaaaaacaatacctttgaacatttttgaatcacagaatagcggtaccatgatagaatactgcaattgtggtcagaattacagtatgcacaaagaattaattagcattattaaagagtcctcactaaacatttcatatgatcacactgaagaactgtaacattccatagagtgaagtggttcaaatttctcttggaatttttacttttgttggccttattttatgatccttttcatatttcttttgacttagagtattaatacatggccaaaataatttagttactacctcatacaaacaatataatggttactacacatcacaggaacttagttttggtttaagtcatttttgattgcttttttccaatggaatatgtatataccaggttttagcaaaatgcacacttttggctctttttggtatatgttctttatattttaatgtgagtatatacactaagaacaaactaaattgtgatttatgatcttcatttattttaatgataatggttttaaaatatgttcctgattgtacatattgtaaaataaacatgttttttaacatgc

SEQ ID NO: 155072 - DNA, 407 bp, Homo sapiens
  Payload ID: 10483
  Gene Symbol: MAP4K3
  Gene Name: mitogen-activated protein kinase kinase kinase kinase 3
  ENST ID: ENST00000484274
  CDS Start-End: 79-357
cgccctctctccgtgtggccccctgagcggcccccctcccctgcccgggagggaggcggggggcacctggggcccgccatgaaccccggcttcgatttgtcccgccggaacccgcaggaggacttcgagctgattcagcgcatcggcagcggcacctacggcgacgtctacaaggcacggaatgttaacactggtgaattagcagcaattaaagtaataaaattggaaccaggagaagactttgcagttgtgcagcaagaaattattatgatgaaagactgtaaacacccaaatattgttgcttattttggaagctatctcaggtatactgtttgtttcccttttgaaaagcaataatgatttcatcacctaatgcattaaacaaaataaagttagttttaatacca

SEQ ID NO: 155073 - DNA, 7316 bp, Homo sapiens
  Payload ID: 10484
  Gene Symbol: MAP4K4
  Gene Name: mitogen-activated protein kinase kinase kinase kinase 4
  ENST ID: ENST00000350198
  CDS Start-End: 379-3876
gctcactcgctcaactcggcgccgccgcggccccacgctccgggcccgtcctcgaggcgcgcggcgcggggcgcgggcgccggggcctgaggcggcgggcgacgcccgggggcctgacggccggccccgcgccatggtgtgagcgccgccgcccgtgcacgctccgtccgccctccgcgcggcccggccggcagagagccccgagcggcccgagagcgcagccgagcccgccgccgccgcccgcggccccgcgaggagagtaccgggccggctcggctgccgcgcgaggagcgcggtcggcggcctggtctgcggctgagatacacagagcgacagagacatttattgttatttgttttttggtggcaaaaagggaaaatggcgaacgactcccctgcaaaaagtctggtggacatcgacctctcctccctgcgggatcctgctgggatttttgagctggtggaagtggttggaaatggcacctatggacaagtctataagggtcgacatgttaaaacgggtcagttggcagccatcaaagttatggatgtcactgaggatgaagaggaagaaatcaaactggagataaatatgctaaagaaatactctcatcacagaaacattgcaacatattatggtgctttcatcaaaaagagccctccaggacatgatgaccaactctggcttgttatggagttctgtggggctgggtccattacagaccttgtgaagaacaccaaagggaacacactcaaagaagactggatcgcttacatctccagagaaatcctgaggggactggcacatcttcacattcatcatgtgattcaccgggatatcaagggccagaatgtgttgctgactgagaatgcagaggtgaaacttgttgactttggtgtgagtgctcagctggacaggactgtggggcggagaaatacgttcataggcactccctactggatggctcctgaggtcatcgcctgtgatgagaacccagatgccacctatgattacagaagtgatctttggtcttgtggcattacagccattgagatggcagaaggtgctccccctctctgtgacatgcatccaatgagagcactgtttctcattcccagaaaccctcctccccggctgaagtcaaaaaaatggtcgaagaagttttttagttttatagaagggtgcctggtgaagaattacatgcagcggccctctacagagcagcttttgaaacatccttttataagggatcagccaaatgaaaggcaagttagaatccagcttaaggatcatatagatcgtaccaggaagaagagaggcgagaaagatgaaactgagtatgagtacagtgggagtgaggaagaagaggaggaagtgcctgaacaggaaggagagccaagttccattgtgaacgtgcctggtgagtctactcttcgccgagatttcctgagactgcagcaggagaacaaggaacgttccgaggctcttcggagacaacagttactacaggagcaacagctccgggagcaggaagaatataaaaggcaactgctggcagagagacagaagcggattgagcagcagaaagaacagaggcgacggctagaagagcaacaaaggagagagcgggaagctagaaggcagcaggaacgtgaacagcgaaggagagaacaagaagaaaagaggcgtctagaggagttggagagaaggcgcaaagaagaagaggagaggagacgggcagaagaagaaaagaggagagttgaaagagaacaggagtatatcaggcgacagctagaagaggagcagcggcacttggaagtccttcagcagcagctgctccaggagcaggccatgttactgcatgaccataggaggccgcacccgcagcactcgcagcagccgccaccaccgcagcaggaaaggagcaagccaagcttccatgctcccgagcccaaagcccactacgagcctgctgaccgagcgcgagaggttcctgtgagaacaacatctcgctcccctgttctgtcccgtcgagattccccactgcagggcagtgggcagcagaatagccaggcaggacagagaaactccaccagtattgagcccaggcttctgtgggagagagtggagaagctggtgcccagacctggcagtggcagctcctcagggtccagcaactcaggatcccagcccgggtctcaccctgggtctcagagtggctccggggaacgcttcagagtgagatcatcatccaagtctgaaggctctccatctcagcgcctggaaaatgcagtgaaaaaacctgaagataaaaaggaagttttcagacccctcaagcctgctgtaaggattgatctgaccgcactggccaaagagcttcgagcagtggaagatgtacggccacctcacaaagtaacggactactcctcatccagtgaggagtcggggacgacggatgaggaggacgacgatgtggagcaggaaggggctgacgagtccacctcaggaccagaggacaccagagcagcgtcatctctgaatttgagcaatggtgaaacggaatctgtgaaaaccatgattgtccatgatgatgtagaaagtgagccggccatgaccccatccaaggagggcactctaatcgtccgccagactcagtccgctagtagcacactccagaaacacaaatcttcctcctcctttacaccttttatagaccccagattactacagatttctccatctagcggaacaacagtgacatctgtggtgggattttcctgtgatgggatgagaccagaagccataaggcaagatcctacccggaaaggctcagtggtcaatgtgaatcctaccaacactaggccacagagtgacaccccggagattcgtaaatacaagaagaggtttaactctgagattctgtgtgctgccttatggggagtgaatttgctagtgggtacagagagtggcctgatgctgctggacagaagtggccaagggaaggtctatcctcttatcaaccgaagacgatttcaacaaatggacgtacttgagggcttgaatgtcttggtgacaatatctggcaaaaaggataagttacgtgtctactatttgtcctggttaagaaataaaatacttcacaatgatccagaagttgagaagaagcagggatggacaaccgtaggggatttggaaggatgtgtacattataaagttgtaaaatatgaaagaatcaaatttctggtgattgctttgaagagttctgtggaagtctatgcgtgggcaccaaagccatatcacaaatttatggcctttaagtcatttggagaattggtacataagccattactggtggatctcactgttgaggaaggccagaggttgaaagtgatctatggatcctgtgctggattccatgctgttgatgtggattcaggatcagtctatgacatttatctaccaacacatgtaagaaagaacccacactctatgatccagtgtagcatcaaaccccatgcaatcatcatcctccccaatacagatggaatggagcttctggtgtgctatgaagatgagggggtttatgtaaacacatatggaaggatcaccaaggatgtagttctacagtggggagagatgcctacatcagtagcatatattcgatccaatcagacaatgggctggggagagaaggccatagagatccgatctgtggaaactggtcacttggatggtgtgttcatgcacaaaagggctcaaagactaaaattcttgtgtgaacgcaatgacaaggtgttctttgcctctgttcggtctggtggcagcagtcaggtttatttcatgaccttaggcaggacttctcttctgagctggtagaagcagtgtgatccagggattactggcctccagagtcttcaagatcctgagaacttggaattccttgtaactggagctcggagctgcaccgagggcaaccaggacagctgtgtgtgcagacctcatgtgttgggttctctcccctccttcctgttcctcttatataccagtttatccccattctttttttttttcttactccaaaataaatcaaggctgcaatgcagctggtgctgttcagattctaccatcaggtgctataagtgtttgggattgagcatcatactggaaagcaaacacctttcctccagctccagaattccttgtctctgaatgactctgtcttgtgggtgtctgacagtggcgacgatgaacatgccgttggttttattggcagtgggcacaaggaggtgagaagtggtggtaaaaggagcggagtgctgaagcagagagcagatttaatatagtaacattaacagtgtatttaattgacatttcttttttgtaatgtgacgatatgtggacaaagaagaagatgcaggtttaagaagttaatatttataaaatgtgaaagacacagttactaggataacttttttgtgggtggggcttgggagatggggtggggtgggttaaggggtcccattttgtttctttggatttggggtgggggtcctggccaagaactcagtcatttttctgtgtaccaggttgcctaaatcatgtgcagatggttctaaaaaaaaaaaaaaaaaaaaaaaaaaaaggaaaaaaaaaaagaaaaagaaaacgtgtgcattttgtataatggccagaactttgtcgtgtgacagtattagcactgcctcagttaaaggtttaatttttgtttaaacctagacgtgcaacaaaagttttaccacagtctgcacttgcagaagaaagaaaaaaattcaaaccacatgtttattttttttttgcctacctcattgttcttaatgcattgagaggtgatttagtttatatgtttttggaagaaaccattaatgtttaatttaatcttaataccaaaacgaccagattgaagtttgacttttattgtcacaaatcagcaggcacaagaactgtccatgaagatgggaaatagccttaaggctgatgcagtttacttacaagtttagaaaccagaatgctttgtttttaccagattcaccattagaggttgatggggcaactgcagcccatgacacaagatctcattgttctcgatgtagaggggttggtagcagacaggtggttacattagaatagtcacacaaactgttcagtgttgcaggaaccttttcttgggggtgggggagtttcccttttctaaaaatgcaatgcactaaaactattttaagaatgtagttaattctgcttattcataaagtgggcatcttctgtgttttaggtgtaatatcgaagtcctggcttttctcgttttctcacttgctctcttgttctctgtttttttaaaccaattttactttatgaatatattcatgacatttgtaataaatgtcttgagaaagaatttgtttcatggcttcatggtcatcactcaagctcccgtaaggatattaccgtctcaggaaaggatcaggactccatgtcacagtcctgccatcttactttcctcttgtcgagttctgagtggaaataactgcattatggctgctttaacctcagtcatcaaaagaaacttgctgttttttaggcttgatctttttcctttgtggttaattttcctgtatattgtgaaaatgggggattttccctctgctcccacccacctaaacacagcagccatttgtacctgtttgcttcccatcccacttggcacccactctgacctcttgtcagtttcctgttcctggttccatctttttgaaaaaggccctcctttgagctacaaacatctggtaagacaagtacatccactcatgaatgcagacacagcagctggtggttttgtgtatacctgtaaagacaagctgagaagcttactttttggggaagtaaaagaagatggaaatggatgtttcatttgtatgagtttggagcagtgctgaaggccaaagccgcctactggtttgtagttaacctagagaaggttgaaaaattaatcctacctttaaagggatttgaggtaggctggattccatcgccacaggactttagttagaattaaattcctgcttgtaatttatatccatgtttaggcttttcataagatgaaacatgccacagtgaacacactcgtgtacatatcaagagaagaaggaaaggcacaggtggagaacagtaaaaggtgggcagatgtctttgaagaaatgctcaatgtctgatgctaagtgggagaaggcagagaacaaaggatgtggcataatggtcttaacattatccaaagacttgaagctccatgtctgtaagtcaaatgttacacaaaaaaaaatgcaaatggtgtttcattggaattaccaagtgcttagaacttgctggctttcccataggtggtaaaggggtctgagctcacaccgagttgtgcttggcttgcttgtgcagctccaggcacccggtgggcactctggtggtgtttgtggtgaactgaattgaatccattgttgggcttaagttactgaaattggaacaccctttgtccttctcggcgggggcttcctggtctgtgctttacttggcttttttccttcccgtcttagcctcacccccttgtcaaccagattgagttgctatagcttgatgcagggacccagtgaagtttctccgttaaagattgggagtcgtcgaaatgtttagattcttttaggaaaggaattattttccccccttttacagggtagtaacttctccacagaagtgccaatatggcaaaattacacaagaaaacagtattgcaatgacaccattacataaggaacattgaactgttagaggagtgctcttccaaacaaaacaaaaatgtctctaggtttagtcagagctttcacaagtaataacctttctgtattaaaatcagagtaaccctttctgtattgagtgcagtgttttttactcttttctcatgcacatgttacgttggagaaaatgtttacaaaaatggttttgttacactaatgcgcaccacatatttatggtttattttaagtgactttttatgggttatttaggttttcgtcttagttgtagcacacttaccctaattttgccaattattaatttgctaaatagtaatacaaatgacaaactgcattaaatttactaattataaaagctgcaaagcagactggtggcaagtacacagcccttttttttgcagtgctaacttgtctactgtgtattatgaaaattactgttgtccccccacccttttttccttaaataaagtaaaaatgacacct

SEQ ID NO: 155074 - DNA, 6624 bp, Homo sapiens
  Payload ID: 10484
  Gene Symbol: MAP4K4
  Gene Name: mitogen-activated protein kinase kinase kinase kinase 4
  ENST ID: ENST00000302217
  CDS Start-End: 221-3184
cacagagcgacagagacatttattgttatttgttttttggtggcaaaaagggaaaatggcgaacgactcccctgcaaaaagtctggtggacatcgacctctcctccctgcgggatcctgctgggatttttgagctggtggaagtggttggaaatggcacctatggacaagtctataagggtcgacatgttaaaacgggtcagttggcagccatcaaagttatggatgtcactgaggatgaagaggaagaaatcaaactggagataaatatgctaaagaaatactctcatcacagaaacattgcaacatattatggtgctttcatcaaaaagagccctccaggacatgatgaccaactctggcttgttatggagttctgtggggctgggtccattacagaccttgtgaagaacaccaaagggaacacactcaaagaagactggatcgcttacatctccagagaaatcctgaggggactggcacatcttcacattcatcatgtgattcaccgggatatcaagggccagaatgtgttgctgactgagaatgcagaggtgaaacttgatgaaactgagtatgagtacagtgggagtgaggaagaagaggaggaagtgcctgaacaggaaggagagccaagttccattgtgaacgtgcctggtgagtctactcttcgccgagatttcctgagactgcagcaggagaacaaggaacgttccgaggctcttcggagacaacagttactacaggagcaacagctccgggagcaggaagaatataaaaggcaactgctggcagagagacagaagcggattgagcagcagaaagaacagaggcgacggctagaagagcaacaaaggagagagcgggaagctagaaggcagcaggaacgtgaacagcgaaggagagaacaagaagaaaagaggcgtctagaggagttggagagaaggcgcaaagaagaagaggagaggagacgggcagaagaagaaaagaggagagttgaaagagaacaggagtatatcaggcgacagctagaagaggagcagcggcacttggaagtccttcagcagcagctgctccaggagcaggccatgttactggagtgccgatggcgggagatggaggagcaccggcaggcagagaggctccagaggcagttgcaacaagaacaagcatatctcctgtctctacagcatgaccataggaggccgcacccgcagcactcgcagcagccgccaccaccgcagcaggaaaggagcaagccaagcttccatgctcccgagcccaaagcccactacgagcctgctgaccgagcgcgagaggttcctgtgagaacaacatctcgctcccctgttctgtcccgtcgagattccccactgcagggcagtgggcagcagaatagccaggcaggacagagaaactccaccagcagtattgagcccaggcttctgtgggagagagtggagaagctggtgcccagacctggcagtggcagctcctcagggtccagcaactcaggatcccagcccgggtctcaccctgggtctcagagtggctccggggaacgcttcagagtgagatcatcatccaagtctgaaggctctccatctcagcgcctggaaaatgcagtgaaaaaacctgaagataaaaaggaagttttcagacccctcaagcctgctggcgaagtggatctgaccgcactggccaaagagcttcgagcagtggaagatgtacggccacctcacaaagtaacggactactcctcatccagtgaggagtcggggacgacggatgaggaggacgacgatgtggagcaggaaggggctgacgagtccacctcaggaccagaggacaccagagcagcgtcatctctgaatttgagcaatggtgaaacggaatctgtgaaaaccatgattgtccatgatgatgtagaaagtgagccggccatgaccccatccaaggagggcactctaatcgtccgccagactcagtccgctagtagcacactccagaaacacaaatcttcctcctcctttacaccttttatagaccccagattactacagatttctccatctagcggaacaacagtgacatctgtggtgggattttcctgtgatgggatgagaccagaagccataaggcaagatcctacccggaaaggctcagtggtcaatgtgaatcctaccaacactaggccacagagtgacaccccggagattcgtaaatacaagaagaggtttaactctgagattctgtgtgctgccttatggggagtgaatttgctagtgggtacagagagtggcctgatgctgctggacagaagtggccaagggaaggtctatcctcttatcaaccgaagacgatttcaacaaatggacgtacttgagggcttgaatgtcttggtgacaatatctggcaaaaaggataagttacgtgtctactatttgtcctggttaagaaataaaatacttcacaatgatccagaagttgagaagaagcagggatggacaaccgtaggggatttggaaggatgtgtacattataaagttgtaaaatatgaaagaatcaaatttctggtgattgctttgaagagttctgtggaagtctatgcgtgggcaccaaagccatatcacaaatttatggcctttaagtcatttggagaattggtacataagccattactggtggatctcactgttgaggaaggccagaggttgaaagtgatctatggatcctgtgctggattccatgctgttgatgtggattcaggatcagtctatgacatttatctaccaacacatatccagtgtagcatcaaaccccatgcaatcatcatcctccccaatacagatggaatggagcttctggtgtgctatgaagatgagggggtttatgtaaacacatatggaaggatcaccaaggatgtagttctacagtggggagagatgcctacatcagtagcatatattcgatccaatcagacaatgggctggggagagaaggccatagagatccgatctgtggaaactggtcacttggatggtgtgttcatgcacaaaagggctcaaagactaaaattcttgtgtgaacgcaatgacaaggtgttctttgcctctgttcggtctggtggcagcagtcaggtttatttcatgaccttaggcaggacttctcttctgagctggtagaagcagtgtgatccagggattactggcctccagagtcttcaagatcctgagaacttggaattccttgtaactggagctcggagctgcaccgagggcaaccaggacagctgtgtgtgcagacctcatgtgttgggttctctcccctccttcctgttcctcttatataccagtttatccccattctttttttttttcttactccaaaataaatcaaggctgcaatgcagctggtgctgttcagattctaccatcaggtgctataagtgtttgggattgagcatcatactggaaagcaaacacctttcctccagctccagaattccttgtctctgaatgactctgtcttgtgggtgtctgacagtggcgacgatgaacatgccgttggttttattggcagtgggcacaaggaggtgagaagtggtggtaaaaggagcggagtgctgaagcagagagcagatttaatatagtaacattaacagtgtatttaattgacatttcttttttgtaatgtgacgatatgtggacaaagaagaagatgcaggtttaagaagttaatatttataaaatgtgaaagacacagttactaggataacttttttgtgggtggggcttgggagatggggtggggtgggttaaggggtcccattttgtttctttggatttggggtgggggtcctggccaagaactcagtcatttttctgtgtaccaggttgcctaaatcatgtgcagatggttctaaaaaaaaaaaaaaaaaaaaaaaaaaaaggaaaaaaaaaaagaaaaagaaaacgtgtgcattttgtataatggccagaactttgtcgtgtgacagtattagcactgcctcagttaaaggtttaatttttgtttaaacctagacgtgcaacaaaagttttaccacagtctgcacttgcagaagaaagaaaaaaattcaaaccacatgtttattttttttttgcctacctcattgttcttaatgcattgagaggtgatttagtttatatgtttttggaagaaaccattaatgtttaatttaatcttaataccaaaacgaccagattgaagtttgacttttattgtcacaaatcagcaggcacaagaactgtccatgaagatgggaaatagccttaaggctgatgcagtttacttacaagtttagaaaccagaatgctttgtttttaccagattcaccattagaggttgatggggcaactgcagcccatgacacaagatctcattgttctcgatgtagaggggttggtagcagacaggtggttacattagaatagtcacacaaactgttcagtgttgcaggaaccttttcttgggggtgggggagtttcccttttctaaaaatgcaatgcactaaaactattttaagaatgtagttaattctgcttattcataaagtgggcatcttctgtgttttaggtgtaatatcgaagtcctggcttttctcgttttctcacttgctctcttgttctctgtttttttaaaccaattttactttatgaatatattcatgacatttgtaataaatgtcttgagaaagaatttgtttcatggcttcatggtcatcactcaagctcccgtaaggatattaccgtctcaggaaaggatcaggactccatgtcacagtcctgccatcttactttcctcttgtcgagttctgagtggaaataactgcattatggctgctttaacctcagtcatcaaaagaaacttgctgttttttaggcttgatctttttcctttgtggttaattttcctgtatattgtgaaaatgggggattttccctctgctcccacccacctaaacacagcagccatttgtacctgtttgcttcccatcccacttggcacccactctgacctcttgtcagtttcctgttcctggttccatctttttgaaaaaggccctcctttgagctacaaacatctggtaagacaagtacatccactcatgaatgcagacacagcagctggtggttttgtgtatacctgtaaagacaagctgagaagcttactttttggggaagtaaaagaagatggaaatggatgtttcatttgtatgagtttggagcagtgctgaaggccaaagccgcctactggtttgtagttaacctagagaaggttgaaaaattaatcctacctttaaagggatttgaggtaggctggattccatcgccacaggactttagttagaattaaattcctgcttgtaatttatatccatgtttaggcttttcataagatgaaacatgccacagtgaacacactcgtgtacatatcaagagaagaaggaaaggcacaggtggagaacagtaaaaggtgggcagatgtctttgaagaaatgctcaatgtctgatgctaagtgggagaaggcagagaacaaaggatgtggcataatggtcttaacattatccaaagacttgaagctccatgtctgtaagtcaaatgttacacaaaaaaaaatgcaaatggtgtttcattggaattaccaagtgcttagaacttgctggctttcccataggtggtaaaggggtctgagctcacaccgagttgtgcttggcttgcttgtgcagctccaggcacccggtgggcactctggtggtgtttgtggtgaactgaattgaatccattgttgggcttaagttactgaaattggaacaccctttgtccttctcggcgggggcttcctggtctgtgctttacttggcttttttccttcccgtcttagcctcacccccttgtcaaccagattgagttgctatagcttgatgcagggacccagtgaagtttctccgttaaagattgggagtcgtcgaaatgtttagattcttttaggaaaggaattattttccccccttttacagggtagtaacttctccacagaagtgccaatatggcaaaattacacaagaaaacagtattgcaatgacaccattacataaggaacattgaactgttagaggagtgctcttccaaacaaaacaaaaatgtctctaggtttagtcagagctttcacaagtaataacctttctgtattaaaatcagagtaaccctttctgtattgagtgcagtgttttttactcttttctcatgcacatgttacgttggagaaaatgtttacaaaaatggttttgttacactaatgcgcaccacatatttatggtttattttaagtgactttttatgggttatttaggttttcgtcttagttgtagcacacttaccctaattttgccaattattaatttgctaaatagtaatacaaatgacaaactgcattaaatttactaattataaaagctgcaaagcagactggtggcaagtacacagcccttttttttgcagtgctaacttgtctactgtgtattatgaaaattactgttgtccccccacccttttttccttaaataaagtaaaaatgacacct

SEQ ID NO: 155075 - DNA, 7526 bp, Homo sapiens
  Payload ID: 10484
  Gene Symbol: MAP4K4
  Gene Name: mitogen-activated protein kinase kinase kinase kinase 4
  ENST ID: ENST00000324219
  CDS Start-End: 379-4086
gctcactcgctcaactcggcgccgccgcggccccacgctccgggcccgtcctcgaggcgcgcggcgcggggcgcgggcgccggggcctgaggcggcgggcgacgcccgggggcctgacggccggccccgcgccatggtgtgagcgccgccgcccgtgcacgctccgtccgccctccgcgcggcccggccggcagagagccccgagcggcccgagagcgcagccgagcccgccgccgccgcccgcggccccgcgaggagagtaccgggccggctcggctgccgcgcgaggagcgcggtcggcggcctggtctgcggctgagatacacagagcgacagagacatttattgttatttgttttttggtggcaaaaagggaaaatggcgaacgactcccctgcaaaaagtctggtggacatcgacctctcctccctgcgggatcctgctgggatttttgagctggtggaagtggttggaaatggcacctatggacaagtctataagggtcgacatgttaaaacgggtcagttggcagccatcaaagttatggatgtcactgaggatgaagaggaagaaatcaaactggagataaatatgctaaagaaatactctcatcacagaaacattgcaacatattatggtgctttcatcaaaaagagccctccaggacatgatgaccaactctggcttgttatggagttctgtggggctgggtccattacagaccttgtgaagaacaccaaagggaacacactcaaagaagactggatcgcttacatctccagagaaatcctgaggggactggcacatcttcacattcatcatgtgattcaccgggatatcaagggccagaatgtgttgctgactgagaatgcagaggtgaaacttgttgactttggtgtgagtgctcagctggacaggactgtggggcggagaaatacgttcataggcactccctactggatggctcctgaggtcatcgcctgtgatgagaacccagatgccacctatgattacagaagtgatctttggtcttgtggcattacagccattgagatggcagaaggtgctccccctctctgtgacatgcatccaatgagagcactgtttctcattcccagaaaccctcctccccggctgaagtcaaaaaaatggtcgaagaagttttttagttttatagaagggtgcctggtgaagaattacatgcagcggccctctacagagcagcttttgaaacatccttttataagggatcagccaaatgaaaggcaagttagaatccagcttaaggatcatatagatcgtaccaggaagaagagaggcgagaaagatgaaactgagtatgagtacagtgggagtgaggaagaagaggaggaagtgcctgaacaggaaggagagccaagttccattgtgaacgtgcctggtgagtctactcttcgccgagatttcctgagactgcagcaggagaacaaggaacgttccgaggctcttcggagacaacagttactacaggagcaacagctccgggagcaggaagaatataaaaggcaactgctggcagagagacagaagcggattgagcagcagaaagaacagaggcgacggctagaagagcaacaaaggagagagcgggaagctagaaggcagcaggaacgtgaacagcgaaggagagaacaagaagaaaagaggcgtctagaggagttggagagaaggcgcaaagaagaagaggagaggagacgggcagaagaagaaaagaggagagttgaaagagaacaggagtatatcaggcgacagctagaagaggagcagcggcacttggaagtccttcagcagcagctgctccaggagcaggccatgttactgcatgaccataggaggccgcacccgcagcactcgcagcagccgccaccaccgcagcaggaaaggagcaagccaagcttccatgctcccgagcccaaagcccactacgagcctgctgaccgagcgcgagaggtacagtggtcccacctggcatctctcaagaacaatgtttcccctgtctcgcgatcccattccttcagtgacccttctcccaaatttgcacaccaccatcttcgttctcaggacccatgtccaccttcccgcagtgaggtgctcagtcagagctctgactctaagtcagaggcgcctgaccctacccaaaaggcttggtctagatcagacagtgacgaggtgcctccaagggttcctgtgagaacaacatctcgctcccctgttctgtcccgtcgagattccccactgcagggcagtgggcagcagaatagccaggcaggacagagaaactccaccagcagtattgagcccaggcttctgtgggagagagtggagaagctggtgcccagacctggcagtggcagctcctcagggtccagcaactcaggatcccagcccgggtctcaccctgggtctcagagtggctccggggaacgcttcagagtgagatcatcatccaagtctgaaggctctccatctcagcgcctggaaaatgcagtgaaaaaacctgaagataaaaaggaagttttcagacccctcaagcctgctgtaaggattgatctgaccgcactggccaaagagcttcgagcagtggaagatgtacggccacctcacaaagtaacggactactcctcatccagtgaggagtcggggacgacggatgaggaggacgacgatgtggagcaggaaggggctgacgagtccacctcaggaccagaggacaccagagcagcgtcatctctgaatttgagcaatggtgaaacggaatctgtgaaaaccatgattgtccatgatgatgtagaaagtgagccggccatgaccccatccaaggagggcactctaatcgtccgccagactcagtccgctagtagcacactccagaaacacaaatcttcctcctcctttacaccttttatagaccccagattactacagatttctccatctagcggaacaacagtgacatctgtggtgggattttcctgtgatgggatgagaccagaagccataaggcaagatcctacccggaaaggctcagtggtcaatgtgaatcctaccaacactaggccacagagtgacaccccggagattcgtaaatacaagaagaggtttaactctgagattctgtgtgctgccttatggggagtgaatttgctagtgggtacagagagtggcctgatgctgctggacagaagtggccaagggaaggtctatcctcttatcaaccgaagacgatttcaacaaatggacgtacttgagggcttgaatgtcttggtgacaatatctggcaaaaaggataagttacgtgtctactatttgtcctggttaagaaataaaatacttcacaatgatccagaagttgagaagaagcagggatggacaaccgtaggggatttggaaggatgtgtacattataaagttgtaaaatatgaaagaatcaaatttctggtgattgctttgaagagttctgtggaagtctatgcgtgggcaccaaagccatatcacaaatttatggcctttaagtcatttggagaattggtacataagccattactggtggatctcactgttgaggaaggccagaggttgaaagtgatctatggatcctgtgctggattccatgctgttgatgtggattcaggatcagtctatgacatttatctaccaacacatatccagtgtagcatcaaaccccatgcaatcatcatcctccccaatacagatggaatggagcttctggtgtgctatgaagatgagggggtttatgtaaacacatatggaaggatcaccaaggatgtagttctacagtggggagagatgcctacatcagtagcatatattcgatccaatcagacaatgggctggggagagaaggccatagagatccgatctgtggaaactggtcacttggatggtgtgttcatgcacaaaagggctcaaagactaaaattcttgtgtgaacgcaatgacaaggtgttctttgcctctgttcggtctggtggcagcagtcaggtttatttcatgaccttaggcaggacttctcttctgagctggtagaagcagtgtgatccagggattactggcctccagagtcttcaagatcctgagaacttggaattccttgtaactggagctcggagctgcaccgagggcaaccaggacagctgtgtgtgcagacctcatgtgttgggttctctcccctccttcctgttcctcttatataccagtttatccccattctttttttttttcttactccaaaataaatcaaggctgcaatgcagctggtgctgttcagattctaccatcaggtgctataagtgtttgggattgagcatcatactggaaagcaaacacctttcctccagctccagaattccttgtctctgaatgactctgtcttgtgggtgtctgacagtggcgacgatgaacatgccgttggttttattggcagtgggcacaaggaggtgagaagtggtggtaaaaggagcggagtgctgaagcagagagcagatttaatatagtaacattaacagtgtatttaattgacatttcttttttgtaatgtgacgatatgtggacaaagaagaagatgcaggtttaagaagttaatatttataaaatgtgaaagacacagttactaggataacttttttgtgggtggggcttgggagatggggtggggtgggttaaggggtcccattttgtttctttggatttggggtgggggtcctggccaagaactcagtcatttttctgtgtaccaggttgcctaaatcatgtgcagatggttctaaaaaaaaaaaaaaaaaaaaaaaaaaaaggaaaaaaaaaaagaaaaagaaaacgtgtgcattttgtataatggccagaactttgtcgtgtgacagtattagcactgcctcagttaaaggtttaatttttgtttaaacctagacgtgcaacaaaagttttaccacagtctgcacttgcagaagaaagaaaaaaattcaaaccacatgtttattttttttttgcctacctcattgttcttaatgcattgagaggtgatttagtttatatgtttttggaagaaaccattaatgtttaatttaatcttaataccaaaacgaccagattgaagtttgacttttattgtcacaaatcagcaggcacaagaactgtccatgaagatgggaaatagccttaaggctgatgcagtttacttacaagtttagaaaccagaatgctttgtttttaccagattcaccattagaggttgatggggcaactgcagcccatgacacaagatctcattgttctcgatgtagaggggttggtagcagacaggtggttacattagaatagtcacacaaactgttcagtgttgcaggaaccttttcttgggggtgggggagtttcccttttctaaaaatgcaatgcactaaaactattttaagaatgtagttaattctgcttattcataaagtgggcatcttctgtgttttaggtgtaatatcgaagtcctggcttttctcgttttctcacttgctctcttgttctctgtttttttaaaccaattttactttatgaatatattcatgacatttgtaataaatgtcttgagaaagaatttgtttcatggcttcatggtcatcactcaagctcccgtaaggatattaccgtctcaggaaaggatcaggactccatgtcacagtcctgccatcttactttcctcttgtcgagttctgagtggaaataactgcattatggctgctttaacctcagtcatcaaaagaaacttgctgttttttaggcttgatctttttcctttgtggttaattttcctgtatattgtgaaaatgggggattttccctctgctcccacccacctaaacacagcagccatttgtacctgtttgcttcccatcccacttggcacccactctgacctcttgtcagtttcctgttcctggttccatctttttgaaaaaggccctcctttgagctacaaacatctggtaagacaagtacatccactcatgaatgcagacacagcagctggtggttttgtgtatacctgtaaagacaagctgagaagcttactttttggggaagtaaaagaagatggaaatggatgtttcatttgtatgagtttggagcagtgctgaaggccaaagccgcctactggtttgtagttaacctagagaaggttgaaaaattaatcctacctttaaagggatttgaggtaggctggattccatcgccacaggactttagttagaattaaattcctgcttgtaatttatatccatgtttaggcttttcataagatgaaacatgccacagtgaacacactcgtgtacatatcaagagaagaaggaaaggcacaggtggagaacagtaaaaggtgggcagatgtctttgaagaaatgctcaatgtctgatgctaagtgggagaaggcagagaacaaaggatgtggcataatggtcttaacattatccaaagacttgaagctccatgtctgtaagtcaaatgttacacaaaaaaaaatgcaaatggtgtttcattggaattaccaagtgcttagaacttgctggctttcccataggtggtaaaggggtctgagctcacaccgagttgtgcttggcttgcttgtgcagctccaggcacccggtgggcactctggtggtgtttgtggtgaactgaattgaatccattgttgggcttaagttactgaaattggaacaccctttgtccttctcggcgggggcttcctggtctgtgctttacttggcttttttccttcccgtcttagcctcacccccttgtcaaccagattgagttgctatagcttgatgcagggacccagtgaagtttctccgttaaagattgggagtcgtcgaaatgtttagattcttttaggaaaggaattattttccccccttttacagggtagtaacttctccacagaagtgccaatatggcaaaattacacaagaaaacagtattgcaatgacaccattacataaggaacattgaactgttagaggagtgctcttccaaacaaaacaaaaatgtctctaggtttagtcagagctttcacaagtaataacctttctgtattaaaatcagagtaaccctttctgtattgagtgcagtgttttttactcttttctcatgcacatgttacgttggagaaaatgtttacaaaaatggttttgttacactaatgcgcaccacatatttatggtttattttaagtgactttttatgggttatttaggttttcgtcttagttgtagcacacttaccctaattttgccaattattaatttgctaaatagtaatacaaatgacaaactgcattaaatttactaattataaaagctgcaaagcagactggtggcaagtacacagcccttttttttgcagtgctaacttgtctactgtgtattatgaaaattactgttgtccccccacccttttttccttaaataaagtaaaaatgacacct

SEQ ID NO: 155076 - DNA, 3792 bp, Homo sapiens
  Payload ID: 10484
  Gene Symbol: MAP4K4
  Gene Name: mitogen-activated protein kinase kinase kinase kinase 4
  Uniprot ID: O95819
  ENST ID: ENST00000347699
  CDS Start-End: 1-3720
atggcgaacgactcccctgcaaaaagtctggtggacatcgacctctcctccctgcgggatcctgctgggatttttgagctggtggaagtggttggaaatggcacctatggacaagtctataagggtcgacatgttaaaacgggtcagttggcagccatcaaagttatggatgtcactgaggatgaagaggaagaaatcaaactggagataaatatgctaaagaaatactctcatcacagaaacattgcaacatattatggtgctttcatcaaaaagagccctccaggacatgatgaccaactctggcttgttatggagttctgtggggctgggtccattacagaccttgtgaagaacaccaaagggaacacactcaaagaagactggatcgcttacatctccagagaaatcctgaggggactggcacatcttcacattcatcatgtgattcaccgggatatcaagggccagaatgtgttgctgactgagaatgcagaggtgaaacttgttgactttggtgtgagtgctcagctggacaggactgtggggcggagaaatacgttcataggcactccctactggatggctcctgaggtcatcgcctgtgatgagaacccagatgccacctatgattacagaagtgatctttggtcttgtggcattacagccattgagatggcagaaggtgctccccctctctgtgacatgcatccaatgagagcactgtttctcattcccagaaaccctcctccccggctgaagtcaaaaaaatggtcgaagaagttttttagttttatagaagggtgcctggtgaagaattacatgcagcggccctctacagagcagcttttgaaacatccttttataagggatcagccaaatgaaaggcaagttagaatccagcttaaggatcatatagatcgtaccaggaagaagagaggcgagaaagatgaaactgagtatgagtacagtgggagtgaggaagaagaggaggaagtgcctgaacaggaaggagagccaagttccattgtgaacgtgcctggtgagtctactcttcgccgagatttcctgagactgcagcaggagaacaaggaacgttccgaggctcttcggagacaacagttactacaggagcaacagctccgggagcaggaagaatataaaaggcaactgctggcagagagacagaagcggattgagcagcagaaagaacagaggcgacggctagaagagcaacaaaggagagagcgggaagctagaaggcagcaggaacgtgaacagcgaaggagagaacaagaagaaaagaggcgtctagaggagttggagagaaggcgcaaagaagaagaggagaggagacgggcagaagaagaaaagaggagagttgaaagagaacaggagtatatcaggcgacagctagaagaggagcagcggcacttggaagtccttcagcagcagctgctccaggagcaggccatgttactggagtgccgatggcgggagatggaggagcaccggcaggcagagaggctccagaggcagttgcaacaagaacaagcatatctcctgtctctacagcatgaccataggaggccgcacccgcagcactcgcagcagccgccaccaccgcagcaggaaaggagcaagccaagcttccatgctcccgagcccaaagcccactacgagcctgctgaccgagcgcgagaggtggaagatagatttaggaaaactaaccacagctcccctgaagcccagtctaagcagacaggcagagtattggagccaccagtgccttcccgatcagagtctttttccaatggcaactccgagtctgtgcatcccgccctgcagagaccagcggagccacaggttcctgtgagaacaacatctcgctcccctgttctgtcccgtcgagattccccactgcagggcagtgggcagcagaatagccaggcaggacagagaaactccaccagtattgagcccaggcttctgtgggagagagtggagaagctggtgcccagacctggcagtggcagctcctcagggtccagcaactcaggatcccagcccgggtctcaccctgggtctcagagtggctccggggaacgcttcagagtgagatcatcatccaagtctgaaggctctccatctcagcgcctggaaaatgcagtgaaaaaacctgaagataaaaaggaagttttcagacccctcaagcctgctgatctgaccgcactggccaaagagcttcgagcagtggaagatgtacggccacctcacaaagtaacggactactcctcatccagtgaggagtcggggacgacggatgaggaggacgacgatgtggagcaggaaggggctgacgagtccacctcaggaccagaggacaccagagcagcgtcatctctgaatttgagcaatggtgaaacggaatctgtgaaaaccatgattgtccatgatgatgtagaaagtgagccggccatgaccccatccaaggagggcactctaatcgtccgccagactcagtccgctagtagcacactccagaaacacaaatcttcctcctcctttacaccttttatagaccccagattactacagatttctccatctagcggaacaacagtgacatctgtggtgggattttcctgtgatgggatgagaccagaagccataaggcaagatcctacccggaaaggctcagtggtcaatgtgaatcctaccaacactaggccacagagtgacaccccggagattcgtaaatacaagaagaggtttaactctgagattctgtgtgctgccttatggggagtgaatttgctagtgggtacagagagtggcctgatgctgctggacagaagtggccaagggaaggtctatcctcttatcaaccgaagacgatttcaacaaatggacgtacttgagggcttgaatgtcttggtgacaatatctggcaaaaaggataagttacgtgtctactatttgtcctggttaagaaataaaatacttcacaatgatccagaagttgagaagaagcagggatggacaaccgtaggggatttggaaggatgtgtacattataaagttgtaaaatatgaaagaatcaaatttctggtgattgctttgaagagttctgtggaagtctatgcgtgggcaccaaagccatatcacaaatttatggcctttaagtcatttggagaattggtacataagccattactggtggatctcactgttgaggaaggccagaggttgaaagtgatctatggatcctgtgctggattccatgctgttgatgtggattcaggatcagtctatgacatttatctaccaacacatatccagtgtagcatcaaaccccatgcaatcatcatcctccccaatacagatggaatggagcttctggtgtgctatgaagatgagggggtttatgtaaacacatatggaaggatcaccaaggatgtagttctacagtggggagagatgcctacatcagtagcatatattcgatccaatcagacaatgggctggggagagaaggccatagagatccgatctgtggaaactggtcacttggatggtgtgttcatgcacaaaagggctcaaagactaaaattcttgtgtgaacgcaatgacaaggtgttctttgcctctgttcggtctggtggcagcagtcaggtttatttcatgaccttaggcaggacttctcttctgagctggtagaagcagtgtgatccagggattactggcctccagagtcttcaagatcctgagaacttggaattccttgtaact

SEQ ID NO: 155077 - DNA, 7640 bp, Homo sapiens
  Payload ID: 10484
  Gene Symbol: MAP4K4
  Gene Name: mitogen-activated protein kinase kinase kinase kinase 4
  ENST ID: ENST00000350878
  CDS Start-End: 379-4200
gctcactcgctcaactcggcgccgccgcggccccacgctccgggcccgtcctcgaggcgcgcggcgcggggcgcgggcgccggggcctgaggcggcgggcgacgcccgggggcctgacggccggccccgcgccatggtgtgagcgccgccgcccgtgcacgctccgtccgccctccgcgcggcccggccggcagagagccccgagcggcccgagagcgcagccgagcccgccgccgccgcccgcggccccgcgaggagagtaccgggccggctcggctgccgcgcgaggagcgcggtcggcggcctggtctgcggctgagatacacagagcgacagagacatttattgttatttgttttttggtggcaaaaagggaaaatggcgaacgactcccctgcaaaaagtctggtggacatcgacctctcctccctgcgggatcctgctgggatttttgagctggtggaagtggttggaaatggcacctatggacaagtctataagggtcgacatgttaaaacgggtcagttggcagccatcaaagttatggatgtcactgaggatgaagaggaagaaatcaaactggagataaatatgctaaagaaatactctcatcacagaaacattgcaacatattatggtgctttcatcaaaaagagccctccaggacatgatgaccaactctggcttgttatggagttctgtggggctgggtccattacagaccttgtgaagaacaccaaagggaacacactcaaagaagactggatcgcttacatctccagagaaatcctgaggggactggcacatcttcacattcatcatgtgattcaccgggatatcaagggccagaatgtgttgctgactgagaatgcagaggtgaaacttgttgactttggtgtgagtgctcagctggacaggactgtggggcggagaaatacgttcataggcactccctactggatggctcctgaggtcatcgcctgtgatgagaacccagatgccacctatgattacagaagtgatctttggtcttgtggcattacagccattgagatggcagaaggtgctccccctctctgtgacatgcatccaatgagagcactgtttctcattcccagaaaccctcctccccggctgaagtcaaaaaaatggtcgaagaagttttttagttttatagaagggtgcctggtgaagaattacatgcagcggccctctacagagcagcttttgaaacatccttttataagggatcagccaaatgaaaggcaagttagaatccagcttaaggatcatatagatcgtaccaggaagaagagaggcgagaaagatgaaactgagtatgagtacagtgggagtgaggaagaagaggaggaagtgcctgaacaggaaggagagccaagttccattgtgaacgtgcctggtgagtctactcttcgccgagatttcctgagactgcagcaggagaacaaggaacgttccgaggctcttcggagacaacagttactacaggagcaacagctccgggagcaggaagaatataaaaggcaactgctggcagagagacagaagcggattgagcagcagaaagaacagaggcgacggctagaagagcaacaaaggagagagcgggaagctagaaggcagcaggaacgtgaacagcgaaggagagaacaagaagaaaagaggcgtctagaggagttggagagaaggcgcaaagaagaagaggagaggagacgggcagaagaagaaaagaggagagttgaaagagaacaggagtatatcaggcgacagctagaagaggagcagcggcacttggaagtccttcagcagcagctgctccaggagcaggccatgttactgcatgaccataggaggccgcacccgcagcactcgcagcagccgccaccaccgcagcaggaaaggagcaagccaagcttccatgctcccgagcccaaagcccactacgagcctgctgaccgagcgcgagaggtggaagatagatttaggaaaactaaccacagctcccctgaagcccagtctaagcagacaggcagagtattggagccaccagtgccttcccgatcagagtctttttccaatggcaactccgagtctgtgcatcccgccctgcagagaccagcggagccacaggttcctgtgagaacaacatctcgctcccctgttctgtcccgtcgagattccccactgcagggcagtgggcagcagaatagccaggcaggacagagaaactccaccagcagtattgagcccaggcttctgtgggagagagtggagaagctggtgcccagacctggcagtggcagctcctcagggtccagcaactcaggatcccagcccgggtctcaccctgggtctcagagtggctccggggaacgcttcagagtgagatcatcatccaagtctgaaggctctccatctcagcgcctggaaaatgcagtgaaaaaacctgaagataaaaaggaagttttcagacccctcaagcctgctgatctgaccgcactggccaaagagcttcgagcagtggaagatgtacggccacctcacaaagtaacggactactcctcatccagtgaggagtcggggacgacggatgaggaggacgacgatgtggagcaggaaggggctgacgagtccacctcaggaccagaggacaccagagcagcgtcatctctgaatttgagcaatggtgaaacggaatctgtgaaaaccatgattgtccatgatgatgtagaaagtgagccggccatgaccccatccaaggagggcactctaatcgtccgccagagtacagttgaccaaaagcgtgccagccatcatgagagcaatggctttgccggtcgcattcacctcttgccagatctcttacagcaaagccattcctcctccacttcctccacctcctcctccccatcctccagccagccgacacccaccatgtccccacagacaccccaggacaagctcactgctaatgagactcagtccgctagtagcacactccagaaacacaaatcttcctcctcctttacaccttttatagaccccagattactacagatttctccatctagcggaacaacagtgacatctgtggtgggattttcctgtgatgggatgagaccagaagccataaggcaagatcctacccggaaaggctcagtggtcaatgtgaatcctaccaacactaggccacagagtgacaccccggagattcgtaaatacaagaagaggtttaactctgagattctgtgtgctgccttatggggagtgaatttgctagtgggtacagagagtggcctgatgctgctggacagaagtggccaagggaaggtctatcctcttatcaaccgaagacgatttcaacaaatggacgtacttgagggcttgaatgtcttggtgacaatatctggcaaaaaggataagttacgtgtctactatttgtcctggttaagaaataaaatacttcacaatgatccagaagttgagaagaagcagggatggacaaccgtaggggatttggaaggatgtgtacattataaagttgtaaaatatgaaagaatcaaatttctggtgattgctttgaagagttctgtggaagtctatgcgtgggcaccaaagccatatcacaaatttatggcctttaagtcatttggagaattggtacataagccattactggtggatctcactgttgaggaaggccagaggttgaaagtgatctatggatcctgtgctggattccatgctgttgatgtggattcaggatcagtctatgacatttatctaccaacacatatccagtgtagcatcaaaccccatgcaatcatcatcctccccaatacagatggaatggagcttctggtgtgctatgaagatgagggggtttatgtaaacacatatggaaggatcaccaaggatgtagttctacagtggggagagatgcctacatcagtagcatatattcgatccaatcagacaatgggctggggagagaaggccatagagatccgatctgtggaaactggtcacttggatggtgtgttcatgcacaaaagggctcaaagactaaaattcttgtgtgaacgcaatgacaaggtgttctttgcctctgttcggtctggtggcagcagtcaggtttatttcatgaccttaggcaggacttctcttctgagctggtagaagcagtgtgatccagggattactggcctccagagtcttcaagatcctgagaacttggaattccttgtaactggagctcggagctgcaccgagggcaaccaggacagctgtgtgtgcagacctcatgtgttgggttctctcccctccttcctgttcctcttatataccagtttatccccattctttttttttttcttactccaaaataaatcaaggctgcaatgcagctggtgctgttcagattctaccatcaggtgctataagtgtttgggattgagcatcatactggaaagcaaacacctttcctccagctccagaattccttgtctctgaatgactctgtcttgtgggtgtctgacagtggcgacgatgaacatgccgttggttttattggcagtgggcacaaggaggtgagaagtggtggtaaaaggagcggagtgctgaagcagagagcagatttaatatagtaacattaacagtgtatttaattgacatttcttttttgtaatgtgacgatatgtggacaaagaagaagatgcaggtttaagaagttaatatttataaaatgtgaaagacacagttactaggataacttttttgtgggtggggcttgggagatggggtggggtgggttaaggggtcccattttgtttctttggatttggggtgggggtcctggccaagaactcagtcatttttctgtgtaccaggttgcctaaatcatgtgcagatggttctaaaaaaaaaaaaaaaaaaaaaaaaaaaaggaaaaaaaaaaagaaaaagaaaacgtgtgcattttgtataatggccagaactttgtcgtgtgacagtattagcactgcctcagttaaaggtttaatttttgtttaaacctagacgtgcaacaaaagttttaccacagtctgcacttgcagaagaaagaaaaaaattcaaaccacatgtttattttttttttgcctacctcattgttcttaatgcattgagaggtgatttagtttatatgtttttggaagaaaccattaatgtttaatttaatcttaataccaaaacgaccagattgaagtttgacttttattgtcacaaatcagcaggcacaagaactgtccatgaagatgggaaatagccttaaggctgatgcagtttacttacaagtttagaaaccagaatgctttgtttttaccagattcaccattagaggttgatggggcaactgcagcccatgacacaagatctcattgttctcgatgtagaggggttggtagcagacaggtggttacattagaatagtcacacaaactgttcagtgttgcaggaaccttttcttgggggtgggggagtttcccttttctaaaaatgcaatgcactaaaactattttaagaatgtagttaattctgcttattcataaagtgggcatcttctgtgttttaggtgtaatatcgaagtcctggcttttctcgttttctcacttgctctcttgttctctgtttttttaaaccaattttactttatgaatatattcatgacatttgtaataaatgtcttgagaaagaatttgtttcatggcttcatggtcatcactcaagctcccgtaaggatattaccgtctcaggaaaggatcaggactccatgtcacagtcctgccatcttactttcctcttgtcgagttctgagtggaaataactgcattatggctgctttaacctcagtcatcaaaagaaacttgctgttttttaggcttgatctttttcctttgtggttaattttcctgtatattgtgaaaatgggggattttccctctgctcccacccacctaaacacagcagccatttgtacctgtttgcttcccatcccacttggcacccactctgacctcttgtcagtttcctgttcctggttccatctttttgaaaaaggccctcctttgagctacaaacatctggtaagacaagtacatccactcatgaatgcagacacagcagctggtggttttgtgtatacctgtaaagacaagctgagaagcttactttttggggaagtaaaagaagatggaaatggatgtttcatttgtatgagtttggagcagtgctgaaggccaaagccgcctactggtttgtagttaacctagagaaggttgaaaaattaatcctacctttaaagggatttgaggtaggctggattccatcgccacaggactttagttagaattaaattcctgcttgtaatttatatccatgtttaggcttttcataagatgaaacatgccacagtgaacacactcgtgtacatatcaagagaagaaggaaaggcacaggtggagaacagtaaaaggtgggcagatgtctttgaagaaatgctcaatgtctgatgctaagtgggagaaggcagagaacaaaggatgtggcataatggtcttaacattatccaaagacttgaagctccatgtctgtaagtcaaatgttacacaaaaaaaaatgcaaatggtgtttcattggaattaccaagtgcttagaacttgctggctttcccataggtggtaaaggggtctgagctcacaccgagttgtgcttggcttgcttgtgcagctccaggcacccggtgggcactctggtggtgtttgtggtgaactgaattgaatccattgttgggcttaagttactgaaattggaacaccctttgtccttctcggcgggggcttcctggtctgtgctttacttggcttttttccttcccgtcttagcctcacccccttgtcaaccagattgagttgctatagcttgatgcagggacccagtgaagtttctccgttaaagattgggagtcgtcgaaatgtttagattcttttaggaaaggaattattttccccccttttacagggtagtaacttctccacagaagtgccaatatggcaaaattacacaagaaaacagtattgcaatgacaccattacataaggaacattgaactgttagaggagtgctcttccaaacaaaacaaaaatgtctctaggtttagtcagagctttcacaagtaataacctttctgtattaaaatcagagtaaccctttctgtattgagtgcagtgttttttactcttttctcatgcacatgttacgttggagaaaatgtttacaaaaatggttttgttacactaatgcgcaccacatatttatggtttattttaagtgactttttatgggttatttaggttttcgtcttagttgtagcacacttaccctaattttgccaattattaatttgctaaatagtaatacaaatgacaaactgcattaaatttactaattataaaagctgcaaagcagactggtggcaagtacacagcccttttttttgcagtgctaacttgtctactgtgtattatgaaaattactgttgtccccccacccttttttccttaaataaagtaaaaatgacacct

SEQ ID NO: 155078 - DNA, 3855 bp, Homo sapiens
  Payload ID: 10484
  Gene Symbol: MAP4K4
  Gene Name: mitogen-activated protein kinase kinase kinase kinase 4
  ENST ID: ENST00000456652
  CDS Start-End: 1-3117
atggcgaacgactcccctgcaaaaagtctggtggacatcgacctctcctccctgcgggatcctgctgggatttttgagctggtggaagtggttggaaatggcacctatggacaagtctataagggtcgacatgttaaaacgggtcagttggcagccatcaaagttatggatgtcactgaggatgaagaggaagaaatcaaactggagataaatatgctaaagaaatactctcatcacagaaacattgcaacatattatggtgctttcatcaaaaagagccctccaggacatgatgaccaactctggcttgttatggagttctgtggggctgggtccattacagaccttgtgaagaacaccaaagggaacacactcaaagaagactggatcgcttacatctccagagaaatcctgaggggactggcacatcttcacattcatcatgtgattcaccgggatatcaagggccagaatgtgttgctgactgagaatgcagaggtgaaacttgatgaaactgagtatgagtacagtgggagtgaggaagaagaggaggaagtgcctgaacaggaaggagagccaagttccattgtgaacgtgcctggtgagtctactcttcgccgagatttcctgagactgcagcaggagaacaaggaacgttccgaggctcttcggagacaacagttactacaggagcaacagctccgggagcaggaagaatataaaaggcaactgctggcagagagacagaagcggattgagcagcagaaagaacagaggcgacggctagaagagcaacaaaggagagagcgggaagctagaaggcagcaggaacgtgaacagcgaaggagagaacaagaagaaaagaggcgtctagaggagttggagagaaggcgcaaagaagaagaggagaggagacgggcagaagaagaaaagaggagagttgaaagagaacaggagtatatcaggcgacagctagaagaggagcagcggcacttggaagtccttcagcagcagctgctccaggagcaggccatgttactggagtgccgatggcgggagatggaggagcaccggcaggcagagaggctccagaggcagttgcaacaagaacaagcatatctcctgtctctacagcatgaccataggaggccgcacccgcagcactcgcagcagccgccaccaccgcagcaggaaaggagcaagccaagcttccatgctcccgagcccaaagcccactacgagcctgctgaccgagcgcgagaggttcctgtgagaacaacatctcgctcccctgttctgtcccgtcgagattccccactgcagggcagtgggcagcagaatagccaggcaggacagagaaactccaccagtattgagcccaggcttctgtgggagagagtggagaagctggtgcccagacctggcagtggcagctcctcagggtccagcaactcaggatcccagcccgggtctcaccctgggtctcagagtggctccggggaacgcttcagagtgagatcatcatccaagtctgaaggctctccatctcagcgcctggaaaatgcagtgaaaaaacctgaagataaaaaggaagttttcagacccctcaagcctgctgatctgaccgcactggccaaagagcttcgagcagtggaagatgtacggccacctcacaaagtaacggactactcctcatccagtgaggagtcggggacgacggatgaggaggacgacgatgtggagcaggaaggggctgacgagtccacctcaggaccagaggacaccagagcagcgtcatctctgaatttgagcaatggtgaaacggaatctgtgaaaaccatgattgtccatgatgatgtagaaagtgagccggccatgaccccatccaaggagggcactctaatcgtccgccagactcagtccgctagtagcacactccagaaacacaaatcttcctcctcctttacaccttttatagaccccagattactacagatttctccatctagcggaacaacagtgacatctgtggtgggattttcctgtgatgggatgagaccagaagccataaggcaagatcctacccggaaaggctcagtggtcaatgtgaatcctaccaacactaggccacagagtgacaccccggagattcgtaaatacaagaagaggtttaactctgagattctgtgtgctgccttatggggagtgaatttgctagtgggtacagagagtggcctgatgctgctggacagaagtggccaagggaaggtctatcctcttatcaaccgaagacgatttcaacaaatggacgtacttgagggcttgaatgtcttggtgacaatatctggcaaaaaggataagttacgtgtctactatttgtcctggttaagaaataaaatacttcacaatgatccagaagttgagaagaagcagggatggacaaccgtaggggatttggaaggatgtgtacattataaagttgtaaaatatgaaagaatcaaatttctggtgattgctttgaagagttctgtggaagtctatgcgtgggcaccaaagccatatcacaaatttatggcctttaagtcatttggagaattggtacataagccattactggtggatctcactgttgaggaaggccagaggttgaaagtgatctatggatcctgtgctggattccatgctgttgatgtggattcaggatcagtctatgacatttatctaccaacacatatccagtgtagcatcaaaccccatgcaatcatcatcctccccaatacagatggaatggagcttctggtgtgctatgaagatgagggggtttatgtaaacacatatggaaggatcaccaaggatgtagttctacagtggggagagatgcctacatcagtagcatatattcgatccaatcagacaatgggctggggagagaaggccatagagatccgatctgtggaaactggtcacttggatggtgtgttcatgcacaaaagggctcaaagactaaaattcttgtgtgaacgcaatgacaaggtgttctttgcctctgttcggtctggtggcagcagtcaggtttatttcatgaccttaggcaggacttctcttctgagctggtagaagcagtgtgatccagggattactggcctccagagtcttcaagatcctgagaacttggaattccttgtaactggagctcggagctgcaccgagggcaaccaggacagctgtgtgtgcagacctcatgtgttgggttctctcccctccttcctgttcctcttatataccagtttatccccattctttttttttttcttactccaaaataaatcaaggctgcaatgcagctggtgctgttcagattctaccatcaggtgctataagtgtttgggattgagcatcatactggaaagcaaacacctttcctccagctccagaattccttgtctctgaatgactctgtcttgtgggtgtctgacagtggcgacgatgaacatgccgttggttttattggcagtgggcacaaggaggtgagaagtggtggtaaaaggagcggagtgctgaagcagagagcagatttaatatagtaacattaacagtgtatttaattgacatttcttttttgtaatgtgacgatatgtggacaaagaagaagatgcaggtttaagaagttaatatttataaaatgtgaaagacacagttactaggataacttttttgtgggtggggcttgggagatggggtggggtgggttaaggggtcccattttgtttctttggatttggggtgggggtcctggccaagaactcagtcatttttctgtgtaccaggttgcctaaatcatgtgcagatggttct

SEQ ID NO: 155079 - DNA, 6958 bp, Homo sapiens
  Payload ID: 10484
  Gene Symbol: MAP4K4
  Gene Name: mitogen-activated protein kinase kinase kinase kinase 4
  ENST ID: ENST00000413150
  CDS Start-End: 56-3520
cacagagcgacagagacatttattgttatttgttttttggtggcaaaaagggaaaatggcgaacgactcccctgcaaaaagtctggtggacatcgacctctcctccctgcgggatcctgctgggatttttgagctggtggaagtggttggaaatggcacctatggacaagtctataagggtcgacatgttaaaacgggtcagttggcagccatcaaagttatggatgtcactgaggatgaagaggaagaaatcaaactggagataaatatgctaaagaaatactctcatcacagaaacattgcaacatattatggtgctttcatcaaaaagagccctccaggacatgatgaccaactctggcttgttatggagttctgtggggctgggtccattacagaccttgtgaagaacaccaaagggaacacactcaaagaagactggatcgcttacatctccagagaaatcctgaggggactggcacatcttcacattcatcatgtgattcaccgggatatcaagggccagaatgtgttgctgactgagaatgcagaggtgaaacttgttgactttggtgtgagtgctcagctggacaggactgtggggcggagaaatacgttcataggcactccctactggatggctcctgaggtcatcgcctgtgatgagaacccagatgccacctatgattacagaagtgatctttggtcttgtggcattacagccattgagatggcagaaggtgctccccctctctgtgacatgcatccaatgagagcactgtttctcattcccagaaaccctcctccccggctgaagtcaaaaaaatggtcgaagaagttttttagttttatagaagggtgcctggtgaagaattacatgcagcggccctctacagagcagcttttgaaacatccttttataagggatcagccaaatgaaaggcaagttagaatccagcttaaggatcatatagatcgtaccaggaagaagagaggcgagaaagatgaaactgagtatgagtacagtgggagtgaggaagaagaggaggaagtgcctgaacaggaaggagagccaagttccattgtgaacgtgcctggtgagtctactcttcgccgagatttcctgagactgcagcaggagaacaaggaacgttccgaggctcttcggagacaacagttactacaggagcaacagctccgggagcaggaagaatataaaaggcaactgctggcagagagacagaagcggattgagcagcagaaagaacagaggcgacggctagaagagcaacaaaggagagagcgggaagctagaaggcagcaggaacgtgaacagcgaaggagagaacaagaagaaaagaggcgtctagaggagttggagagaaggcgcaaagaagaagaggagaggagacgggcagaagaagaaaagaggagagttgaaagagaacaggagtatatcaggcgacagctagaagaggagcagcggcacttggaagtccttcagcagcagctgctccaggagcaggccatgttactgcatgaccataggaggccgcacccgcagcactcgcagcagccgccaccaccgcagcaggaaaggagcaagccaagcttccatgctcccgagcccaaagcccactacgagcctgctgaccgagcgcgagaggttcctgtgagaacaacatctcgctcccctgttctgtcccgtcgagattccccactgcagggcagtgggcagcagaatagccaggcaggacagagaaactccaccagtattgagcccaggcttctgtgggagagagtggagaagctggtgcccagacctggcagtggcagctcctcagggtccagcaactcaggatcccagcccgggtctcaccctgggtctcagagtggctccggggaacgcttcagagtgagatcatcatccaagtctgaaggctctccatctcagcgcctggaaaatgcagtgaaaaaacctgaagataaaaaggaagttttcagacccctcaagcctgctgatctgaccgcactggccaaagagcttcgagcagtggaagatgtacggccacctcacaaagtaacggactactcctcatccagtgaggagtcggggacgacggatgaggaggacgacgatgtggagcaggaaggggctgacgagtccacctcaggaccagaggacaccagagcagcgtcatctctgaatttgagcaatggtgaaacggaatctgtgaaaaccatgattgtccatgatgatgtagaaagtgagccggccatgaccccatccaaggagggcactctaatcgtccgccagactcagtccgctagtagcacactccagaaacacaaatcttcctcctcctttacaccttttatagaccccagattactacagatttctccatctagcggaacaacagtgacatctgtggtgggattttcctgtgatgggatgagaccagaagccataaggcaagatcctacccggaaaggctcagtggtcaatgtgaatcctaccaacactaggccacagagtgacaccccggagattcgtaaatacaagaagaggtttaactctgagattctgtgtgctgccttatggggagtgaatttgctagtgggtacagagagtggcctgatgctgctggacagaagtggccaagggaaggtctatcctcttatcaaccgaagacgatttcaacaaatggacgtacttgagggcttgaatgtcttggtgacaatatctggcaaaaaggataagttacgtgtctactatttgtcctggttaagaaataaaatacttcacaatgatccagaagttgagaagaagcagggatggacaaccgtaggggatttggaaggatgtgtacattataaagttgtaaaatatgaaagaatcaaatttctggtgattgctttgaagagttctgtggaagtctatgcgtgggcaccaaagccatatcacaaatttatggcctttaagtcatttggagaattggtacataagccattactggtggatctcactgttgaggaaggccagaggttgaaagtgatctatggatcctgtgctggattccatgctgttgatgtggattcaggatcagtctatgacatttatctaccaacacatatccagtgtagcatcaaaccccatgcaatcatcatcctccccaatacagatggaatggagcttctggtgtgctatgaagatgagggggtttatgtaaacacatatggaaggatcaccaaggatgtagttctacagtggggagagatgcctacatcagtagcatatattcgatccaatcagacaatgggctggggagagaaggccatagagatccgatctgtggaaactggtcacttggatggtgtgttcatgcacaaaagggctcaaagactaaaattcttgtgtgaacgcaatgacaaggtgttctttgcctctgttcggtctggtggcagcagtcaggtttatttcatgaccttaggcaggacttctcttctgagctggtagaagcagtgtgatccagggattactggcctccagagtcttcaagatcctgagaacttggaattccttgtaactggagctcggagctgcaccgagggcaaccaggacagctgtgtgtgcagacctcatgtgttgggttctctcccctccttcctgttcctcttatataccagtttatccccattctttttttttttcttactccaaaataaatcaaggctgcaatgcagctggtgctgttcagattctaccatcaggtgctataagtgtttgggattgagcatcatactggaaagcaaacacctttcctccagctccagaattccttgtctctgaatgactctgtcttgtgggtgtctgacagtggcgacgatgaacatgccgttggttttattggcagtgggcacaaggaggtgagaagtggtggtaaaaggagcggagtgctgaagcagagagcagatttaatatagtaacattaacagtgtatttaattgacatttcttttttgtaatgtgacgatatgtggacaaagaagaagatgcaggtttaagaagttaatatttataaaatgtgaaagacacagttactaggataacttttttgtgggtggggcttgggagatggggtggggtgggttaaggggtcccattttgtttctttggatttggggtgggggtcctggccaagaactcagtcatttttctgtgtaccaggttgcctaaatcatgtgcagatggttctaaaaaaaaaaaaaaaaaaaaaaaaaaaaggaaaaaaaaaaagaaaaagaaaacgtgtgcattttgtataatggccagaactttgtcgtgtgacagtattagcactgcctcagttaaaggtttaatttttgtttaaacctagacgtgcaacaaaagttttaccacagtctgcacttgcagaagaaagaaaaaaattcaaaccacatgtttattttttttttgcctacctcattgttcttaatgcattgagaggtgatttagtttatatgtttttggaagaaaccattaatgtttaatttaatcttaataccaaaacgaccagattgaagtttgacttttattgtcacaaatcagcaggcacaagaactgtccatgaagatgggaaatagccttaaggctgatgcagtttacttacaagtttagaaaccagaatgctttgtttttaccagattcaccattagaggttgatggggcaactgcagcccatgacacaagatctcattgttctcgatgtagaggggttggtagcagacaggtggttacattagaatagtcacacaaactgttcagtgttgcaggaaccttttcttgggggtgggggagtttcccttttctaaaaatgcaatgcactaaaactattttaagaatgtagttaattctgcttattcataaagtgggcatcttctgtgttttaggtgtaatatcgaagtcctggcttttctcgttttctcacttgctctcttgttctctgtttttttaaaccaattttactttatgaatatattcatgacatttgtaataaatgtcttgagaaagaatttgtttcatggcttcatggtcatcactcaagctcccgtaaggatattaccgtctcaggaaaggatcaggactccatgtcacagtcctgccatcttactttcctcttgtcgagttctgagtggaaataactgcattatggctgctttaacctcagtcatcaaaagaaacttgctgttttttaggcttgatctttttcctttgtggttaattttcctgtatattgtgaaaatgggggattttccctctgctcccacccacctaaacacagcagccatttgtacctgtttgcttcccatcccacttggcacccactctgacctcttgtcagtttcctgttcctggttccatctttttgaaaaaggccctcctttgagctacaaacatctggtaagacaagtacatccactcatgaatgcagacacagcagctggtggttttgtgtatacctgtaaagacaagctgagaagcttactttttggggaagtaaaagaagatggaaatggatgtttcatttgtatgagtttggagcagtgctgaaggccaaagccgcctactggtttgtagttaacctagagaaggttgaaaaattaatcctacctttaaagggatttgaggtaggctggattccatcgccacaggactttagttagaattaaattcctgcttgtaatttatatccatgtttaggcttttcataagatgaaacatgccacagtgaacacactcgtgtacatatcaagagaagaaggaaaggcacaggtggagaacagtaaaaggtgggcagatgtctttgaagaaatgctcaatgtctgatgctaagtgggagaaggcagagaacaaaggatgtggcataatggtcttaacattatccaaagacttgaagctccatgtctgtaagtcaaatgttacacaaaaaaaaatgcaaatggtgtttcattggaattaccaagtgcttagaacttgctggctttcccataggtggtaaaggggtctgagctcacaccgagttgtgcttggcttgcttgtgcagctccaggcacccggtgggcactctggtggtgtttgtggtgaactgaattgaatccattgttgggcttaagttactgaaattggaacaccctttgtccttctcggcgggggcttcctggtctgtgctttacttggcttttttccttcccgtcttagcctcacccccttgtcaaccagattgagttgctatagcttgatgcagggacccagtgaagtttctccgttaaagattgggagtcgtcgaaatgtttagattcttttaggaaaggaattattttccccccttttacagggtagtaacttctccacagaagtgccaatatggcaaaattacacaagaaaacagtattgcaatgacaccattacataaggaacattgaactgttagaggagtgctcttccaaacaaaacaaaaatgtctctaggtttagtcagagctttcacaagtaataacctttctgtattaaaatcagagtaaccctttctgtattgagtgcagtgttttttactcttttctcatgcacatgttacgttggagaaaatgtttacaaaaatggttttgttacactaatgcgcaccacatatttatggtttattttaagtgactttttatgggttatttaggttttcgtcttagttgtagcacacttaccctaattttgccaattattaatttgctaaatagtaatacaaatgacaaactgcattaaatttactaattataaaagctgcaaagcagactggtggcaagtacacagcccttttttttgcagtgctaacttgtctactgtgtattatgaaaattactgttgtccccccacccttttttccttaaataaagtaaaaatgacac

SEQ ID NO: 155080 - DNA, 4403 bp, Homo sapiens
  Payload ID: 10484
  Gene Symbol: MAP4K4
  Gene Name: mitogen-activated protein kinase kinase kinase kinase 4
  ENST ID: ENST00000425019
  CDS Start-End: 338-4156
gggcccgtcctcgaggcgcgcggcgcggggcgcgggcgccggggcctgaggcggcgggcgacgcccgggggcctgacggccggccccgcgccatggtgtgagcgccgccgcccgtgcacgctccgtccgccctccgcgcggcccggccggcagagagccccgagcggcccgagagcgcagccgagcccgccgccgccgcccgcggccccgcgaggagagtaccgggccggctcggctgccgcgcgaggagcgcggtcggcggcctggtctgcggctgagatacacagagcgacagagacatttattgttatttgttttttggtggcaaaaagggaaaatggcgaacgactcccctgcaaaaagtctggtggacatcgacctctcctccctgcgggatcctgctgggatttttgagctggtggaagtggttggaaatggcacctatggacaagtctataagggtcgacatgttaaaacgggtcagttggcagccatcaaagttatggatgtcactgaggatgaagaggaagaaatcaaactggagataaatatgctaaagaaatactctcatcacagaaacattgcaacatattatggtgctttcatcaaaaagagccctccaggacatgatgaccaactctggcttgttatggagttctgtggggctgggtccattacagaccttgtgaagaacaccaaagggaacacactcaaagaagactggatcgcttacatctccagagaaatcctgaggggactggcacatcttcacattcatcatgtgattcaccgggatatcaagggccagaatgtgttgctgactgagaatgcagaggtgaaacttgttgactttggtgtgagtgctcagctggacaggactgtggggcggagaaatacgttcataggcactccctactggatggctcctgaggtcatcgcctgtgatgagaacccagatgccacctatgattacagaagtgatctttggtcttgtggcattacagccattgagatggcagaaggtgctccccctctctgtgacatgcatccaatgagagcactgtttctcattcccagaaaccctcctccccggctgaagtcaaaaaaatggtcgaagaagttttttagttttatagaagggtgcctggtgaagaattacatgcagcggccctctacagagcagcttttgaaacatccttttataagggatcagccaaatgaaaggcaagttagaatccagcttaaggatcatatagatcgtaccaggaagaagagaggcgagaaagatgaaactgagtatgagtacagtgggagtgaggaagaagaggaggaagtgcctgaacaggaaggagagccaagttccattgtgaacgtgcctggtgagtctactcttcgccgagatttcctgagactgcagcaggagaacaaggaacgttccgaggctcttcggagacaacagttactacaggagcaacagctccgggagcaggaagaatataaaaggcaactgctggcagagagacagaagcggattgagcagcagaaagaacagaggcgacggctagaagagcaacaaaggagagagcgggaagctagaaggcagcaggaacgtgaacagcgaaggagagaacaagaagaaaagaggcgtctagaggagttggagagaaggcgcaaagaagaagaggagaggagacgggcagaagaagaaaagaggagagttgaaagagaacaggagtatatcaggcgacagctagaagaggagcagcggcacttggaagtccttcagcagcagctgctccaggagcaggccatgttactgcatgaccataggaggccgcacccgcagcactcgcagcagccgccaccaccgcagcaggaaaggagcaagccaagcttccatgctcccgagcccaaagcccactacgagcctgctgaccgagcgcgagaggtggaagatagatttaggaaaactaaccacagctcccctgaagcccagtctaagcagacaggcagagtattggagccaccagtgccttcccgatcagagtctttttccaatggcaactccgagtctgtgcatcccgccctgcagagaccagcggagccacaggttcctgtgagaacaacatctcgctcccctgttctgtcccgtcgagattccccactgcagggcagtgggcagcagaatagccaggcaggacagagaaactccaccagtattgagcccaggcttctgtgggagagagtggagaagctggtgcccagacctggcagtggcagctcctcagggtccagcaactcaggatcccagcccgggtctcaccctgggtctcagagtggctccggggaacgcttcagagtgagatcatcatccaagtctgaaggctctccatctcagcgcctggaaaatgcagtgaaaaaacctgaagataaaaaggaagttttcagacccctcaagcctgctgatctgaccgcactggccaaagagcttcgagcagtggaagatgtacggccacctcacaaagtaacggactactcctcatccagtgaggagtcggggacgacggatgaggaggacgacgatgtggagcaggaaggggctgacgagtccacctcaggaccagaggacaccagagcagcgtcatctctgaatttgagcaatggtgaaacggaatctgtgaaaaccatgattgtccatgatgatgtagaaagtgagccggccatgaccccatccaaggagggcactctaatcgtccgccagagtacagttgaccaaaagcgtgccagccatcatgagagcaatggctttgccggtcgcattcacctcttgccagatctcttacagcaaagccattcctcctccacttcctccacctcctcctccccatcctccagccagccgacacccaccatgtccccacagacaccccaggacaagctcactgctaatgagactcagtccgctagtagcacactccagaaacacaaatcttcctcctcctttacaccttttatagaccccagattactacagatttctccatctagcggaacaacagtgacatctgtggtgggattttcctgtgatgggatgagaccagaagccataaggcaagatcctacccggaaaggctcagtggtcaatgtgaatcctaccaacactaggccacagagtgacaccccggagattcgtaaatacaagaagaggtttaactctgagattctgtgtgctgccttatggggagtgaatttgctagtgggtacagagagtggcctgatgctgctggacagaagtggccaagggaaggtctatcctcttatcaaccgaagacgatttcaacaaatggacgtacttgagggcttgaatgtcttggtgacaatatctggcaaaaaggataagttacgtgtctactatttgtcctggttaagaaataaaatacttcacaatgatccagaagttgagaagaagcagggatggacaaccgtaggggatttggaaggatgtgtacattataaagttgtaaaatatgaaagaatcaaatttctggtgattgctttgaagagttctgtggaagtctatgcgtgggcaccaaagccatatcacaaatttatggcctttaagtcatttggagaattggtacataagccattactggtggatctcactgttgaggaaggccagaggttgaaagtgatctatggatcctgtgctggattccatgctgttgatgtggattcaggatcagtctatgacatttatctaccaacacatatccagtgtagcatcaaaccccatgcaatcatcatcctccccaatacagatggaatggagcttctggtgtgctatgaagatgagggggtttatgtaaacacatatggaaggatcaccaaggatgtagttctacagtggggagagatgcctacatcagtagcatatattcgatccaatcagacaatgggctggggagagaaggccatagagatccgatctgtggaaactggtcacttggatggtgtgttcatgcacaaaagggctcaaagactaaaattcttgtgtgaacgcaatgacaaggtgttctttgcctctgttcggtctggtggcagcagtcaggtttatttcatgaccttaggcaggacttctcttctgagctggtagaagcagtgtgatccagggattactggcctccagagtcttcaagatcctgagaacttggaattccttgtaactggagctcggagctgcaccgagggcaaccaggacagctgtgtgtgcagacctcatgtgttgggttctctcccctccttcctgttcctcttatataccagtttatccccattctttttttttttcttactccaaaataaatcaaggctgcaatgcagctggtgctgttcagattcta

SEQ ID NO: 155081 - DNA, 3416 bp, Homo sapiens
  Payload ID: 10484
  Gene Symbol: MAP4K4
  Gene Name: mitogen-activated protein kinase kinase kinase kinase 4
  ENST ID: ENST00000421882
  CDS Start-End: 1-3169
gttttttagttttatagaagggtgcctggtgaagaattacatgcagcggccctctacagagcagcttttgaaacatccttttataagggatcagccaaatgaaaggcaagttagaatccagcttaaggatcatatagatcgtaccaggaagaagagaggcgagaaagatgaaactgagtatgagtacagtgggagtgaggaagaagaggaggaagtgcctgaacaggaaggagagccaagttccattgtgaacgtgcctggtgagtctactcttcgccgagatttcctgagactgcagcaggagaacaaggaacgttccgaggctcttcggagacaacagttactacaggagcaacagctccgggagcaggaagaatataaaaggcaactgctggcagagagacagaagcggattgagcagcagaaagaacagaggcgacggctagaagagcaacaaaggagagagcgggaagctagaaggcagcaggaacgtgaacagcgaaggagagaacaagaagaaaagaggcgtctagaggagttggagagaaggcgcaaagaagaagaggagaggagacgggcagaagaagaaaagaggagagttgaaagagaacaggagtatatcaggcgacagctagaagaggagcagcggcacttggaagtccttcagcagcagctgctccaggagcaggccatgttactggagtgccgatggcgggagatggaggagcaccggcaggcagagaggctccagaggcagttgcaacaagaacaagcatatctcctgtctctacagcatgaccataggaggccgcacccgcagcactcgcagcagccgccaccaccgcagcaggaaaggagcaagccaagcttccatgctcccgagcccaaagcccactacgagcctgctgaccgagcgcgagaggtggaagatagatttaggaaaactaaccacagctcccctgaagcccagtctaagcagacaggcagagtattggagccaccagtgccttcccgatcagagtctttttccaatggcaactccgagtctgtgcatcccgccctgcagagaccagcggagccacaggtacagtggtcccacctggcatctctcaagaacaatgtttcccctgtctcgcgatcccattccttcagtgacccttctcccaaatttgcacaccaccatcttcgttctcaggacccatgtccaccttcccgcagtgaggtgctcagtcagagctctgactctaagtcagaggcgcctgaccctacccaaaaggcttggtctagatcagacagtgacgaggtgcctccaagggttcctgtgagaacaacatctcgctcccctgttctgtcccgtcgagattccccactgcagggcagtgggcagcagaatagccaggcaggacagagaaactccaccagtattgagcccaggcttctgtgggagagagtggagaagctggtgcccagacctggcagtggcagctcctcagggtccagcaactcaggatcccagcccgggtctcaccctgggtctcagagtggctccggggaacgcttcagagtgagatcatcatccaagtctgaaggctctccatctcagcgcctggaaaatgcagtgaaaaaacctgaagataaaaaggaagttttcagacccctcaagcctgctgatctgaccgcactggccaaagagcttcgagcagtggaagatgtacggccacctcacaaagtaacggactactcctcatccagtgaggagtcggggacgacggatgaggaggacgacgatgtggagcaggaaggggctgacgagtccacctcaggaccagaggacaccagagcagcgtcatctctgaatttgagcaatggtgaaacggaatctgtgaaaaccatgattgtccatgatgatgtagaaagtgagccggccatgaccccatccaaggagggcactctaatcgtccgccagactcagtccgctagtagcacactccagaaacacaaatcttcctcctcctttacaccttttatagaccccagattactacagatttctccatctagcggaacaacagtgacatctgtggtgggattttcctgtgatgggatgagaccagaagccataaggcaagatcctacccggaaaggctcagtggtcaatgtgaatcctaccaacactaggccacagagtgacaccccggagattcgtaaatacaagaagaggtttaactctgagattctgtgtgctgccttatggggagtgaatttgctagtgggtacagagagtggcctgatgctgctggacagaagtggccaagggaaggtctatcctcttatcaaccgaagacgatttcaacaaatggacgtacttgagggcttgaatgtcttggtgacaatatctggcaaaaaggataagttacgtgtctactatttgtcctggttaagaaataaaatacttcacaatgatccagaagttgagaagaagcagggatggacaaccgtaggggatttggaaggatgtgtacattataaagttgtaaaatatgaaagaatcaaatttctggtgattgctttgaagagttctgtggaagtctatgcgtgggcaccaaagccatatcacaaatttatggcctttaagtcatttggagaattggtacataagccattactggtggatctcactgttgaggaaggccagaggttgaaagtgatctatggatcctgtgctggattccatgctgttgatgtggattcaggatcagtctatgacatttatctaccaacacatatccagtgtagcatcaaaccccatgcaatcatcatcctccccaatacagatggaatggagcttctggtgtgctatgaagatgagggggtttatgtaaacacatatggaaggatcaccaaggatgtagttctacagtggggagagatgcctacatcagtagcatatattcgatccaatcagacaatgggctggggagagaaggccatagagatccgatctgtggaaactggtcacttggatggtgtgttcatgcacaaaagggctcaaagactaaaattcttgtgtgaacgcaatgacaaggtgttctttgcctctgttcggtctggtggcagcagtcaggtttatttcatgaccttaggcaggacttctcttctgagctggtagaagcagtgtgatccagggattactggcctccagagtcttcaagatcctgagaacttggaattccttgtaactggagctcggagctgcaccgagggcaaccaggacagctgtgtgtgcagacctcatgtgttgggttctctcccctccttcctgttcctcttatataccagtttatccccattctttttttttttcttactccaaaataaatcaaggctgcaatgcagctggtgctgttcagattcta

SEQ ID NO: 155082 - DNA, 526 bp, Homo sapiens
  Payload ID: 10484
  Gene Symbol: MAP4K4
  Gene Name: mitogen-activated protein kinase kinase kinase kinase 4
  ENST ID: ENST00000427603
  CDS Start-End: 221-526
aaacacagtgctcacctaccgagcgcagccaggagcgcagcgccagacaattacaggagctgttttggatatggccgggcagcccagcgatgctcagcgaatcccacaactacaaccacaaccgtaccacacatttagcctgcaaaagcagagaaaggaaaagaaaaccgtgcagggaagccggaaacgagggacttaagggtctcctctctaggggaaaatggcgaacgactcccctgcaaaaagtctggtggacatcgacctctcctccctgcgggatcctgctgggatttttgagctggtggaagtggttggaaatggcacctatggacaagtctataagggtcgacatgttaaaacgggtcagttggcagccatcaaagttatggatgtcactgaggatgaagaggaagaaatcaaactggagataaatatgctaaagaaatactctcatcacagaaacattgcaacatattatggtgctttcatcaaaaagagccctccaggacatgatgaccaactctgg

SEQ ID NO: 155083 - DNA, 4251 bp, Homo sapiens
  Payload ID: 10484
  Gene Symbol: MAP4K4
  Gene Name: mitogen-activated protein kinase kinase kinase kinase 4
  ENST ID: ENST00000417294
  CDS Start-End: 1-3513
gtctataagggtcgacatgttaaaacgggtcagttggcagccatcaaagttatggatgtcactgaggatgaagaggaagaaatcaaactggagataaatatgctaaagaaatactctcatcacagaaacattgcaacatattatggtgctttcatcaaaaagagccctccaggacatgatgaccaactctggcttgttatggagttctgtggggctgggtccattacagaccttgtgaagaacaccaaagggaacacactcaaagaagactggatcgcttacatctccagagaaatcctgaggggactggcacatcttcacattcatcatgtgattcaccgggatatcaagggccagaatgtgttgctgactgagaatgcagaggtgaaacttgttgactttggtgtgagtgctcagctggacaggactgtggggcggagaaatacgttcataggcactccctactggatggctcctgaggtcatcgcctgtgatgagaacccagatgccacctatgattacagaagtgatctttggtcttgtggcattacagccattgagatggcagaaggtgctccccctctctgtgacatgcatccaatgagagcactgtttctcattcccagaaaccctcctccccggctgaagtcaaaaaaatggtcgaagaagttttttagttttatagaagggtgcctggtgaagaattacatgcagcggccctctacagagcagcttttgaaacatccttttataagggatcagccaaatgaaaggcaagttagaatccagcttaaggatcatatagatcgtaccaggaagaagagaggcgagaaagatgaaactgagtatgagtacagtgggagtgaggaagaagaggaggaagtgcctgaacaggaaggagagccaagttccattgtgaacgtgcctggtgagtctactcttcgccgagatttcctgagactgcagcaggagaacaaggaacgttccgaggctcttcggagacaacagttactacaggagcaacagctccgggagcaggaagaatataaaaggcaactgctggcagagagacagaagcggattgagcagcagaaagaacagaggcgacggctagaagagcaacaaaggagagagcgggaagctagaaggcagcaggaacgtgaacagcgaaggagagaacaagaagaaaagaggcgtctagaggagttggagagaaggcgcaaagaagaagaggagaggagacgggcagaagaagaaaagaggagagttgaaagagaacaggagtatatcaggcgacagctagaagaggagcagcggcacttggaagtccttcagcagcagctgctccaggagcaggccatgttactgcatgaccataggaggccgcacccgcagcactcgcagcagccgccaccaccgcagcaggaaaggagcaagccaagcttccatgctcccgagcccaaagcccactacgagcctgctgaccgagcgcgagaggtggaagatagatttaggaaaactaaccacagctcccctgaagcccagtctaagcagacaggcagagtattggagccaccagtgccttcccgatcagagtctttttccaatggcaactccgagtctgtgcatcccgccctgcagagaccagcggagccacaggttcctgtgagaacaacatctcgctcccctgttctgtcccgtcgagattccccactgcagggcagtgggcagcagaatagccaggcaggacagagaaactccaccagtattgagcccaggcttctgtgggagagagtggagaagctggtgcccagacctggcagtggcagctcctcagggtccagcaactcaggatcccagcccgggtctcaccctgggtctcagagtggctccggggaacgcttcagagtgagatcatcatccaagtctgaaggctctccatctcagcgcctggaaaatgcagtgaaaaaacctgaagataaaaaggaagttttcagacccctcaagcctgctgatctgaccgcactggccaaagagcttcgagcagtggaagatgtacggccacctcacaaagtaacggactactcctcatccagtgaggagtcggggacgacggatgaggaggacgacgatgtggagcaggaaggggctgacgagtccacctcaggaccagaggacaccagagcagcgtcatctctgaatttgagcaatggtgaaacggaatctgtgaaaaccatgattgtccatgatgatgtagaaagtgagccggccatgaccccatccaaggagggcactctaatcgtccgccagactcagtccgctagtagcacactccagaaacacaaatcttcctcctcctttacaccttttatagaccccagattactacagatttctccatctagcggaacaacagtgacatctgtggtgggattttcctgtgatgggatgagaccagaagccataaggcaagatcctacccggaaaggctcagtggtcaatgtgaatcctaccaacactaggccacagagtgacaccccggagattcgtaaatacaagaagaggtttaactctgagattctgtgtgctgccttatggggagtgaatttgctagtgggtacagagagtggcctgatgctgctggacagaagtggccaagggaaggtctatcctcttatcaaccgaagacgatttcaacaaatggacgtacttgagggcttgaatgtcttggtgacaatatctggcaaaaaggataagttacgtgtctactatttgtcctggttaagaaataaaatacttcacaatgatccagaagttgagaagaagcagggatggacaaccgtaggggatttggaaggatgtgtacattataaagttgtaaaatatgaaagaatcaaatttctggtgattgctttgaagagttctgtggaagtctatgcgtgggcaccaaagccatatcacaaatttatggcctttaagtcatttggagaattggtacataagccattactggtggatctcactgttgaggaaggccagaggttgaaagtgatctatggatcctgtgctggattccatgctgttgatgtggattcaggatcagtctatgacatttatctaccaacacatatccagtgtagcatcaaaccccatgcaatcatcatcctccccaatacagatggaatggagcttctggtgtgctatgaagatgagggggtttatgtaaacacatatggaaggatcaccaaggatgtagttctacagtggggagagatgcctacatcagtagcatatattcgatccaatcagacaatgggctggggagagaaggccatagagatccgatctgtggaaactggtcacttggatggtgtgttcatgcacaaaagggctcaaagactaaaattcttgtgtgaacgcaatgacaaggtgttctttgcctctgttcggtctggtggcagcagtcaggtttatttcatgaccttaggcaggacttctcttctgagctggtagaagcagtgtgatccagggattactggcctccagagtcttcaagatcctgagaacttggaattccttgtaactggagctcggagctgcaccgagggcaaccaggacagctgtgtgtgcagacctcatgtgttgggttctctcccctccttcctgttcctcttatataccagtttatccccattctttttttttttcttactccaaaataaatcaaggctgcaatgcagctggtgctgttcagattctaccatcaggtgctataagtgtttgggattgagcatcatactggaaagcaaacacctttcctccagctccagaattccttgtctctgaatgactctgtcttgtgggtgtctgacagtggcgacgatgaacatgccgttggttttattggcagtgggcacaaggaggtgagaagtggtggtaaaaggagcggagtgctgaagcagagagcagatttaatatagtaacattaacagtgtatttaattgacatttcttttttgtaatgtgacgatatgtggacaaagaagaagatgcaggtttaagaagttaatatttataaaatgtgaaagacacagttactaggataacttttttgtgggtggggcttgggagatggggtggggtgggttaaggggtcccattttgtttctttggatttggggtgggggtcctggccaagaactcagtcatttttctgtgtaccaggttgcctaaatcatgtgcagatggttct

SEQ ID NO: 155084 - DNA, 776 bp, Homo sapiens
  Payload ID: 10484
  Gene Symbol: MAP4K4
  Gene Name: mitogen-activated protein kinase kinase kinase kinase 4
  ENST ID: ENST00000418101
  CDS Start-End: 1-776
caacaaaggagagagcgggaagctagaaggcagcaggaacgtgaacagcgaaggagagaacaagaagaaaagaggcgtctagaggagttggagagaaggcgcaaagaagaagaggagaggagacgggcagaagaagaaaagaggagagttgaaagagaacaggagtatatcaggcgacagctagaagaggagcagcggcacttggaagtccttcagcagcagctgctccaggagcaggccatgttactggagtgccgatggcgggagatggaggagcaccggcaggcagagaggctccagaggcagttgcaacaagaacaagcatatctcctgtctctacagcatgaccataggaggccgcacccgcagcactcgcagcagccgccaccaccgcagcaggaaaggagcaagccaagcttccatgctcccgagcccaaagcccactacgagcctgctgaccgagcgcgagaggtacagtggtcccacctggcatctctcaagaacaatgtttcccctgtctcgcgatcccattccttcagtgacccttctcccaaatttgcacaccaccatcttcgttctcaggacccatgtccaccttcccgcagtgaggtgctcagtcagagctctgactctaagtcagaggcgcctgaccctacccaaaaggcttggtctagatcagacagtgacgaggtgcctccaagggttcctgtgagaacaacatctcgctcccctgttctgtcccgtcgagattccccactgcagggcagtgggcagca

SEQ ID NO: 155085 - DNA, 7458 bp, Homo sapiens
  Payload ID: 10484
  Gene Symbol: MAP4K4
  Gene Name: mitogen-activated protein kinase kinase kinase kinase 4
  ENST ID: ENST00000625522
  CDS Start-End: 56-4018
cacagagcgacagagacatttattgttatttgttttttggtggcaaaaagggaaaatggcgaacgactcccctgcaaaaagtctggtggacatcgacctctcctccctgcgggatcctgctgggatttttgagctggtggaagtggttggaaatggcacctatggacaagtctataagggtcgacatgttaaaacgggtcagttggcagccatcaaagttatggatgtcactgaggatgaagaggaagaaatcaaactggagataaatatgctaaagaaatactctcatcacagaaacattgcaacatattatggtgctttcatcaaaaagagccctccaggacatgatgaccaactctggcttgttatggagttctgtggggctgggtccattacagaccttgtgaagaacaccaaagggaacacactcaaagaagactggatcgcttacatctccagagaaatcctgaggggactggcacatcttcacattcatcatgtgattcaccgggatatcaagggccagaatgtgttgctgactgagaatgcagaggtgaaacttgttgactttggtgtgagtgctcagctggacaggactgtggggcggagaaatacgttcataggcactccctactggatggctcctgaggtcatcgcctgtgatgagaacccagatgccacctatgattacagaagtgatctttggtcttgtggcattacagccattgagatggcagaaggtgctccccctctctgtgacatgcatccaatgagagcactgtttctcattcccagaaaccctcctccccggctgaagtcaaaaaaatggtcgaagaagttttttagttttatagaagggtgcctggtgaagaattacatgcagcggccctctacagagcagcttttgaaacatccttttataagggatcagccaaatgaaaggcaagttagaatccagcttaaggatcatatagatcgtaccaggaagaagagaggcgagaaagatgaaactgagtatgagtacagtgggagtgaggaagaagaggaggaagtgcctgaacaggaaggagagccaagttccattgtgaacgtgcctggtgagtctactcttcgccgagatttcctgagactgcagcaggagaacaaggaacgttccgaggctcttcggagacaacagttactacaggagcaacagctccgggagcaggaagaatataaaaggcaactgctggcagagagacagaagcggattgagcagcagaaagaacagaggcgacggctagaagagcaacaaaggagagagcgggaagctagaaggcagcaggaacgtgaacagcgaaggagagaacaagaagaaaagaggcgtctagaggagttggagagaaggcgcaaagaagaagaggagaggagacgggcagaagaagaaaagaggagagttgaaagagaacaggagtatatcaggcgacagctagaagaggagcagcggcacttggaagtccttcagcagcagctgctccaggagcaggccatgttactggagtgccgatggcgggagatggaggagcaccggcaggcagagaggctccagaggcagttgcaacaagaacaagcatatctcctgtctctacagcatgaccataggaggccgcacccgcagcactcgcagcagccgccaccaccgcagcaggaaaggagcaagccaagcttccatgctcccgagcccaaagcccactacgagcctgctgaccgagcgcgagaggtggaagatagatttaggaaaactaaccacagctcccctgaagcccagtctaagcagacaggcagagtattggagccaccagtgccttcccgatcagagtctttttccaatggcaactccgagtctgtgcatcccgccctgcagagaccagcggagccacaggtacagtggtcccacctggcatctctcaagaacaatgtttcccctgtctcgcgatcccattccttcagtgacccttctcccaaatttgcacaccaccatcttcgttctcaggacccatgtccaccttcccgcagtgaggtgctcagtcagagctctgactctaagtcagaggcgcctgaccctacccaaaaggcttggtctagatcagacagtgacgaggtgcctccaagggttcctgtgagaacaacatctcgctcccctgttctgtcccgtcgagattccccactgcagggcagtgggcagcagaatagccaggcaggacagagaaactccaccagcagtattgagcccaggcttctgtgggagagagtggagaagctggtgcccagacctggcagtggcagctcctcagggtccagcaactcaggatcccagcccgggtctcaccctgggtctcagagtggctccggggaacgcttcagagtgagatcatcatccaagtctgaaggctctccatctcagcgcctggaaaatgcagtgaaaaaacctgaagataaaaaggaagttttcagacccctcaagcctgctgtaaggattgatctgaccgcactggccaaagagcttcgagcagtggaagatgtacggccacctcacaaagtaacggactactcctcatccagtgaggagtcggggacgacggatgaggaggacgacgatgtggagcaggaaggggctgacgagtccacctcaggaccagaggacaccagagcagcgtcatctctgaatttgagcaatggtgaaacggaatctgtgaaaaccatgattgtccatgatgatgtagaaagtgagccggccatgaccccatccaaggagggcactctaatcgtccgccagactcagtccgctagtagcacactccagaaacacaaatcttcctcctcctttacaccttttatagaccccagattactacagatttctccatctagcggaacaacagtgacatctgtggtgggattttcctgtgatgggatgagaccagaagccataaggcaagatcctacccggaaaggctcagtggtcaatgtgaatcctaccaacactaggccacagagtgacaccccggagattcgtaaatacaagaagaggtttaactctgagattctgtgtgctgccttatggggagtgaatttgctagtgggtacagagagtggcctgatgctgctggacagaagtggccaagggaaggtctatcctcttatcaaccgaagacgatttcaacaaatggacgtacttgagggcttgaatgtcttggtgacaatatctggcaaaaaggataagttacgtgtctactatttgtcctggttaagaaataaaatacttcacaatgatccagaagttgagaagaagcagggatggacaaccgtaggggatttggaaggatgtgtacattataaagttgtaaaatatgaaagaatcaaatttctggtgattgctttgaagagttctgtggaagtctatgcgtgggcaccaaagccatatcacaaatttatggcctttaagtcatttggagaattggtacataagccattactggtggatctcactgttgaggaaggccagaggttgaaagtgatctatggatcctgtgctggattccatgctgttgatgtggattcaggatcagtctatgacatttatctaccaacacatatccagtgtagcatcaaaccccatgcaatcatcatcctccccaatacagatggaatggagcttctggtgtgctatgaagatgagggggtttatgtaaacacatatggaaggatcaccaaggatgtagttctacagtggggagagatgcctacatcagtagcatatattcgatccaatcagacaatgggctggggagagaaggccatagagatccgatctgtggaaactggtcacttggatggtgtgttcatgcacaaaagggctcaaagactaaaattcttgtgtgaacgcaatgacaaggtgttctttgcctctgttcggtctggtggcagcagtcaggtttatttcatgaccttaggcaggacttctcttctgagctggtagaagcagtgtgatccagggattactggcctccagagtcttcaagatcctgagaacttggaattccttgtaactggagctcggagctgcaccgagggcaaccaggacagctgtgtgtgcagacctcatgtgttgggttctctcccctccttcctgttcctcttatataccagtttatccccattctttttttttttcttactccaaaataaatcaaggctgcaatgcagctggtgctgttcagattctaccatcaggtgctataagtgtttgggattgagcatcatactggaaagcaaacacctttcctccagctccagaattccttgtctctgaatgactctgtcttgtgggtgtctgacagtggcgacgatgaacatgccgttggttttattggcagtgggcacaaggaggtgagaagtggtggtaaaaggagcggagtgctgaagcagagagcagatttaatatagtaacattaacagtgtatttaattgacatttcttttttgtaatgtgacgatatgtggacaaagaagaagatgcaggtttaagaagttaatatttataaaatgtgaaagacacagttactaggataacttttttgtgggtggggcttgggagatggggtggggtgggttaaggggtcccattttgtttctttggatttggggtgggggtcctggccaagaactcagtcatttttctgtgtaccaggttgcctaaatcatgtgcagatggttctaaaaaaaaaaaaaaaaaaaaaaaaaaaaggaaaaaaaaaaagaaaaagaaaacgtgtgcattttgtataatggccagaactttgtcgtgtgacagtattagcactgcctcagttaaaggtttaatttttgtttaaacctagacgtgcaacaaaagttttaccacagtctgcacttgcagaagaaagaaaaaaattcaaaccacatgtttattttttttttgcctacctcattgttcttaatgcattgagaggtgatttagtttatatgtttttggaagaaaccattaatgtttaatttaatcttaataccaaaacgaccagattgaagtttgacttttattgtcacaaatcagcaggcacaagaactgtccatgaagatgggaaatagccttaaggctgatgcagtttacttacaagtttagaaaccagaatgctttgtttttaccagattcaccattagaggttgatggggcaactgcagcccatgacacaagatctcattgttctcgatgtagaggggttggtagcagacaggtggttacattagaatagtcacacaaactgttcagtgttgcaggaaccttttcttgggggtgggggagtttcccttttctaaaaatgcaatgcactaaaactattttaagaatgtagttaattctgcttattcataaagtgggcatcttctgtgttttaggtgtaatatcgaagtcctggcttttctcgttttctcacttgctctcttgttctctgtttttttaaaccaattttactttatgaatatattcatgacatttgtaataaatgtcttgagaaagaatttgtttcatggcttcatggtcatcactcaagctcccgtaaggatattaccgtctcaggaaaggatcaggactccatgtcacagtcctgccatcttactttcctcttgtcgagttctgagtggaaataactgcattatggctgctttaacctcagtcatcaaaagaaacttgctgttttttaggcttgatctttttcctttgtggttaattttcctgtatattgtgaaaatgggggattttccctctgctcccacccacctaaacacagcagccatttgtacctgtttgcttcccatcccacttggcacccactctgacctcttgtcagtttcctgttcctggttccatctttttgaaaaaggccctcctttgagctacaaacatctggtaagacaagtacatccactcatgaatgcagacacagcagctggtggttttgtgtatacctgtaaagacaagctgagaagcttactttttggggaagtaaaagaagatggaaatggatgtttcatttgtatgagtttggagcagtgctgaaggccaaagccgcctactggtttgtagttaacctagagaaggttgaaaaattaatcctacctttaaagggatttgaggtaggctggattccatcgccacaggactttagttagaattaaattcctgcttgtaatttatatccatgtttaggcttttcataagatgaaacatgccacagtgaacacactcgtgtacatatcaagagaagaaggaaaggcacaggtggagaacagtaaaaggtgggcagatgtctttgaagaaatgctcaatgtctgatgctaagtgggagaaggcagagaacaaaggatgtggcataatggtcttaacattatccaaagacttgaagctccatgtctgtaagtcaaatgttacacaaaaaaaaatgcaaatggtgtttcattggaattaccaagtgcttagaacttgctggctttcccataggtggtaaaggggtctgagctcacaccgagttgtgcttggcttgcttgtgcagctccaggcacccggtgggcactctggtggtgtttgtggtgaactgaattgaatccattgttgggcttaagttactgaaattggaacaccctttgtccttctcggcgggggcttcctggtctgtgctttacttggcttttttccttcccgtcttagcctcacccccttgtcaaccagattgagttgctatagcttgatgcagggacccagtgaagtttctccgttaaagattgggagtcgtcgaaatgtttagattcttttaggaaaggaattattttccccccttttacagggtagtaacttctccacagaagtgccaatatggcaaaattacacaagaaaacagtattgcaatgacaccattacataaggaacattgaactgttagaggagtgctcttccaaacaaaacaaaaatgtctctaggtttagtcagagctttcacaagtaataacctttctgtattaaaatcagagtaaccctttctgtattgagtgcagtgttttttactcttttctcatgcacatgttacgttggagaaaatgtttacaaaaatggttttgttacactaatgcgcaccacatatttatggtttattttaagtgactttttatgggttatttaggttttcgtcttagttgtagcacacttaccctaattttgccaattattaatttgctaaatagtaatacaaatgacaaactgcattaaatttactaattataaaagctgcaaagcagactggtggcaagtacacagcccttttttttgcagtgctaacttgtctactgtgtattatgaaaattactgttgtccccccacccttttttccttaaataaagtaaaaatgacacct

SEQ ID NO: 155086 - DNA, 3135 bp, Homo sapiens
  Payload ID: 10484
  Gene Symbol: MAP4K4
  Gene Name: mitogen-activated protein kinase kinase kinase kinase 4
  ENST ID: ENST00000627726
  CDS Start-End: 1-3135
atggcgaacgactcccctgcaaaaagtctggtggacatcgacctctcctccctgcgggatcctgctgggatttttgagctggtggaagtggttggaaatggcacctatggacaagtctataagggtcgacatgttaaaacgggtcagttggcagccatcaaagttatggatgtcactgaggatgaagaggaagaaatcaaactggagataaatatgctaaagaaatactctcatcacagaaacattgcaacatattatggtgctttcatcaaaaagagccctccaggacatgatgaccaactctggcttgttatggagttctgtggggctgggtccattacagaccttgtgaagaacaccaaagggaacacactcaaagaagactggatcgcttacatctccagagaaatcctgaggggactggcacatcttcacattcatcatgtgattcaccgggatatcaagggccagaatgtgttgctgactgagaatgcagaggtgaaacttgatgaaactgagtatgagtacagtgggagtgaggaagaagaggaggaagtgcctgaacaggaaggagagccaagttccattgtgaacgtgcctggtgagtctactcttcgccgagatttcctgagactgcagcaggagaacaaggaacgttccgaggctcttcggagacaacagttactacaggagcaacagctccgggagcaggaagaatataaaaggcaactgctggcagagagacagaagcggattgagcagcagaaagaacagaggcgacggctagaagagcaacaaaggagagagcgggaagctagaaggcagcaggaacgtgaacagcgaaggagagaacaagaagaaaagaggcgtctagaggagttggagagaaggcgcaaagaagaagaggagaggagacgggcagaagaagaaaagaggagagttgaaagagaacaggagtatatcaggcgacagctagaagaggagcagcggcacttggaagtccttcagcagcagctgctccaggagcaggccatgttactggagtgccgatggcgggagatggaggagcaccggcaggcagagaggctccagaggcagttgcaacaagaacaagcatatctcctgtctctacagcatgaccataggaggccgcacccgcagcactcgcagcagccgccaccaccgcagcaggaaaggagcaagccaagcttccatgctcccgagcccaaagcccactacgagcctgctgaccgagcgcgagaggttcctgtgagaacaacatctcgctcccctgttctgtcccgtcgagattccccactgcagggcagtgggcagcagaatagccaggcaggacagagaaactccaccagcagtattgagcccaggcttctgtgggagagagtggagaagctggtgcccagacctggcagtggcagctcctcagggtccagcaactcaggatcccagcccgggtctcaccctgggtctcagagtggctccggggaacgcttcagagtgagatcatcatccaagtctgaaggctctccatctcagcgcctggaaaatgcagtgaaaaaacctgaagataaaaaggaagttttcagacccctcaagcctgctgtaaggattgtgcaggatcagaccgcactggccaaagagcttcgagcagtggaagatgtacggccacctcacaaagtaacggactactcctcatccagtgaggagtcggggacgacggatgaggaggacgacgatgtggagcaggaaggggctgacgagtccacctcaggaccagaggacaccagagcagcgtcatctctgaatttgagcaatggtgaaacggaatctgtgaaaaccatgattgtccatgatgatgtagaaagtgagccggccatgaccccatccaaggagggcactctaatcgtccgccagactcagtccgctagtagcacactccagaaacacaaatcttcctcctcctttacaccttttatagaccccagattactacagatttctccatctagcggaacaacagtgacatctgtggtgggattttcctgtgatgggatgagaccagaagccataaggcaagatcctacccggaaaggctcagtggtcaatgtgaatcctaccaacactaggccacagagtgacaccccggagattcgtaaatacaagaagaggtttaactctgagattctgtgtgctgccttatggggagtgaatttgctagtgggtacagagagtggcctgatgctgctggacagaagtggccaagggaaggtctatcctcttatcaaccgaagacgatttcaacaaatggacgtacttgagggcttgaatgtcttggtgacaatatctggcaaaaaggataagttacgtgtctactatttgtcctggttaagaaataaaatacttcacaatgatccagaagttgagaagaagcagggatggacaaccgtaggggatttggaaggatgtgtacattataaagttgtaaaatatgaaagaatcaaatttctggtgattgctttgaagagttctgtggaagtctatgcgtgggcaccaaagccatatcacaaatttatggcctttaagtcatttggagaattggtacataagccattactggtggatctcactgttgaggaaggccagaggttgaaagtgatctatggatcctgtgctggattccatgctgttgatgtggattcaggatcagtctatgacatttatctaccaacacatatccagtgtagcatcaaaccccatgcaatcatcatcctccccaatacagatggaatggagcttctggtgtgctatgaagatgagggggtttatgtaaacacatatggaaggatcaccaaggatgtagttctacagtggggagagatgcctacatcagtagcatatattcgatccaatcagacaatgggctggggagagaaggccatagagatccgatctgtggaaactggtcacttggatggtgtgttcatgcacaaaagggctcaaagactaaaattcttgtgtgaacgcaatgacaaggtgttctttgcctctgttcggtctggtggcagcagtcaggtttatttcatgaccttaggcaggacttctcttctgagctggtag

SEQ ID NO: 155087 - DNA, 3800 bp, Homo sapiens
  Payload ID: 10484
  Gene Symbol: MAP4K4
  Gene Name: mitogen-activated protein kinase kinase kinase kinase 4
  ENST ID: ENST00000634702
  CDS Start-End: 56-3553
cacagagcgacagagacatttattgttatttgttttttggtggcaaaaagggaaaatggcgaacgactcccctgcaaaaagtctggtggacatcgacctctcctccctgcgggatcctgctgggatttttgagctggtggaagtggttggaaatggcacctatggacaagtctataagggtcgacatgttaaaacgggtcagttggcagccatcaaagttatggatgtcactgaggatgaagaggaagaaatcaaactggagataaatatgctaaagaaatactctcatcacagaaacattgcaacatattatggtgctttcatcaaaaagagccctccaggacatgatgaccaactctggcttgttatggagttctgtggggctgggtccattacagaccttgtgaagaacaccaaagggaacacactcaaagaagactggatcgcttacatctccagagaaatcctgaggggactggcacatcttcacattcatcatgtgattcaccgggatatcaagggccagaatgtgttgctgactgagaatgcagaggtgaaacttgttgactttggtgtgagtgctcagctggacaggactgtggggcggagaaatacgttcataggcactccctactggatggctcctgaggtcatcgcctgtgatgagaacccagatgccacctatgattacagaagtgatctttggtcttgtggcattacagccattgagatggcagaaggtgctccccctctctgtgacatgcatccaatgagagcactgtttctcattcccagaaaccctcctccccggctgaagtcaaaaaaatggtcgaagaagttttttagttttatagaagggtgcctggtgaagaattacatgcagcggccctctacagagcagcttttgaaacatccttttataagggatcagccaaatgaaaggcaagttagaatccagcttaaggatcatatagatcgtaccaggaagaagagaggcgagaaagatgaaactgagtatgagtacagtgggagtgaggaagaagaggaggaagtgcctgaacaggaaggagagccaagttccattgtgaacgtgcctggtgagtctactcttcgccgagatttcctgagactgcagcaggagaacaaggaacgttccgaggctcttcggagacaacagttactacaggagcaacagctccgggagcaggaagaatataaaaggcaactgctggcagagagacagaagcggattgagcagcagaaagaacagaggcgacggctagaagagcaacaaaggagagagcgggaagctagaaggcagcaggaacgtgaacagcgaaggagagaacaagaagaaaagaggcgtctagaggagttggagagaaggcgcaaagaagaagaggagaggagacgggcagaagaagaaaagaggagagttgaaagagaacaggagtatatcaggcgacagctagaagaggagcagcggcacttggaagtccttcagcagcagctgctccaggagcaggccatgttactgcatgaccataggaggccgcacccgcagcactcgcagcagccgccaccaccgcagcaggaaaggagcaagccaagcttccatgctcccgagcccaaagcccactacgagcctgctgaccgagcgcgagaggttcctgtgagaacaacatctcgctcccctgttctgtcccgtcgagattccccactgcagggcagtgggcagcagaatagccaggcaggacagagaaactccaccagtattgagcccaggcttctgtgggagagagtggagaagctggtgcccagacctggcagtggcagctcctcagggtccagcaactcaggatcccagcccgggtctcaccctgggtctcagagtggctccggggaacgcttcagagtgagatcatcatccaagtctgaaggctctccatctcagcgcctggaaaatgcagtgaaaaaacctgaagataaaaaggaagttttcagacccctcaagcctgctggcgaagtggatctgaccgcactggccaaagagcttcgagcagtggaagatgtacggccacctcacaaagtaacggactactcctcatccagtgaggagtcggggacgacggatgaggaggacgacgatgtggagcaggaaggggctgacgagtccacctcaggaccagaggacaccagagcagcgtcatctctgaatttgagcaatggtgaaacggaatctgtgaaaaccatgattgtccatgatgatgtagaaagtgagccggccatgaccccatccaaggagggcactctaatcgtccgccagactcagtccgctagtagcacactccagaaacacaaatcttcctcctcctttacaccttttatagaccccagattactacagatttctccatctagcggaacaacagtgacatctgtggtgggattttcctgtgatgggatgagaccagaagccataaggcaagatcctacccggaaaggctcagtggtcaatgtgaatcctaccaacactaggccacagagtgacaccccggagattcgtaaatacaagaagaggtttaactctgagattctgtgtgctgccttatggggagtgaatttgctagtgggtacagagagtggcctgatgctgctggacagaagtggccaagggaaggtctatcctcttatcaaccgaagacgatttcaacaaatggacgtacttgagggcttgaatgtcttggtgacaatatctggcaaaaaggataagttacgtgtctactatttgtcctggttaagaaataaaatacttcacaatgatccagaagttgagaagaagcagggatggacaaccgtaggggatttggaaggatgtgtacattataaagttgtaaaatatgaaagaatcaaatttctggtgattgctttgaagagttctgtggaagtctatgcgtgggcaccaaagccatatcacaaatttatggcctttaagtcatttggagaattggtacataagccattactggtggatctcactgttgaggaaggccagaggttgaaagtgatctatggatcctgtgctggattccatgctgttgatgtggattcaggatcagtctatgacatttatctaccaacacatgtaagaaagaacccacactctatgatccagtgtagcatcaaaccccatgcaatcatcatcctccccaatacagatggaatggagcttctggtgtgctatgaagatgagggggtttatgtaaacacatatggaaggatcaccaaggatgtagttctacagtggggagagatgcctacatcagtagcatatattcgatccaatcagacaatgggctggggagagaaggccatagagatccgatctgtggaaactggtcacttggatggtgtgttcatgcacaaaagggctcaaagactaaaattcttgtgtgaacgcaatgacaaggtgttctttgcctctgttcggtctggtggcagcagtcaggtttatttcatgaccttaggcaggacttctcttctgagctggtagaagcagtgtgatccagggattactggcctccagagtcttcaagatcctgagaacttggaattccttgtaactggagctcggagctgcaccgagggcaaccaggacagctgtgtgtgcagacctcatgtgttgggttctctcccctccttcctgttcctcttatataccagtttatccccattctttttttttttcttactccaaaataaatcaaggctgcaatgcagctggtgctgttcagattcta

SEQ ID NO: 155088 - DNA, 4354 bp, Homo sapiens
  Payload ID: 10485
  Gene Symbol: MAP4K5
  Gene Name: mitogen-activated protein kinase kinase kinase kinase 5
  ENST ID: ENST00000013125
  CDS Start-End: 320-2860
gggtggggaacgtggtgcggcggcggcggcggcggcgactgtacgcgcctccgccgcccccgagaggacgcgccgtgcagcggctgagtggcggcggcggcgacggcaaacccggagctgccggccggcgcgcgggaggaggacgcgggtgcggtctaggaagtaggtcccgggctccgcgctcaacaaagacggggccgcccccattagacggagctgcgggcggaggctccatgttgggaagcggcgccgttcgtgcttgttagcgggaatccgggagccgcggggtgagctggcgggggccgggccctaagtgaagatggaggccccgctgcggcctgccgcggacatcctgaggcggaacccgcagcaggactacgaactcgtccagagggtcggcagcggcacctacggggacgtctataaggccagaaatgtacacacaggagagctggctgcagtaaaaatcattaaattggagcctggagatgatttttctttgattcaacaagaaatatttatggttaaagaatgtaaacattgtaacatcgttgcctactttgggagttatcttagtcgggaaaaactatggatttgtatggaatactgtggtggcggatcacttcaagatatttaccatgttactggaccattatcagaattgcaaatagcctatgtatgcagagaaaccttacagggtcttgcctatttgcatactaaaggcaaaatgcatagagatatcaaaggtgctaatattttattgacagaccatggcgatgtaaaattagctgactttggtgtggctgcaaaaataacagctaccattgcaaaacgaaaatctttcattggcaccccttactggatggccccagaagttgcagcagtagagaagaatggtggctacaaccaactctgtgatatctgggcagtaggaataacagcaattgaacttggagaacttcagccacctatgtttgatctccacccaatgagggctctcttcttaatgtcaaaaagtaattttcagcctccaaaactaaaggacaaaacaaaatggtcatcaacattccataattttgtcaaaatagcactaaccaaaaacccaaaaaaaagaccaactgctgaaagacttctgactcacacttttgttgcacagccaggtctctctagagccctagcagttgaactgttagacaaagtgaacaatccagataaccacgcacattacactgaagcagatgacgatgactttgagccccatgcaatcattcgtcataccattagatctacaaacaggaatgccagagctgaacggacagcttcagaaataaattttgacaaattacaatttgaacctcctctgagaaaagaaacagaagcacgagatgaaatgggattgtcatcagacccaaatttcatgttacagtggaatccttttgttgatggtgcaaatactggcaaatcaacctcaaaacgtgcaataccacctcccctacctcctaagccaaggataagcagttaccctgaagacaactttccggatgaagaaaaagcatcaaccataaaacattgtcctgattcagaaagcagagctccccaaattctcagaagacagagtagcccaagttgtgggcctgtggcagagacttcttctattggaaatggtgatggtatttcaaaactgatgagtgaaaatacagaaggatcagcacaagcaccacagttaccacgaaaaaaggacaaacgagacttccctaaaccagccatcaatggccttccacccaccccaaaagttctgatgggagcatgcttttcaaaagtttttgatggctgtcctttgaaaattaattgtgcaacatcctggatacatcctgatacaaaagatcagtacattatttttggaactgaagatggtatttacacactgaatctcaatgagctacatgaggcaacgatggaacagttatttccacggaagtgtacttggctgtatgttatcaataatactttaatgtcattatcagtaggaaaaacctttcagctctactctcacaatcttatagctttgtttgaacatgccaaaaaaccaggattagctgcccatattcaaactcacaggtttccagaccgaatactaccaagaaaattcgctttaacaacaaagattcctgatacaaaaggctgccacaaatgttgcatagtcagaaacccttacacgggacataaatacctctgtggagctttacagtctggaattgttttacttcagtggtatgagccaatgcagaaattcatgttgataaagcactttgattttcctttgccaagtcctttgaatgtttttgaaatgctggtgatacctgaacaggaataccctatggtctgtgtagctattagcaaaggcactgaatcgaatcaggtagttcagtttgagacaatcaatttgaactctgcatcttcatggtttacagaaattggtgcaggcagccagcagttagattccattcatgtaacacagttggagagagataccgttttagtgtgtttagacaaatttgtgaaaattgtaaatctacaaggaaaattaaaatcaagtaagaaactggcctctgagttaagttttgattttcgcattgaatctgtagtatgccttcaagacagtgtgttggctttctggaaacatgggatgcagggtaaaagcttcaagtcagatgaggttacccaggagatttcagatgaaacaagagttttccgcttattaggatcagacagggttgtcgttttggaaagtaggccaacagaaaatcctactgcacacagcaatctctacatcttggctggacatgaaaatagttactaagcaacagaaactgatctcaaatgacaggaaaatgaatatactccattgaaaggaaaaataaggaaattcaatacaaactgcactatgatttgctttaactattatgggttatattgcaaatgatctgtactttagggtagaattcaatattttctgcagctggaaacagctagtctatctcttgccactgtgtggtggttatatcaagtttgcttaataaaagctatgagacaaatagtcctctagttccaggaaacacagtctttttttaaaaaaaacaatgtttgtaacaagggtgccatggtatttttagataactcgtgattatcttaagagaggtaaatttagtgatcattttatatcatgtcttattccttcttaatgaacataatttgttaaattctcaagcaaggttttcacttttatattggccattctgtatgtttttgtaaaacagaatatttaatccttatttattaatctcttgctggagtggtgtaatgtatctaacttttagcaaaggagggttgcagagcagcttaaattttttttataatgtataagaattttgtttatcttttaagagtagtaaagtactttgagtgtttgggggttcaacacacacatgcaattttgcttaacaaaagtattttataatacagtttcatacagaattaccttaaaagggagtcttatgttttcaactacagatagttgtaagggatcatacagaagatattgatgatagttgaaatattcttagaaggggtgtgtatgtctagctgtgtctaccatgtgtatgtattcttgacaagcagtataaaatacctgtgatttttctttacattagggataatgcataaggaattaatcttcatatatattatcatccctaatgtagcagggggaagtatttaattgcccatgatatgtattttacttatactatgccagagaggaaactataaagtaattacacatgtaatcttgggtttttcacatatgtaggtattcattttgagtaggttgaagaagaaaaaaaatatttaaatgaattgaattcctgatgggatagtatcaataagtatttaaaagccagtattctaaaaataataaagggtagggtcatttttgagtttgtttttcttttgctattgttaatattcaaaattaaagtgttacattggtacctgttgtcttaatgcatttattgagaacagcattgagatgatgaacaaggggttagcaatagcaaactctataattattttgactaattacttaagaggaaaacagtataagtatctcattcagtatttagcaattctgtaaaataagtattatctctatttttcagatgaggaagtaagggtttagcaaggttaagagatctatccaatttacacagcaagttagtagttgagcctgaccatgagtcttctgactctgttcttttcactatgcaatacgcaaacaataaaatgttatacaaat

SEQ ID NO: 155089 - DNA, 484 bp, Homo sapiens
  Payload ID: 10485
  Gene Symbol: MAP4K5
  Gene Name: mitogen-activated protein kinase kinase kinase kinase 5
  ENST ID: ENST00000554273
  CDS Start-End: 318-484
gccgacccatgctggctgggaacgtgtctcccggtgacgcagccccgggtggggaacgtggtgcggcggcggcggcggcggcgactgtacgcgcctccgccgcccccgagaggacgcgccgtgcagcggctgagtggcggcggcggcgacggcaaacccggagctgccggccggcgcgcgggaggaggacgcgggtgcggtctaggaaacggagctgcgggcggaggctccatgttgggaagcggcgccgttcgtgcttgttagcgggaatccgggagccgcggggtgagctggcgggggccgggccctaagtgaagatggaggccccgctgcggcctgccgcggacatcctgaggcggaacccgcagcaggactacgaactcgtccagagggtcggcagcggcacctacggggacgtctataaggccagaaatgtacacacaggagagctggctgcagtaaaaatcattaaattggagcctgg

SEQ ID NO: 155090 - DNA, 619 bp, Homo sapiens
  Payload ID: 10485
  Gene Symbol: MAP4K5
  Gene Name: mitogen-activated protein kinase kinase kinase kinase 5
  ENST ID: ENST00000554091
  CDS Start-End: 39-227
cgcggggtgagctggcgggggccgggccctaagtgaagatggaggccccgctgcggcctgccgcggacatcctgaggcggaacccgcagcaggactacgaactcgtccagagggtcggcagcggcacctacggggacgtctataaggccagaaatgtacacacaggagagctggctgcagtaaaaatcattaaattggagcctgggtcttgcctatttgcatactaaaggcaaaatgcatagagatatcaaaggtgctaatattttattgacagaccatggcgatgtaaaattagctgactttggtgtggctgcaaaaataacagctaccattgcaaaacgaaaatctttcattggcaccccttactggatggccccagaagttgcagcagtagagaagaatggtggctacaaccaactctgtgatatctgggcagtaggaataacagcaattgaacttggagaacttcagccacctatgtttgatctccacccaatgagggctctcttcttaatgtcaaaaagtaattttcagcctccaaaactaaaggacaaaacaaaatggtcatcaacattccataattttgtcaaaatagcactaaccaaaaacccaaaaaaaa

SEQ ID NO: 155091 - DNA, 545 bp, Homo sapiens
  Payload ID: 10485
  Gene Symbol: MAP4K5
  Gene Name: mitogen-activated protein kinase kinase kinase kinase 5
  ENST ID: ENST00000557390
  CDS Start-End: 135-545
ggaggacgcgggtgcggtctaggaaacggagctgcgggcggaggctccatgttgggaagcggcgccgttcgtgcttgttagcgggaatccgggagccgcggggtgagctggcgggggccgggccctaagtgaagatggaggccccgctgcggcctgccgcggacatcctgaggcggaacccgcagcaggactacgaactcgtccagagggtcggcagcggcacctacggggacgtctataaggccagaaatgtacacacaggagagctggctgcagtaaaaatcattaaattggagcctggagatgatttttctttgattcaacaagaaatatttatggttaaagaatgtaaacattgtaacatcgttgcctactttgggagttatcttagtcgggaaaaactatggatttgtatggaatactgtggtggcggatcacttcaagatatttaccatgttactggaccattatcagaattgcaaatagcctatgtatgcagagaaaccttacagggtcttgcctatttgcatactaaaggcaaaatg

SEQ ID NO: 155092 - DNA, 592 bp, Homo sapiens
  Payload ID: 10485
  Gene Symbol: MAP4K5
  Gene Name: mitogen-activated protein kinase kinase kinase kinase 5
  ENST ID: ENST00000555216
  CDS Start-End: 267-592
actcgcggtgtgaacatactgggtctcgcctctcctttcccctcccctcggcctggtgctgaatcatgagcccaatgtctccaaaagatcatctcaggccacctcagtgtatactcttccatttgacaacggaattctgctgcccatgttcaacttacgatccagtaaattaggccagaaatgtacacacaggagagctggctgcagtaaaaatcattaaattggagcctggagatgatttttctttgattcaacaagaaatatttatggttaaagaatgtaaacattgtaacatcgttgcctactttgggagttatcttagtcgggaaaaactatggatttgtatggaatactgtggtggcggatcacttcaagatatttaccatgttactggaccattatcagaattgcaaatagcctatgtatgcagagaaaccttacagggtcttgcctatttgcatactaaaggcaaaatgcatagagatatcaaaggtgctaatattttattgacagaccatggcgatgtaaaattagctgactttggtgtggctgcaaaaataacagctaccattgcaaaacgaaaatctttcat

SEQ ID NO: 155093 - DNA, 4005 bp, Homo sapiens
  Payload ID: 10486
  Gene Symbol:
  Gene Name: Mitogen-activated protein kinase kinase kinase MLK4  [Source:UniProtKB/Swiss-Prot
  Acc:Q5TCX8]
  ENST ID: ENST00000366622
  CDS Start-End: 121-1569
taattttctcattgttttcatgttttgagtaaggtagtttcacaactgatatgattcatttagcttttttaacaaagccaatattggttaatatgattgttgtggttaatatggttaataatgttctttttagtgacttcagatgaaagcaataaaacttggggaaggaacacagtctttcgacaagaagaatttgaggatgtaaaaaggaattttaagaaaaaaggttgtacctggggaccaaattccattcaaatgaaagatagaacagattgcaaagaaaggataagacctctctccgatggcaacagtccttggtcaactatcttaataaaaaatcagaaaaccatgcccttggcttcattgtttgtggaccagccagggtcctgtgaagagccaaaactttcccctgatggattagaacacagaaaaccaaaacaaataaaattgcctagtcaggcctacattgatctacctcttgggaaagatgctcagagagagaatcctgcagaagctgaaagctgggaggaggcagcctctgcgaatgctgccacagtctccattgagatgactcctacgaatagtctgagtagatccccccagagaaagaaaacggagtcagctctgtatgggtgcaccgtccttctggcatcggtggctctgggactggacctcagagagcttcataaagcacaggctgctgaagaaccgttgcccaaggaagagaagaagaaacgagagggaatcttccagcgggcttccaagtcccgcagaagcgccagtcctcccacaagcctgccatccacctgtggggaggccagcagcccaccctccctgccactgtcaagtgccctgggcatcctctccacaccttctttctccacaaagtgcctgctgcagatggacagtgaagatccactggtggacagtgcacctgtcacttgtgactctgagatgctcactccggatttttgtcccactgccccaggaagtggtcgtgagccagccctcatgccaagacttgacactgattgtagtgtatcaagaaacttgccgtcttccttcctacagcagacatgtgggaatgtaccttactgtgcttcttcaaaacatagaccgtcacatcacagacggaccatgtctgatggaaatccgaccccaactggtgcaactattatctcagccactggagcctctgcactgccactctgcccctcacctgctcctcacagtcatctgccaagggaggtctcacccaagaagcacagcactgtccacatcgtgcctcagcgtcgccctgcctccctgagaagccgctcagatctgcctcaggcttacccacagacagcagtgtctcagctggcacagactgcctgtgtagtgggtcgcccaggaccacatcccacccaattcctcgctgccaaggagagaactaaatcccatgtgccttcattactggatgctgacgtggaaggtcagagcagggactacactgtgccactgtgcagaatgaggagcaaaaccagccggccatctatatatgaactggagaaagaattcctgtcttaaactaagtgccttactgttgtttaagcatttttttaaggtgaacaaatgaacacaatgtatctacctttgaactgtttcatgctgctgtgttttcaaaagctgtggccatgttcctaaattagtaagatatatccagcttctcaaaaaatgtatatgattgctgttagccatgtctattgtttttcctctggattcttttcttataacttggaatacacaaaagtgtaaaacaagagatgtgcaccaatgaaaactatgctgggtcgaattaccttcagcacaatgttaatgtttttgttctcatttatgcctttgtccatttgcacacaacagaaattgtaatgagcttcactatttttgtttctttccttccttttttttcttttttcctttctttcctttttcttgtcttgtttcttgtttttttttcttgtagtttcttttcttaattgtcatttttgcaacaaaaagccaagaaagagctttagtttcttggcaagaataatgtgatattagtaagtaaaggtcttaaaagtctgacgactggaatagatataaagtcctgtttaaactacctaaccttggctgtgggccgataatgcatatgtccagttctcacttaaattatgcaatgatatttctctctgaggaaattatacggaatgtaacttataaaagctttactgaatataagttataagcattttattcattagaactccaaaatagatgttcaaagttcagtccttgccatttgactgagaccacatggtgtgccccttgagtgaggctaatctttaggtttttcctatagaaaacattcttcctccatcagtagccctttatttgatattcagaagtggaaagctttttcattctccagtagaacttttaaaaattgttacagatacctagctcttcacagatatcatgtactgtaaacagtcatgtgtcttaattttattttctctatttgagtgcataattatcctaataatcccaaagacactgacaactcaaggaacagcagtacagtactattagaagttaagtatgttgttgttatttcacatttcatttaattgtggataaatgttagacatctgttgaaataagctcatatggtggaaacgacaactatattatgaattattttcagaaatggatctttgaatagcagatcaggatttaaataataaaattatctatgaatcacttttatggtcatacatatatgatacaaatccagagttattggtgcagaaatggctacccgagagcttggtaaatttgccttggtttcttatgttaaatgtattgtgcttcccttctgtctctagaatgtggctcttcagaagacagacaatcgacatttaaatttttccaaacaatgaaaaactaaattaaaaacattgcttgatatttcatttaaaattgcaccttgcttaaggtttactgaataactgaaatgtcagcaatttaaaataaattcaattgtgtgataaaatatctcacctataatagaagaaaaggaaaatcatattatttggcaattttgcagcattgtggttgcctaacaggtatatccagcagatgagaaacagtatgaaaggattgtattaacatggtaagttttgccctaaggaaaacgatcttgcattctggattcttgcagcaaagtctcagatacttaatacgttttcttgttttatcatctgttctatgattcggcttcactttgtgtggttattgaattatgtaacagagatttggttttcccaaaatgttatcacatttgaaactatgattgctttgtgttcagtccttttggaacacgtagcttccagcttaagggtagagaaatatatacctaaaatcatcaatacatgaaagaaaaaggatggaaactatgtcctcagttttacttctaccaaaacatccctgtatgtgtgtgcatgtatgttggcgtgtgtgtgtgtgcatgcatattagtaaatgtgtgtttgcatgtgtgtgttggggagtgtatgtgatctgggtgtttgtttatctctgttattattcccctttagctttattttagtcaactctacattatgatgaatttcaaaatgaagctgtattaaaataattgtaatataacaattcaatctcacatgttactgcagatagttaacttttgctgcaatctattgtacatttgcaattttctgtgttagtaaacttagcagaatctggttatttatttttgtgtaggcttaatgttcactgaaagataagtcaattactgttagtaaaaaattaaggtactctcactgcagagatttaaggcctgggcctaatgtgctgtattatgaagccttgtgactgaaaaatatgtttacatatgttgtctatttttttaataaacttttatagctggtctatttgctcagt

SEQ ID NO: 155094 - DNA, 3910 bp, Homo sapiens
  Payload ID: 10486
  Gene Symbol:
  Gene Name: Mitogen-activated protein kinase kinase kinase MLK4  [Source:UniProtKB/Swiss-Prot
  Acc:Q5TCX8]
  ENST ID: ENST00000366623
  CDS Start-End: 262-1974
cagggcctgggcacgaccatggtgggacgtcgcccgcggcttcggggaccgctgcggcagcagaggcggctggccaggaacgcgggccgaggctggaccctttgggcagctagcccgtgatctctgccgtcaccgatcgcgattcctaccccctcgccttcccccggcgccgacggccacaccgccggacgatgcgcgcccgcggccgcccgggaggctgagcccagcttcccgctccgccttccccgcgcagctgcccccatggctttgcggggcgccgcgggagcgaccgacaccccggtgtcctcggccgggggagcccccggcggctcagcgtcctcgtcgtccacctcctcgggcggctcggcctcggcgggcgcggggctgtgggccgcgctctatgactacgaggctcgcggcgaggacgagctgagcctgcggcgcggccagctggtggaggtgctgtcgcaggacgccgccgtgtcgggcgacgagggctggtgggcaggccaggtgcagcggcgcctcggcatcttccccgccaactacgtggctccctgccgcccggccgccagccccgcgccgccgccctcgcggcccagctccccggtacacgtcgccttcgagcggctggagctgaaggagctcatcggcgctgggggcttcgggcaggtgtaccgcgccacctggcagggccaggaggtggccgtgaaggcggcgcgccaggacccggagcaggacgcggcggcggctgccgagagcgtgcggcgcgaggctcggctcttcgccatgctgcggcaccccaacatcatcgagctgcgcggcgtgtgcctgcagcagccgcacctctgcctggtgctggagttcgcccgcggcggagcgctcaaccgagcgctggccgctgccaacgccgccccggacccgcgcgcgcccggcccccgccgcgcgcgccgcatccctccgcacgtgctggtcaactgggccgtgcagatagcgcggggcatgctctacctgcatgaggaggccttcgtgcccatcctgcaccgggacctcaagtccagcaacattttgctacttgagaagatagaacatgatgacatctgcaataaaactttgaagattacagattttgggttggcgagggaatggcacaggaccaccaaaatgagcacagcaggcacctatgcctggatggcccccgaagtgatcaagtcttccttgttttctaagggaagcgacatctggagctatggagtgctgctgtgggaactgctcaccggagaagtcccctatcggggcattgatggcctcgccgtggcttatggggtagcagtcaataaactcactttgcccattccatccacctgccctgagccgtttgccaagctcatgaaagaatgctggcaacaagaccctcatattcgtccatcgtttgccttaattctcgaacagttgactgctattgaaggggcagtgatgactgagatgcctcaagaatcttttcattccatgcaagatgactggaaactagaaattcaacaaatgtttgatgagttgagaacaaaggaaaaggagctgcgatcccgggaagaggagctgactcgggcggctctgcagcagaagtctcaggaggagctgctaaagcggcgtgagcagcagctggcagagcgcgagatcgacgtgctggagcgggaacttaacattctgatattccagctaaaccaggagaagcccaaggtaaagaagaggaagggcaagtttaagagaagtcgtttaaagctcaaagatggacatcgaatcagtttaccttcagatttccagcacaagataaccgtgcaggcctctcccaacttggacaaacggcggagcctgaacagcagcagttccagtcccccgagcagccccacaatgatgccccgactccgagccatacagtgtgagctttctgcactgccacgggggctcctgtgttgacttctctcctttcacttgacttggattcaaattgagcagatgtgttttcatagcaggttgtagatgagtgtaggacatttcgtaggtgccacaactatttgagaaacaaaacttgagcataggttccttagtctaattttcttctactcacaaaaaatgaattttagatgctatgcagttggtgatgcgacctggccccggagtagaaagtgaaacaccacatctcgagacattctgttaaacacttgcacgcaacgttagcataacctaattctatcatcagccatttgtgtcagggtactttgaaaaatgaaatcaggaattcaggattacttctgtttctttctttgtttcgtgaggggaaaaaatttttgcttttcaggatttaactttaattcactttaggtttgaccaacctaatacttaaaaattccttgtagtgttttggttttagaacaagcattcatcctggaggagacagtacagacagctgattcgcctggcacctttgcattgtgagagtttcagttaggctatgaatcagaatgtagcggatgaaataaaattactaatttttttcaaaggtgagtccagataaacccctaaaagtaggctaagcgaaagaagaatgtgattaatgcgtatgtctgtaagtaatgtggtaattagcctaagtctgtggtaaaccattcatttggatcctctccttcctccaccaaacttaattccctgctgtttactcatccttatttggagaaaaaaaaaatccaaaagaaaattttgtctaatgaggcttgcatggaatctcatttttttttcctcttttgataatgaaaaccttggcaccagcagagatttcttttgcaagttctcggacaccaggatccccacagagaaactggatctaaatgaggctgtagttttagagcttaaaggactgtcatttattataactgatttggttttctgagaatgcattttgcataaaaccgtacctcaaaccttgcctttgcctaggcaaaggcctaattaacggagagagaaagggtcccaggctggtctcccagctccacgaagggatgagcagatgggacaccgtgccacccctgcttttgcctggccactcctctgccctctttcctgtgtcttcaccttctgctctggggaaaaccacctcacagaagccaggaagtggtactgggaaggcctggctgggcccaagatgtgtaccagttaaagtaaataatttgggacttcaaatgaattccaaccctccaaagttgaaatgcagccagcttagggaggcgcatccttggcgctccttctcagaagtaacatggtggaaaggttctaatcgagacagtccacacagggccagctttgtgtgtggcagctgttggctcaagttctccagcctggatgttgctcatcttcattgtgaccctgggtgctccaagaatgcctcttgtcttcatgtgtgtgcacacccccattcaattctgacagcctcattgagtggacccttttatgatccccaaatgcgggacagagaagttaccattaagctgacccaagttggtagctactaactggtgaagctggattcagacacatctgagtgtagatttcaccatccgtttccggcctcttagtacaggaaaagttcaatcaatgtggaaacaaaagagaaaccagaggagcaaatcaagaggggaaggaaagtaggaagggacgaaggtgaggagactaaagccgagagtgtagatagctctgggagtgtagatcagtcagtcagtcatatagccgagatgaacttgggtctaataacccccagctgaaagcttttccggttctgctgccctcacttaaatgaaaactgctgatccgtttatctgtcattctactgtaaaactcttttaataaaaagaatgaacag

SEQ ID NO: 155095 - DNA, 5809 bp, Homo sapiens
  Payload ID: 10486
  Gene Symbol:
  Gene Name: Mitogen-activated protein kinase kinase kinase MLK4  [Source:UniProtKB/Swiss-Prot
  Acc:Q5TCX8]
  Uniprot ID: Q5TCX8
  ENST ID: ENST00000366624
  CDS Start-End: 262-3372
cagggcctgggcacgaccatggtgggacgtcgcccgcggcttcggggaccgctgcggcagcagaggcggctggccaggaacgcgggccgaggctggaccctttgggcagctagcccgtgatctctgccgtcaccgatcgcgattcctaccccctcgccttcccccggcgccgacggccacaccgccggacgatgcgcgcccgcggccgcccgggaggctgagcccagcttcccgctccgccttccccgcgcagctgcccccatggctttgcggggcgccgcgggagcgaccgacaccccggtgtcctcggccgggggagcccccggcggctcagcgtcctcgtcgtccacctcctcgggcggctcggcctcggcgggcgcggggctgtgggccgcgctctatgactacgaggctcgcggcgaggacgagctgagcctgcggcgcggccagctggtggaggtgctgtcgcaggacgccgccgtgtcgggcgacgagggctggtgggcaggccaggtgcagcggcgcctcggcatcttccccgccaactacgtggctccctgccgcccggccgccagccccgcgccgccgccctcgcggcccagctccccggtacacgtcgccttcgagcggctggagctgaaggagctcatcggcgctgggggcttcgggcaggtgtaccgcgccacctggcagggccaggaggtggccgtgaaggcggcgcgccaggacccggagcaggacgcggcggcggctgccgagagcgtgcggcgcgaggctcggctcttcgccatgctgcggcaccccaacatcatcgagctgcgcggcgtgtgcctgcagcagccgcacctctgcctggtgctggagttcgcccgcggcggagcgctcaaccgagcgctggccgctgccaacgccgccccggacccgcgcgcgcccggcccccgccgcgcgcgccgcatccctccgcacgtgctggtcaactgggccgtgcagatagcgcggggcatgctctacctgcatgaggaggccttcgtgcccatcctgcaccgggacctcaagtccagcaacattttgctacttgagaagatagaacatgatgacatctgcaataaaactttgaagattacagattttgggttggcgagggaatggcacaggaccaccaaaatgagcacagcaggcacctatgcctggatggcccccgaagtgatcaagtcttccttgttttctaagggaagcgacatctggagctatggagtgctgctgtgggaactgctcaccggagaagtcccctatcggggcattgatggcctcgccgtggcttatggggtagcagtcaataaactcactttgcccattccatccacctgccctgagccgtttgccaagctcatgaaagaatgctggcaacaagaccctcatattcgtccatcgtttgccttaattctcgaacagttgactgctattgaaggggcagtgatgactgagatgcctcaagaatcttttcattccatgcaagatgactggaaactagaaattcaacaaatgtttgatgagttgagaacaaaggaaaaggagctgcgatcccgggaagaggagctgactcgggcggctctgcagcagaagtctcaggaggagctgctaaagcggcgtgagcagcagctggcagagcgcgagatcgacgtgctggagcgggaacttaacattctgatattccagctaaaccaggagaagcccaaggtaaagaagaggaagggcaagtttaagagaagtcgtttaaagctcaaagatggacatcgaatcagtttaccttcagatttccagcacaagataaccgtgcaggcctctcccaacttggacaaacggcggagcctgaacagcagcagttccagtcccccgagcagccccacaatgatgccccgactccgagccatacagttgacttcagatgaaagcaataaaacttggggaaggaacacagtctttcgacaagaagaatttgaggatgtaaaaaggaattttaagaaaaaaggttgtacctggggaccaaattccattcaaatgaaagatagaacagattgcaaagaaaggataagacctctctccgatggcaacagtccttggtcaactatcttaataaaaaatcagaaaaccatgcccttggcttcattgtttgtggaccagccagggtcctgtgaagagccaaaactttcccctgatggattagaacacagaaaaccaaaacaaataaaattgcctagtcaggcctacattgatctacctcttgggaaagatgctcagagagagaatcctgcagaagctgaaagctgggaggaggcagcctctgcgaatgctgccacagtctccattgagatgactcctacgaatagtctgagtagatccccccagagaaagaaaacggagtcagctctgtatgggtgcaccgtccttctggcatcggtggctctgggactggacctcagagagcttcataaagcacaggctgctgaagaaccgttgcccaaggaagagaagaagaaacgagagggaatcttccagcgggcttccaagtcccgcagaagcgccagtcctcccacaagcctgccatccacctgtggggaggccagcagcccaccctccctgccactgtcaagtgccctgggcatcctctccacaccttctttctccacaaagtgcctgctgcagatggacagtgaagatccactggtggacagtgcacctgtcacttgtgactctgagatgctcactccggatttttgtcccactgccccaggaagtggtcgtgagccagccctcatgccaagacttgacactgattgtagtgtatcaagaaacttgccgtcttccttcctacagcagacatgtgggaatgtaccttactgtgcttcttcaaaacatagaccgtcacatcacagacggaccatgtctgatggaaatccgaccccaactggtgcaactattatctcagccactggagcctctgcactgccactctgcccctcacctgctcctcacagtcatctgccaagggaggtctcacccaagaagcacagcactgtccacatcgtgcctcagcgtcgccctgcctccctgagaagccgctcagatctgcctcaggcttacccacagacagcagtgtctcagctggcacagactgcctgtgtagtgggtcgcccaggaccacatcccacccaattcctcgctgccaaggagagaactaaatcccatgtgccttcattactggatgctgacgtggaaggtcagagcagggactacactgtgccactgtgcagaatgaggagcaaaaccagccggccatctatatatgaactggagaaagaattcctgtcttaaactaagtgccttactgttgtttaagcatttttttaaggtgaacaaatgaacacaatgtatctacctttgaactgtttcatgctgctgtgttttcaaaagctgtggccatgttcctaaattagtaagatatatccagcttctcaaaaaatgtatatgattgctgttagccatgtctattgtttttcctctggattcttttcttataacttggaatacacaaaagtgtaaaacaagagatgtgcaccaatgaaaactatgctgggtcgaattaccttcagcacaatgttaatgtttttgttctcatttatgcctttgtccatttgcacacaacagaaattgtaatgagcttcactatttttgtttctttccttccttttttttcttttttcctttctttcctttttcttgtcttgtttcttgtttttttttcttgtagtttcttttcttaattgtcatttttgcaacaaaaagccaagaaagagctttagtttcttggcaagaataatgtgatattagtaagtaaaggtcttaaaagtctgacgactggaatagatataaagtcctgtttaaactacctaaccttggctgtgggccgataatgcatatgtccagttctcacttaaattatgcaatgatatttctctctgaggaaattatacggaatgtaacttataaaagctttactgaatataagttataagcattttattcattagaactccaaaatagatgttcaaagttcagtccttgccatttgactgagaccacatggtgtgccccttgagtgaggctaatctttaggtttttcctatagaaaacattcttcctccatcagtagccctttatttgatattcagaagtggaaagctttttcattctccagtagaacttttaaaaattgttacagatacctagctcttcacagatatcatgtactgtaaacagtcatgtgtcttaattttattttctctatttgagtgcataattatcctaataatcccaaagacactgacaactcaaggaacagcagtacagtactattagaagttaagtatgttgttgttatttcacatttcatttaattgtggataaatgttagacatctgttgaaataagctcatatggtggaaacgacaactatattatgaattattttcagaaatggatctttgaatagcagatcaggatttaaataataaaattatctatgaatcacttttatggtcatacatatatgatacaaatccagagttattggtgcagaaatggctacccgagagcttggtaaatttgccttggtttcttatgttaaatgtattgtgcttcccttctgtctctagaatgtggctcttcagaagacagacaatcgacatttaaatttttccaaacaatgaaaaactaaattaaaaacattgcttgatatttcatttaaaattgcaccttgcttaaggtttactgaataactgaaatgtcagcaatttaaaataaattcaattgtgtgataaaatatctcacctataatagaagaaaaggaaaatcatattatttggcaattttgcagcattgtggttgcctaacaggtatatccagcagatgagaaacagtatgaaaggattgtattaacatggtaagttttgccctaaggaaaacgatcttgcattctggattcttgcagcaaagtctcagatacttaatacgttttcttgttttatcatctgttctatgattcggcttcactttgtgtggttattgaattatgtaacagagatttggttttcccaaaatgttatcacatttgaaactatgattgctttgtgttcagtccttttggaacacgtagcttccagcttaagggtagagaaatatatacctaaaatcatcaatacatgaaagaaaaaggatggaaactatgtcctcagttttacttctaccaaaacatccctgtatgtgtgtgcatgtatgttggcgtgtgtgtgtgtgcatgcatattagtaaatgtgtgtttgcatgtgtgtgttggggagtgtatgtgatctgggtgtttgtttatctctgttattattcccctttagctttattttagtcaactctacattatgatgaatttcaaaatgaagctgtattaaaataattgtaatataacaattcaatctcacatgttactgcagatagttaacttttgctgcaatctattgtacatttgcaattttctgtgttagtaaacttagcagaatctggttatttatttttgtgtaggcttaatgttcactgaaagataagtcaattactgttagtaaaaaattaaggtactctcactgcagagatttaaggcctgggcctaatgtgctgtattatgaagccttgtgactgaaaaatatgtttacatatgttgtctatttttttaataaacttttatagctggtctatttgctcagta

SEQ ID NO: 155096 - DNA, 7179 bp, Homo sapiens
  Payload ID: 10487
  Gene Symbol:
  Gene Name: Mitogen-activated protein kinase kinase kinase MLT  [Source:UniProtKB/Swiss-Prot
  Acc:Q9NYL2]
  ENST ID: ENST00000338983
  CDS Start-End: 196-1563
cttcctcattggcgccgtgcagagaggcggaatgttcaactcctaactgcagcggaaacgtgggagccgcgcgggccgctgtcgtcccaacccccgccgccctcgtcgcgcgcggggcctccgcgcccccggctgctgctcacgccccgcccgggagccagattttgtggaagtataatactttgtcattatgagatgtcgtctctcggtgcctcctttgtgcaaattaaatttgatgacttgcagttttttgaaaactgcggtggaggaagttttgggagtgtttatcgagccaaatggatatcacaggacaaggaggtggctgtaaagaagctcctcaaaatagagaaagaggcagaaatactcagtgtcctcagtcacagaaacatcatccagttttatggagtaattcttgaacctcccaactatggcattgtcacagaatatgcttctctgggatcactctatgattacattaacagtaacagaagtgaggagatggatatggatcacattatgacctgggccactgatgtagccaaaggaatgcattatttacatatggaggctcctgtcaaggtgattcacagagacctcaagtcaagaaacgttgttatagctgctgatggagtattgaagatctgtgactttggtgcctctcggttccataaccatacaacacacatgtccttggttggaactttcccatggatggctccagaagttatccagagtctccctgtgtcagaaacttgtgacacatattcctatggtgtggttctctgggagatgctaacaagggaggtcccctttaaaggtttggaaggattacaagtagcttggcttgtagtggaaaaaaacgagagattaaccattccaagcagttgccccagaagttttgctgaactgttacatcagtgttgggaagctgatgccaagaaacggccatcattcaagcaaatcatttcaatcctggagtccatgtcaaatgacacgagccttcctgacaagtgtaactcattcctacacaacaaggcggagtggaggtgcgaaattgaggcaactcttgagaggctaaagaaactagagcgtgatctcagctttaaggagcaggagcttaaagaacgagaaagacgtttaaagatgtgggagcaaaagctgacagagcagtccaacaccccgcttctcttgcctcttgctgcaagaatgtctgaggagtcttactttgaatctaaaacagaggagtcaaacagtgcagagatgtcatgtcagatcacagcaacaagtaacggggagggccatggcatgaacccaagtctgcaggccatgatgctgatgggctttggggatatcttctcaatgaacaaagcaggagctgtgatgcattctgggatgcagataaacatgcaagccaagcagaattcttccaaaaccacatctaagagaagggggaagaaagtcaacatggctctggggttcagtgattttgacttgtcagaaggtgacgatgatgatgatgatgacggtgaggaggaggataatgacatggataatagtgaatgaaagcagaaagcaaagtaataaaatcacaaatgtttggaaaacacaaaagtaacttgtttatctcagtctgtacaaaaacagtaaggaggcagaaagccaagcactgcatttttaggccaatcacatttacatgaccgtaatttcttatcaattctacttttatttttgcttacagaaaaacggggggagaattaagccaaagaagtatatttatgaatcagcaaatgtggtgcctgattatagaaatttgtgatcctatatacaatataggacttttaaagttgtgacattctggctttttcttttaatgaatactttttagtttgtatttgactttatttcctttattcaaatcatttttaaaaacttacattttgaacaaacactcttaactcctaattgttctttgacacgtagtaattctgtgacatactttttttttcttatagcaatacactgtaatatcagaaatggttggcctgagcaacctagtaagacctcgtctctactaataattaaaaaactagctggcatggtagcacacacctgtagtcccagatacttgggaggccaaggcaggaggattgcttgagacctagcaatcagtcagggctgcagtgagccatgatggcaccactgcactctagcctgggcaagagaacaagatcctgtctcaaaaaacaaaaaaaagaaagaattgatagtacaaaatccaacaacaatactgagatgatctaagaaggttataacaaaatgctcttcagaaatacctaagtgctgagaatttttagtactaaagagcacagctgctcaaagtaaagcctgagcagtgttctcagtaatgtatttgaaggaaaaataccctgatttgaaaccaacagcagatgttgcaaactttcataccactgctggccatggaagcctcttaacaacacactgtcatttaaggctgtgcttgtgctttatacaaagagaaagaggtggtcttaaggggatgcttccaggggggtgagttcatgcctctcctgtattttccagcaagtggggtatgtgtggtggtttgttttttagaggggcataataatccaggattctaagcatatgctcagctattttaaagaggaaattaaatattataaaagaaatagtaaagataagttatcctcacttaggcaaaagcacaggtcctttccatatcaagtttagcctaccagggttgttttttgttttaaccctgcttaataatgttggtgttttagaagtagatacaggcactgctctgaaaacctggctagccaaggatattctcagaatgttatcacctgtttgtcaaagcttgtttaaattataaaacacttttaattatatatatgaggcaaaagaactaagacttttttcaaactaaattagaaaggagtgtcattatttgactgttaaaccaaaatatttttggtgggtctttttatggaagtttaaagaaaggacatcatcatagatatgatctaacagtatttctaactatatttgatcattaaaagcctcttggaatttgaagcgtgacgtgtttctaatgccccttgagaggtgaaaaataccacataatgatcagtatgctgtgccagcttcatttggggagaaataactagtagaaagttctgggtgtgaggtgtacagcagtctaggtggcatagtgatgaagaaagggatcagagtctgactgtcactcagaatcctgggctcagttgcttgacaaccttgggaaaattgttttatctttgtgcgtctgtttgctgatcttcagcgtgggaataataacagtacctacttgaaaggatcattgtgcggattaaaagaaataatatatgtaaagcactttaacacagcaccaggcccacggaaagtggctaatgttagctactatgaatggtgccagtgaagacactgaaaaataagtgatttcagtaaccttctggaaagctatcagtttcaaataatattttctctgtagtatgagatgaaattaaaagtggatagctttcaggaaagataaagagaacatgcttagaatgtaagctaaacagattttttctgttgctctttgaaaactatgagccctggccagcttaacctggtctgaggtgagactaaacacaaaaacagtagataaatctctccctaaaagatggattcccccacatacccatgctactagtttctctgtctattcacacatatgtacaaatacatgaacacagcctgtctgtgctcagacatagagaagtactacctgacttgagtcaatgcacccaagaagaaaagcttggagtagagcagaagggagggcttgggactcctgtctttccagcatgccctggggtgcagtggtcagccacctgaagagagagccaatagcatggggtttacaaggcaaagatagtcattcattcaacacatattcatagagctccttctctgtgccagacactgttctggaagatagctagatgaaaatctttgcactcacagagcttacatgccagtgagtgaagatcgatgataaataaagcaaatgcatcatatgttcacatttgataagtatatgccaaaaaatgaagccgggaaggaggacaaggcccatgggtgggtgttgaggtttttaaagtgtggtcaggaaaggccccactgataaggtaacatttgagcaagtctgaaaaaggcaaggggatctttggggctaacttcgggatccctgcactttatgtaagaatgtaaacctggagtctcatttaagaatgatcagcaatacgtttagaacatatgaactgaatgaaatggacattttttcttaatttatgtataaatccatatgattatacataaagttctgatgcattaataaaagcagccaaatagggccaaagagaaaaataacaggactctgtactggacctaactttatcattaattaggtaatattttcctcatttctttactgctgccattttcctcaccagtattccagagatggtcatagctcattactctaccaccaagaacctaaaaggaattagaatacagcagaattggcctcagtgaagagcttaaaattgttctcctcgtagaactggactattgatcattaccacgtgacgttggctctattactttctgttcccaatgtccttctagtggtttgaaaatgttaaaacatccctaaaatctaaatcatataatcagaattctatagtgtcccactctatctgtaaagatcatttggaagactttagactctattaattttaaaaggaatatttattagccatatgcagaatttctaatgatgatattgtacagcttctaattcacttttcagatcagtgtttgaaatggcaattatcagtgttggatttagttccaactacttgatttacaaaaatgtacatttagaggttaaaagaaacagtgagaaatgtaaacattcaaaatgataattgaatctctcagttgtgggaataattatcagagacatgcaactgaaaatgtctcacctttcatctttttttcttaattcataaagttatcttgtagaatttgatgagaccctccctagtcattctcaactggggcggtgctgtcaccgaatggtgtttgagagtgttggggctagggcacatttttggttgtcacagcaactggggtggcatttgctgcccagtgccaggaatagtaacattatgaatgccagggacagtgtgctcagtaaagtcttccatccaaaaggggcagggcacggtggctcacgcctgtaatcccagcactttgggaggccaaggtgggcggatcacctgatgtcaggggttcgagaccagcctggccaacatggtgaaaccctgttgctactaaaaatacaaaaattggctgggtgtggtgtcacatgccagtaaccccagctactagggaggctgaggcaggagaatcacttgaacccgggaggcagaggttgcagtgagctgagattgcaccactacactccagcctggatgacagagtgagacttcatctcaaaaaaaaaaaaaaacaaaaaaaaacaacccggtagcattgtcccttccccactgacaaacttatcaaatccagaagctttagagtttcgtctctaattatttttctcctgaacaaaattacccaagtcaaaacaaaatgtatttttagaattacggcagcatacgacctgaattttgtgagtttcgtggctttatcttaaatcaccatttccctaaaaatggtttctttctccttagaaatgctggtggcaacttgatgaaacagccaaatgcaccagggcaggtcactttcccattacactgattccacaattaaaaaaaaaaaagaaaaaaaactcattgagatagctacagttctataggttaatttaaagcctcctttttctactcatttttgaaagcaaaattacattttactattttacataaccagtgaaaagacgttgaaagcctacagctcactgtttttggtgctctggaaatgttgagggtgggtttttaaccagtgatttttaacgtgcagtgaatttgttagacttttaaacaccagctaaggtagtcaaacttgatccccattaaaaatcaaggaattaggggtcgggggagggtttaggagtgatccagaatgacctcccagaattactgtgcgtacaactttatttttcagagttttcattggaatggtaagagttttatgaaagacagttttaaaacttattctgagttaaatattaatactttaaaaaattattgtactagacttattgcagccttttgaaagtagcagagtttcatcataccacatatataacagagcataaattttctataatcaggcaccttttgctgcttttgagtaagactgttttcctgtttaagtgttaagcatcgccagacataaaaatctattctctcctctcgattgtagcatagcctgacagctctagatacagcatttctatgatgaaaaatgagtatccatcaggaaatctagaagactagccgtgttttctcagactccacctttgtttgcactctgttgcctgtgaggagctttctggcatgtgattatttacttcaaaactagagttccaagcacctacattaattattttatattgtgtgcagaatagtatatcttttaatgtcagatatgatacactgcacatattgcttttgcactcttaaaatttttgtactaaataatagaaaatatttatattctttgagtgtgagctttgaatagatggcattatcactttattgtttttttaacaaaaactttttctcaattattctattgcaatgttattctgagcaagtcctatgccaaatatcttgtataatgtttgtatggaagattaaattttactcttgtgtggtaagactatttcagttactgattttatagttggaatttgatattccagcacaaagtccacagtgtattcagaaatccaagttggtgtcatacatttcattttgatgtgaacttttctttgctttcctttgttctaagactccattttgcaataaacgttttgacagtaaa

SEQ ID NO: 155097 - DNA, 3741 bp, Homo sapiens
  Payload ID: 10487
  Gene Symbol:
  Gene Name: Mitogen-activated protein kinase kinase kinase MLT  [Source:UniProtKB/Swiss-Prot
  Acc:Q9NYL2]
  Uniprot ID: Q9NYL2
  ENST ID: ENST00000375213
  CDS Start-End: 79-2481
cctccgcgcccccggctgctgctcacgccccgcccgggagccagattttgtggaagtataatactttgtcattatgagatgtcgtctctcggtgcctcctttgtgcaaattaaatttgatgacttgcagttttttgaaaactgcggtggaggaagttttgggagtgtttatcgagccaaatggatatcacaggacaaggaggtggctgtaaagaagctcctcaaaatagagaaagaggcagaaatactcagtgtcctcagtcacagaaacatcatccagttttatggagtaattcttgaacctcccaactatggcattgtcacagaatatgcttctctgggatcactctatgattacattaacagtaacagaagtgaggagatggatatggatcacattatgacctgggccactgatgtagccaaaggaatgcattatttacatatggaggctcctgtcaaggtgattcacagagacctcaagtcaagaaacgttgttatagctgctgatggagtattgaagatctgtgactttggtgcctctcggttccataaccatacaacacacatgtccttggttggaactttcccatggatggctccagaagttatccagagtctccctgtgtcagaaacttgtgacacatattcctatggtgtggttctctgggagatgctaacaagggaggtcccctttaaaggtttggaaggattacaagtagcttggcttgtagtggaaaaaaacgagagattaaccattccaagcagttgccccagaagttttgctgaactgttacatcagtgttgggaagctgatgccaagaaacggccatcattcaagcaaatcatttcaatcctggagtccatgtcaaatgacacgagccttcctgacaagtgtaactcattcctacacaacaaggcggagtggaggtgcgaaattgaggcaactcttgagaggctaaagaaactagagcgtgatctcagctttaaggagcaggagcttaaagaacgagaaagacgtttaaagatgtgggagcaaaagctgacagagcagtccaacaccccgctgctgccttcctttgagattggtgcatggacggaagacgatgtgtattgttgggttcagcagctcgtcagaaaaggtgactcttcagcagagatgagtgtatatgcaagcttgtttaaagaaaacaacattacagggaagcggctgctgctgctggaggaagaagacctgaaagacatgggcattgtctccaaggggcatatcattcacttcaagtcagccattgagaaattaacccatgattacataaatttgtttcacttcccaccactaattaaggactcaggaggtgaacctgaagaaaatgaggaaaaaatagtgaacctggaactggtttttggttttcacttgaaaccaggaactggcccacaggattgtaagtggaaaatgtatatggagatggatggggatgaaattgcaataacctacataaaagatgtgacattcaacactaacctacctgatgcggagattttaaagatgacaaagccaccatttgtaatggagaagtggattgtaggaatagcaaaaagtcagactgtggagtgcactgtcacatatgagagtgatgttagaactccaaaaagcactaaacatgtccattcgattcagtggagtagaacaaaacctcaggatgaagtgaaagcagtccaacttgccattcagacattattcaccaattcagatggcaaccctggaagcaggtccgactcaagtgctgattgccagtggttagatactctgaggatgcggcagattgcatccaacacttctttacagcgttcccagagcaatcctattctggggtcaccgttcttctcacactttgatggccaggattcctacgctgctgctgtgagacggccccaggtgcccattaagtatcaacagattacacctgtgaaccagtccagaagctcgtctcctactcagtatggactgaccaaaaacttctcttccctacatctcaactctagggacagtggcttttccagtggcaatactgacacctcttcagagaggggtcgatactcagacagaagcaggaacaaatatggacgtggtagtatatcactcaattcttctcctagaggaagatacagtggaaagagtcagcattccactccttcaagaggaagataccctggaaagttctacagggtttctcagtcagcactcaatcctcaccagtcgcctgacttcaagagaagccccagggacctccaccaacccaacaccataccagggatgcctttgcaccctgagactgactcaagagccagtgaagaggacagcaaagtcagcgaagggggctggacaaaagtggaataccggaaaaagccccacaggccatctcccgccaaaaccaataaagagagagccagaggggaccaccgtggatggagaaacttttgatgaattgaactacatagcttttctaagcaggttaaaaaaaaaaaaaaaaagaaatgtaatggtttttgataatatgatcccttcagattgaattaacgaaaagacaacacttccagtttttggattgggaaataccttctaattgagactatagccaaaccagggccaaaattatggatattggtcacccagtgatcataactaggcttgaaaatcactacacatattttctgccttgagtgaacatttttagaggaaaggttatgccatctttttaccctaaccactgatattctggttagcagggccaggacaaggggaaggaaaatgaggtcaacaaaaaaatcaaatttttaggaaaagataagatgaatgttactgatttttccttttggctgaggctgcaatatggcctggcaaggcactgttactgatcttgtctttaacattttgatattttgttcatcataatttttgcatttatttttttaaatattgcattaaaatatcatttagcttgattatcgagttttttggtttgaggttttttgttgcttcttttttcttttctttctttccccctcttttttttggatgtccccttaaattttgtgcccaaggcaggtacctcactcatctcatccttggctcagccctgctggttagtatttagtatttattttagtaagatatttgtgtctgtatgatggtcagagttgaactgatctggcttgtcatttttcagtaataaaaaaagttactgaatttaatgttgaatatgatgcatatctcattcattacgatttatcagaaaccaaagatttaaattgcctagatttgtggttctttctcttcctaagttcccagcgactgctttcaaatactattttctaaatttcaccaaaggagcaaagaggataaaacaacactccataaaggcctcttgggatgtcagaaatctaaaatctaaaagaaaacagacacagagcaagacaataacatcacaagctaaaagccagagaaatttaaaattaccaacatccttgttggagtaagacagtaaatatcagccttgcagcaagacagctctgagcagctgtgggcaaagaggtaaaccagtgggggtgcaaggagactgtctgcagcttagggcagaaatggtgggatccaacttgtgaaatgcttcatgttttacaaaccaaaaagtcaggtagcaacaaacttattgtatgtcaaatcaataaatgttactttcaatat

SEQ ID NO: 155098 - DNA, 2572 bp, Homo sapiens
  Payload ID: 10487
  Gene Symbol:
  Gene Name: Mitogen-activated protein kinase kinase kinase MLT  [Source:UniProtKB/Swiss-Prot
  Acc:Q9NYL2]
  Uniprot ID: Q9NYL2
  ENST ID: ENST00000409176
  CDS Start-End: 137-2539
ggtgccccccgggcgcaggccagggaggcccgagcgccttccccacgccccgctcgcccgcgcgtgtgaggggagggcggcccagccgtttcgcgccgggagattttgtggaagtataatactttgtcattatgagatgtcgtctctcggtgcctcctttgtgcaaattaaatttgatgacttgcagttttttgaaaactgcggtggaggaagttttgggagtgtttatcgagccaaatggatatcacaggacaaggaggtggctgtaaagaagctcctcaaaatagagaaagaggcagaaatactcagtgtcctcagtcacagaaacatcatccagttttatggagtaattcttgaacctcccaactatggcattgtcacagaatatgcttctctgggatcactctatgattacattaacagtaacagaagtgaggagatggatatggatcacattatgacctgggccactgatgtagccaaaggaatgcattatttacatatggaggctcctgtcaaggtgattcacagagacctcaagtcaagaaacgttgttatagctgctgatggagtattgaagatctgtgactttggtgcctctcggttccataaccatacaacacacatgtccttggttggaactttcccatggatggctccagaagttatccagagtctccctgtgtcagaaacttgtgacacatattcctatggtgtggttctctgggagatgctaacaagggaggtcccctttaaaggtttggaaggattacaagtagcttggcttgtagtggaaaaaaacgagagattaaccattccaagcagttgccccagaagttttgctgaactgttacatcagtgttgggaagctgatgccaagaaacggccatcattcaagcaaatcatttcaatcctggagtccatgtcaaatgacacgagccttcctgacaagtgtaactcattcctacacaacaaggcggagtggaggtgcgaaattgaggcaactcttgagaggctaaagaaactagagcgtgatctcagctttaaggagcaggagcttaaagaacgagaaagacgtttaaagatgtgggagcaaaagctgacagagcagtccaacaccccgctgctgccttcctttgagattggtgcatggacggaagacgatgtgtattgttgggttcagcagctcgtcagaaaaggtgactcttcagcagagatgagtgtatatgcaagcttgtttaaagaaaacaacattacagggaagcggctgctgctgctggaggaagaagacctgaaagacatgggcattgtctccaaggggcatatcattcacttcaagtcagccattgagaaattaacccatgattacataaatttgtttcacttcccaccactaattaaggactcaggaggtgaacctgaagaaaatgaggaaaaaatagtgaacctggaactggtttttggttttcacttgaaaccaggaactggcccacaggattgtaagtggaaaatgtatatggagatggatggggatgaaattgcaataacctacataaaagatgtgacattcaacactaacctacctgatgcggagattttaaagatgacaaagccaccatttgtaatggagaagtggattgtaggaatagcaaaaagtcagactgtggagtgcactgtcacatatgagagtgatgttagaactccaaaaagcactaaacatgtccattcgattcagtggagtagaacaaaacctcaggatgaagtgaaagcagtccaacttgccattcagacattattcaccaattcagatggcaaccctggaagcaggtccgactcaagtgctgattgccagtggttagatactctgaggatgcggcagattgcatccaacacttctttacagcgttcccagagcaatcctattctggggtcaccgttcttctcacactttgatggccaggattcctacgctgctgctgtgagacggccccaggtgcccattaagtatcaacagattacacctgtgaaccagtccagaagctcgtctcctactcagtatggactgaccaaaaacttctcttccctacatctcaactctagggacagtggcttttccagtggcaatactgacacctcttcagagaggggtcgatactcagacagaagcaggaacaaatatggacgtggtagtatatcactcaattcttctcctagaggaagatacagtggaaagagtcagcattccactccttcaagaggaagataccctggaaagttctacagggtttctcagtcagcactcaatcctcaccagtcgcctgacttcaagagaagccccagggacctccaccaacccaacaccataccagggatgcctttgcaccctgagactgactcaagagccagtgaagaggacagcaaagtcagcgaagggggctggacaaaagtggaataccggaaaaagccccacaggccatctcccgccaaaaccaataaagagagagccagaggggaccaccgtggatggagaaacttttgatgaattgaactacatagcttttctaagcaggtt

SEQ ID NO: 155099 - DNA, 661 bp, Homo sapiens
  Payload ID: 10487
  Gene Symbol:
  Gene Name: Mitogen-activated protein kinase kinase kinase MLT  [Source:UniProtKB/Swiss-Prot
  Acc:Q9NYL2]
  ENST ID: ENST00000422149
  CDS Start-End: 247-661
atgcaagcttgctgtggaaagcatgcttcccgtctgtcagggcttcctgagaggagacctggtgacacagtagcctttcggcagagctccttgggatgagtaggaagtgctgctgcaggttttgtctgggggatatctgagccatttctctgtgggcagctgtgtttcaaagtctgggcaggttgttgttgaattttgcgtgggctgccaggattttgtggaagtataatactttgtcattatgagatgtcgtctctcggtgcctcctttgtgcaaattaaatttgatgacttgcagttttttgaaaactgcggtggaggaagttttgggagtgtttatcgagccaaatggatatcacaggacaaggaggtggctgtaaagaagctcctcaaaatagagaaagaggcagaaatactcagtgtcctcagtcacagaaacatcatccagttttatggagtaattcttgaacctcccaactatggcattgtcacagaatatgcttctctgggatcactctatgattacattaacagtaacagaagtgaggagatggatatggatcacattatgacctgggccactgatgtagccaaaggaatgcattatttacatatggaggctcctgtcaaggtgattcacagagacctcaagtcaagaaacg

SEQ ID NO: 155100 - DNA, 2312 bp, Homo sapiens
  Payload ID: 10487
  Gene Symbol:
  Gene Name: Mitogen-activated protein kinase kinase kinase MLT  [Source:UniProtKB/Swiss-Prot
  Acc:Q9NYL2]
  ENST ID: ENST00000539448
  CDS Start-End: 271-1638
agagaggcagccttcagacctatgttcccagaaatctctacgtttgtgcctttcccaactagagaattaactcttgcggggcacaaaacagcctctatttctttgcgtccccagcgcctgtttgttgaagactgagttgaaggagtagcaggtggtgttaatttgtcaaaaagatgagttaaggtgctgggggcgagggggaacacccccacggccctccccccacagcaaggcagattttgtggaagtataatactttgtcattatgagatgtcgtctctcggtgcctcctttgtgcaaattaaatttgatgacttgcagttttttgaaaactgcggtggaggaagttttgggagtgtttatcgagccaaatggatatcacaggacaaggaggtggctgtaaagaagctcctcaaaatagagaaagaggcagaaatactcagtgtcctcagtcacagaaacatcatccagttttatggagtaattcttgaacctcccaactatggcattgtcacagaatatgcttctctgggatcactctatgattacattaacagtaacagaagtgaggagatggatatggatcacattatgacctgggccactgatgtagccaaaggaatgcattatttacatatggaggctcctgtcaaggtgattcacagagacctcaagtcaagaaacgttgttatagctgctgatggagtattgaagatctgtgactttggtgcctctcggttccataaccatacaacacacatgtccttggttggaactttcccatggatggctccagaagttatccagagtctccctgtgtcagaaacttgtgacacatattcctatggtgtggttctctgggagatgctaacaagggaggtcccctttaaaggtttggaaggattacaagtagcttggcttgtagtggaaaaaaacgagagattaaccattccaagcagttgccccagaagttttgctgaactgttacatcagtgttgggaagctgatgccaagaaacggccatcattcaagcaaatcatttcaatcctggagtccatgtcaaatgacacgagccttcctgacaagtgtaactcattcctacacaacaaggcggagtggaggtgcgaaattgaggcaactcttgagaggctaaagaaactagagcgtgatctcagctttaaggagcaggagcttaaagaacgagaaagacgtttaaagatgtgggagcaaaagctgacagagcagtccaacaccccgcttctcttgcctcttgctgcaagaatgtctgaggagtcttactttgaatctaaaacagaggagtcaaacagtgcagagatgtcatgtcagatcacagcaacaagtaacggggagggccatggcatgaacccaagtctgcaggccatgatgctgatgggctttggggatatcttctcaatgaacaaagcaggagctgtgatgcattctgggatgcagataaacatgcaagccaagcagaattcttccaaaaccacatctaagagaagggggaagaaagtcaacatggctctggggttcagtgattttgacttgtcagaaggtgacgatgatgatgatgatgacggtgaggaggaggataatgacatggataatagtgaatgaaagcagaaagcaaagtaataaaatcacaaatgtttggaaaacacaaaagtaacttgtttatctcagtctgtacaaaaacagtaaggaggcagaaagccaagcactgcatttttaggccaatcacatttacatgaccgtaatttcttatcaattctacttttatttttgcttacagaaaaacggggggagaattaagccaaagaagtatatttatgaatcagcaaatgtggtgcctgattatagaaatttgtgatcctatatacaatataggacttttaaagttgtgacattctggctttttcttttaatgaatactttttagtttgtatttgactttatttcctttattcaaatcatttttaaaaacttacattttgaacaaacactcttaactcctaattgttctttgacacgtagtaattctgtgacatactttttttttcttatagcaatacactgtaatatcagaaatggttggcctgagcaacctagtaagacctcgtctctactaataattaaaaaactagctggcatggtagcacacacctgtagtcccagatacttgggaggccaaggcaggaggattgcttgagacctagcaatcagtcagggctgcagtgagccatgatggcaccactgcactctagcctgggcaagagaacaagatcctgtct

SEQ ID NO: 155101 - DNA, 2171 bp, Homo sapiens
  Payload ID: 10488
  Gene Symbol: MAPKAPK2
  Gene Name: mitogen-activated protein kinase-activated protein kinase 2
  Uniprot ID: P49137
  ENST ID: ENST00000294981
  CDS Start-End: 287-1399
gcggccgcttccccccggccgggcccccgccgccccgcggtccccagagcgccaggcccccggggggagggagggagggcgccgggccggtgggagccagcggcgcgcggtgggacccacggagccccgcgacccgccgagcctggagccgggccgggtcggggaagccggctccagcccggagcgaacttcgcagcccgtcggggggcggcggggagggggcccggagccggaggagggggcggccgcgggcacccccgcctgtgccccggcgtccccgggcaccatgctgtccaactcccagggccagagcccgccggtgccgttccccgccccggccccgccgccgcagccccccacccctgccctgccgcaccccccggcgcagccgccgccgccgcccccgcagcagttcccgcagttccacgtcaagtccggcctgcagatcaagaagaacgccatcatcgatgactacaaggtcaccagccaggtcctggggctgggcatcaacggcaaagttttgcagatcttcaacaagaggacccaggagaaattcgccctcaaaatgcttcaggactgccccaaggcccgcagggaggtggagctgcactggcgggcctcccagtgcccgcacatcgtacggatcgtggatgtgtacgagaatctgtacgcagggaggaagtgcctgctgattgtcatggaatgtttggacggtggagaactctttagccgaatccaggatcgaggagaccaggcattcacagaaagagaagcatccgaaatcatgaagagcatcggtgaggccatccagtatctgcattcaatcaacattgcccatcgggatgtcaagcctgagaatctcttatacacctccaaaaggcccaacgccatcctgaaactcactgactttggctttgccaaggaaaccaccagccacaactctttgaccactccttgttatacaccgtactatgtggctccagaagtgctgggtccagagaagtatgacaagtcctgtgacatgtggtccctgggtgtcatcatgtacatcctgctgtgtgggtatccccccttctactccaaccacggccttgccatctctccgggcatgaagactcgcatccgaatgggccagtatgaatttcccaacccagaatggtcagaagtatcagaggaagtgaagatgctcattcggaatctgctgaaaacagagcccacccagagaatgaccatcaccgagtttatgaaccacccttggatcatgcaatcaacaaaggtccctcaaaccccactgcacaccagccgggtcctgaaggaggacaaggagcggtgggaggatgtcaaggggtgtcttcatgacaagaacagcgaccaggccacttggctgaccaggttgtgagcagaggattctgtgttcctgtccaaactcagtgctgtttcttagaatccttttattccctgggtctctaatgggaccttaaagaccatctggtatcatcttctcattttgcagaagagaaactgaggcccagaggcggagggcagtctgctcaaggtcacgcagctggtgactggttggggcagaccggacccaggtttcctgactcctggcccaagtctcttcctcctatcctgcgggatcactggggggctctcagggaacagcagcagtgccatagccaggctctctgctgcccagcgctggggtgaggctgccgttgtcagcgtggaccactaaccagcccgtcttctctctctgctcccacccctgccgccctcaccctgcccttgttgtctctgtctctcacgtctctcttctgctgtctctcctacctgtcttctggctctctctgtacccttcctggtgctgccgtgcccccaggaggagatgaccagtgccttggccacaatgcgcgttgactacgagcagatcaagataaaaaagattgaagatgcatccaaccctctgctgctgaagaggcggaagaaagctcgggccctggaggctgcggctctggcccactgagccaccgcgccctcctgcccacgggaggacaagcaataactctctacaggaatatattttttaaacgaagagacagaactgtccacatctgcctcctctcctcctcagctgcatggagcctggaactgcatcagtgactgaattc

SEQ ID NO: 155102 - DNA, 2961 bp, Homo sapiens
  Payload ID: 10488
  Gene Symbol: MAPKAPK2
  Gene Name: mitogen-activated protein kinase-activated protein kinase 2
  Uniprot ID: P49137
  ENST ID: ENST00000367103
  CDS Start-End: 194-1396
gagccagcggcgcgcggtgggacccacggagccccgcgacccgccgagcctggagccgggccgggtcggggaagccggctccagcccggagcgaacttcgcagcccgtcggggggcggcggggagggggcccggagccggaggagggggcggccgcgggcacccccgcctgtgccccggcgtccccgggcaccatgctgtccaactcccagggccagagcccgccggtgccgttccccgccccggccccgccgccgcagccccccacccctgccctgccgcaccccccggcgcagccgccgccgccgcccccgcagcagttcccgcagttccacgtcaagtccggcctgcagatcaagaagaacgccatcatcgatgactacaaggtcaccagccaggtcctggggctgggcatcaacggcaaagttttgcagatcttcaacaagaggacccaggagaaattcgccctcaaaatgcttcaggactgccccaaggcccgcagggaggtggagctgcactggcgggcctcccagtgcccgcacatcgtacggatcgtggatgtgtacgagaatctgtacgcagggaggaagtgcctgctgattgtcatggaatgtttggacggtggagaactctttagccgaatccaggatcgaggagaccaggcattcacagaaagagaagcatccgaaatcatgaagagcatcggtgaggccatccagtatctgcattcaatcaacattgcccatcgggatgtcaagcctgagaatctcttatacacctccaaaaggcccaacgccatcctgaaactcactgactttggctttgccaaggaaaccaccagccacaactctttgaccactccttgttatacaccgtactatgtggctccagaagtgctgggtccagagaagtatgacaagtcctgtgacatgtggtccctgggtgtcatcatgtacatcctgctgtgtgggtatccccccttctactccaaccacggccttgccatctctccgggcatgaagactcgcatccgaatgggccagtatgaatttcccaacccagaatggtcagaagtatcagaggaagtgaagatgctcattcggaatctgctgaaaacagagcccacccagagaatgaccatcaccgagtttatgaaccacccttggatcatgcaatcaacaaaggtccctcaaaccccactgcacaccagccgggtcctgaaggaggacaaggagcggtgggaggatgtcaaggaggagatgaccagtgccttggccacaatgcgcgttgactacgagcagatcaagataaaaaagattgaagatgcatccaaccctctgctgctgaagaggcggaagaaagctcgggccctggaggctgcggctctggcccactgagccaccgcgccctcctgcccacgggaggacaagcaataactctctacaggaatatattttttaaacgaagagacagaactgtccacatctgcctcctctcctcctcagctgcatggagcctggaactgcatcagtgactgaattctgccttggttctggccaccccagagtgggagaggctgggaggttgggaggctgtggagagaagtgagcaaggtgctcttgaacctgtgctcattttgcaattttatcagtaatttgacttagagtttttacgaaacctcttttgttgtccttgccccactcctctccaccagacgccttcctctctggatactgcaaaggcttgtggtttgttagagggtatttgtggaaactgtcatagggattgtccctgtgttgtcccatctgccctccctgtttctccacaacagcctggggttgtccccgctggctcacgcgttctgggagctcaaggccaccttggaggaggatgccacgcacttcctctctcggagccctcagacatctccagtgtgccagacaaataggagtgagtgtatgtgtgtgtgtgtgtgtgtgtgtgtgcacacgtgtgtatgagtgcgcagatctgtgcctgggatcgtgcatttgaggggccaggggcaggcagggctgcagagggagacggccctgctggggcttaggaaccttctcccttcttgggtctgccctgcccatactgagcctgccaaagtgcctgggaagcccacccagattctgaaacaggccctctgtggcctgtctctattagctgggttccgggaggcagagaggagtgaccgggcactggcactgcgatcaggaagactggacccccagcccccagggcccccctccccccacttagtgctggtcctaggtcctctgaggcactcatctactgaatgacctctctacttccccttcttgccattattaacccatttttgtttattttccttaaatttttagccatttctccatgggccaccgcccagctcatgtaggtgagcctgggcagcttctgttggcagagcttttgcatttcctgtgtttgtcctgggttctggggcatcagccagctaccccttgtgggcaaaggcagggccacttttgaagtcttccctcagatttccattgtgtggcctggtgggtcagggggagtctttgcaccaaagatgtcctgactttgcccccttgcccatcagccatttgccatcaccccaaacaactcagcttcggggccggtgaggggaggggcctcccccagcacagatgaggagcagctggggtaggctgtctgtgccatggccccccactcccccttcccttggagggagaggtggcaggaatacttcacctttcctctccctcaggggcaggtggtggaggggcgcccagggtcgtctttgtgtatgggggaaggcgctgggtgcctgcagcgcctcccttgtctcagatggtgtgtccagcactcgattgttgtaaactgttgttttgtatgagcgaaattgtctttactaaacagatttaatagttga

SEQ ID NO: 155103 - DNA, 2500 bp, Homo sapiens
  Payload ID: 10489
  Gene Symbol: MAPKAPK3
  Gene Name: mitogen-activated protein kinase-activated protein kinase 3
  Uniprot ID: Q16644
  ENST ID: ENST00000357955
  CDS Start-End: 110-1258
ctgcggccgccagctcccgcgaccgcctctcctgcccctcgccggtacctcagcaaggtgccactagaagcgccaggctggggccgcctctgagcgccccgcgggggccatggatggtgaaacagcagaggagcaggggggccctgtgcccccgccagttgcacccggcggacccggcttgggcggtgctccgggggggcggcgggagcccaagaagtacgcagtgaccgacgactaccagttgtccaagcaggtgctgggcctgggtgtgaacggcaaagtgctggagtgcttccatcggcgcactggacagaagtgtgccctgaagctcctgtatgacagccccaaggcccggcaggaggtagaccatcactggcaggcttctggcggcccccatattgtctgcatcctggatgtgtatgagaacatgcaccatggcaagcgctgtctcctcatcatcatggaatgcatggaaggtggtgagttgttcagcaggattcaggagcgtggcgaccaggctttcactgagagagaagctgcagagataatgcgggatattggcactgccatccagtttctgcacagccataacattgcccaccgagatgtcaagcctgaaaacctactctacacatctaaggagaaagacgcagtgcttaagctcaccgattttggctttgctaaggagaccacccaaaatgccctgcagacaccctgctatactccctattatgtggcccctgaggtcctgggtccagagaagtatgacaagtcatgtgacatgtggtccctgggtgtcatcatgtacatcctcctttgtggcttcccacccttctactccaacacgggccaggccatctccccggggatgaagaggaggattcgcctgggccagtacggcttccccaatcctgagtggtcagaagtctctgaggatgccaagcagctgatccgcctcctgttgaagacagaccccacagagaggctgaccatcactcagttcatgaaccacccctggatcaaccaatcgatggtagtgccacagaccccactccacacggcccgagtgctgcaggaggacaaagaccactgggacgaagtcaaggaggagatgaccagtgccttggccactatgcgggtagactacgaccaggtgaagatcaaggacctgaagacctctaacaaccggctcctcaacaagaggagaaaaaagcaggcaggcagctcctctgcctcacagggctgcaacaaccagtagctcatggggccttggaggagcctggcctctcagcctgcataacagactgaaatgtgctcaggccctggccaggagggcccagggtcattcttttaacaaaaggattattttgttgtgttttaatttgtcactcggaacttcaggatggaggaccctgaccctaaacctccttcagatctctggcccaggctcaagccctagagatgggcagggcctaggggctgggagctgcctgctgccatagcagcacctttagctaggttggcccgagtgaggcctctgtgctgtcctgccctggtgcatggccttagctttctaggccactgggagttgtggctgggcttcccatcttccacagagacatctccctgtgggatgggcagatgggcctggccttgagaaaggcattggccattggttgccatggtgaccagggaccacgttgctgcctgtgaatgctgagtgagcgagtaagggaggaggggcgattgagggttcacctctgccttggggaggctgatttctcacacactggctggccctctcattctcactcctccttgggccctgaggctgctggatccggtctgcctgcctccctgtgcagtccagccctgccttgctgcagccccagcccagatggcactcagcgctctcccctgagggagtccctgggcctagccatcccctcactattcccgacccaaagggtgacttttcatctgaacttaaggtgggagatatttttaacttttttccactttggaaaatgtcactgtgacaaaagccagcatactttccctgcacccatctgctcaccagatctcaggcaggaaagcccctctctgttgaagtcaggggctatcttttggtatacttgtgtgaaagtggctggttgggagcagagctaagtggcttcccattaacctgaggtctctttctttactctgggtcagacctgaggttggggaaggcgactgagccatgctcagaatgtctggtcctggcttgggcctgagtagggcagagagggcctttcctggctgatcagagcttaccagccccaccccaccatggtagccttagggtgctgagtgcctgatactgcctgacaagtgcctgacacgcagcctagttccttcctggcccctctctcactggctgggaaaccctagaccatgtcagataggacaacactgctgggttttacatccagatagtaataaacaccatttcatcatt

SEQ ID NO: 155104 - DNA, 873 bp, Homo sapiens
  Payload ID: 10489
  Gene Symbol: MAPKAPK3
  Gene Name: mitogen-activated protein kinase-activated protein kinase 3
  ENST ID: ENST00000451680
  CDS Start-End: 1-292
cctgggccagtacggcttccccaatcctgagtggtcagaagtctctgaggatgccaagcagctgatccgcctcctgttgaagacagaccccacagagaggctgaccatcactcagttcatgaaccacccctggatcaacgaggagatgaccagtgccttggccactatgcgggtagactacgaccaggtgaagatcaaggacctgaagacctctaacaaccggctcctcaacaagaggagaaaaaagcaggcaggcagctcctctgcctcacagggctgcaacaaccagtagctcatggggccttggaggagcctggcctctcagcctgcataacagactgaaatgtgctcaggccctggccaggagggcccagggtcattcttttaacaaaaggattattttgttgtgttttaatttgtcactcggaacttcaggatggaggaccctgaccctaaacctccttcagatctctggcccaggctcaagccctagagatgggcagggcctaggggctgggagctgcctgctgccatagcagcacctttagctaggttggcccgagtgaggcctctgtgctgtcctgccctggtgcatggccttagctttctaggccactgggagttgtggctgggcttcccatcttccacagagacatctccctgtgggatgggcagatgggcctggccttgagaaaggcattggccattggttgccatggtgaccagggaccacgttgctgcctgtgaatgctgagtgagcgagtaagggaggaggggcgattgagggttcacctctgccttggggaggctgatttctcacacactggctggccctctcattctcactcctccttgggccctgaggctgctgga

SEQ ID NO: 155105 - DNA, 2988 bp, Homo sapiens
  Payload ID: 10489
  Gene Symbol: MAPKAPK3
  Gene Name: mitogen-activated protein kinase-activated protein kinase 3
  Uniprot ID: Q16644
  ENST ID: ENST00000446044
  CDS Start-End: 597-1745
gggctgagcggtggggcccgggcggggtgcgcgggccccgtcgccgggtctggggccctgagcagtgaaaggaaatactttgacagatttccaagaactttccaggaaaacggggcggggccccgcgagctgaccaatcgcgacgctgaaggtggagccgagcggtcggggagggccaatagcagcgcgtggacccggggctgaagctacccagaggggcagggagtacttgctgcatttgatcctctacaactggtgttgctcccgttatgcggacagaagacagccccagggaacaaatgctaggaaatggcagggtgagaaaactgaggcatggagaggttacaatataacttagatctcccagctggcaagtaatggtttaagccaggagcctacacacttcctcctacttcctctatgggtgctggtgatctgccgactcctagacatccagctttaaggtcctcagtgaagcttctctgcccccaggcctgtccatgtcagagcaccatgggtgtccctttgaaagtatctcctacaggtgccactagaagcgccaggctggggccgcctctgagcgccccgcgggggccatggatggtgaaacagcagaggagcaggggggccctgtgcccccgccagttgcacccggcggacccggcttgggcggtgctccgggggggcggcgggagcccaagaagtacgcagtgaccgacgactaccagttgtccaagcaggtgctgggcctgggtgtgaacggcaaagtgctggagtgcttccatcggcgcactggacagaagtgtgccctgaagctcctgtatgacagccccaaggcccggcaggaggtagaccatcactggcaggcttctggcggcccccatattgtctgcatcctggatgtgtatgagaacatgcaccatggcaagcgctgtctcctcatcatcatggaatgcatggaaggtggtgagttgttcagcaggattcaggagcgtggcgaccaggctttcactgagagagaagctgcagagataatgcgggatattggcactgccatccagtttctgcacagccataacattgcccaccgagatgtcaagcctgaaaacctactctacacatctaaggagaaagacgcagtgcttaagctcaccgattttggctttgctaaggagaccacccaaaatgccctgcagacaccctgctatactccctattatgtggcccctgaggtcctgggtccagagaagtatgacaagtcatgtgacatgtggtccctgggtgtcatcatgtacatcctcctttgtggcttcccacccttctactccaacacgggccaggccatctccccggggatgaagaggaggattcgcctgggccagtacggcttccccaatcctgagtggtcagaagtctctgaggatgccaagcagctgatccgcctcctgttgaagacagaccccacagagaggctgaccatcactcagttcatgaaccacccctggatcaaccaatcgatggtagtgccacagaccccactccacacggcccgagtgctgcaggaggacaaagaccactgggacgaagtcaaggaggagatgaccagtgccttggccactatgcgggtagactacgaccaggtgaagatcaaggacctgaagacctctaacaaccggctcctcaacaagaggagaaaaaagcaggcaggcagctcctctgcctcacagggctgcaacaaccagtagctcatggggccttggaggagcctggcctctcagcctgcataacagactgaaatgtgctcaggccctggccaggagggcccagggtcattcttttaacaaaaggattattttgttgtgttttaatttgtcactcggaacttcaggatggaggaccctgaccctaaacctccttcagatctctggcccaggctcaagccctagagatgggcagggcctaggggctgggagctgcctgctgccatagcagcacctttagctaggttggcccgagtgaggcctctgtgctgtcctgccctggtgcatggccttagctttctaggccactgggagttgtggctgggcttcccatcttccacagagacatctccctgtgggatgggcagatgggcctggccttgagaaaggcattggccattggttgccatggtgaccagggaccacgttgctgcctgtgaatgctgagtgagcgagtaagggaggaggggcgattgagggttcacctctgccttggggaggctgatttctcacacactggctggccctctcattctcactcctccttgggccctgaggctgctggatccggtctgcctgcctccctgtgcagtccagccctgccttgctgcagccccagcccagatggcactcagcgctctcccctgagggagtccctgggcctagccatcccctcactattcccgacccaaagggtgacttttcatctgaacttaaggtgggagatatttttaacttttttccactttggaaaatgtcactgtgacaaaagccagcatactttccctgcacccatctgctcaccagatctcaggcaggaaagcccctctctgttgaagtcaggggctatcttttggtatacttgtgtgaaagtggctggttgggagcagagctaagtggcttcccattaacctgaggtctctttctttactctgggtcagacctgaggttggggaaggcgactgagccatgctcagaatgtctggtcctggcttgggcctgagtagggcagagagggcctttcctggctgatcagagcttaccagccccaccccaccatggtagccttagggtgctgagtgcctgatactgcctgacaagtgcctgacacgcagcctagttccttcctggcccctctctcactggctgggaaaccctagaccatgtcagataggacaacactgctgggttttacatccagatagtaataaacaccatttcatcattt

SEQ ID NO: 155106 - DNA, 535 bp, Homo sapiens
  Payload ID: 10489
  Gene Symbol: MAPKAPK3
  Gene Name: mitogen-activated protein kinase-activated protein kinase 3
  ENST ID: ENST00000457064
  CDS Start-End: 177-535
ctcaggccgttcgtcccgcactcccagcttgccccgggctcgcagcccagcccagttcagaggctccaaggctggggtgtgttggaaaagtctgggcgggactcactcttcccctttcccccaggtgccactagaagcgccaggctggggccgcctctgagcgccccgcgggggccatggatggtgaaacagcagaggagcaggggggccctgtgcccccgccagttgcacccggcggacccggcttgggcggtgctccgggggggcggcgggagcccaagaagtacgcagtgaccgacgactaccagttgtccaagcaggtgctgggcctgggtgtgaacggcaaagtgctggagtgcttccatcggcgcactggacagaagtgtgccctgaagctcctgtatgacagccccaaggcccggcaggaggtagaccatcactggcaggcttctggcggcccccatattgtctgcatcctggatgtgtatgagaacatgcaccatggcaagcgctgtctcctcatcatcatggaatg

SEQ ID NO: 155107 - DNA, 1160 bp, Homo sapiens
  Payload ID: 10489
  Gene Symbol: MAPKAPK3
  Gene Name: mitogen-activated protein kinase-activated protein kinase 3
  ENST ID: ENST00000430409
  CDS Start-End: 164-1160
acgtgggcgccggcagcgcgactctcggccctgggatttctgcggccgccagctcccgcgaccgcctctcctgcccctcgccggtacctcagcaaggtgcgttgccgccaggtgccactagaagcgccaggctggggccgcctctgagcgccccgcgggggccatggatggtgaaacagcagaggagcaggggggccctgtgcccccgccagttgcacccggcggacccggcttgggcggtgctccgggggggcggcgggagcccaagaagtacgcagtgaccgacgactaccagttgtccaagcaggtgctgggcctgggtgtgaacggcaaagtgctggagtgcttccatcggcgcactggacagaagtgtgccctgaagctcctgtatgacagccccaaggcccggcaggaggtagaccatcactggcaggcttctggcggcccccatattgtctgcatcctggatgtgtatgagaacatgcaccatggcaagcgctgtctcctcatcatcatggaatgcatggaaggtggtgagttgttcagcaggattcaggagcgtggcgaccaggctttcactgagagagaagctgcagagataatgcgggatattggcactgccatccagtttctgcacagccataacattgcccaccgagatgtcaagcctgaaaacctactctacacatctaaggagaaagacgcagtgcttaagctcaccgattttggctttgctaaggagaccacccaaaatgccctgcagacaccctgctatactccctattatgtggcccctgaggtcctgggtccagagaagtatgacaagtcatgtgacatgtggtccctgggtgtcatcatgtacatcctcctttgtggcttcccacccttctactccaacacgggccaggccatctccccggggatgaagaggaggattcgcctgggccagtacggcttccccaatcctgagtggtcagaagtctctgaggatgccaagcagctgatccgcctcctgttgaagacagaccccacagagaggctgaccatcactcagttcatgaaccacccctggatcaaccaatcgatggtagtgccacagaccccactccacacggcccgagtgctgcaggaggacaaagaccactgggacgaagtcaagg

SEQ ID NO: 155108 - DNA, 2563 bp, Homo sapiens
  Payload ID: 10489
  Gene Symbol: MAPKAPK3
  Gene Name: mitogen-activated protein kinase-activated protein kinase 3
  Uniprot ID: Q16644
  ENST ID: ENST00000621469
  CDS Start-End: 164-1312
acgtgggcgccggcagcgcgactctcggccctgggatttctgcggccgccagctcccgcgaccgcctctcctgcccctcgccggtacctcagcaaggtgcgttgccgccaggtgccactagaagcgccaggctggggccgcctctgagcgccccgcgggggccatggatggtgaaacagcagaggagcaggggggccctgtgcccccgccagttgcacccggcggacccggcttgggcggtgctccgggggggcggcgggagcccaagaagtacgcagtgaccgacgactaccagttgtccaagcaggtgctgggcctgggtgtgaacggcaaagtgctggagtgcttccatcggcgcactggacagaagtgtgccctgaagctcctgtatgacagccccaaggcccggcaggaggtagaccatcactggcaggcttctggcggcccccatattgtctgcatcctggatgtgtatgagaacatgcaccatggcaagcgctgtctcctcatcatcatggaatgcatggaaggtggtgagttgttcagcaggattcaggagcgtggcgaccaggctttcactgagagagaagctgcagagataatgcgggatattggcactgccatccagtttctgcacagccataacattgcccaccgagatgtcaagcctgaaaacctactctacacatctaaggagaaagacgcagtgcttaagctcaccgattttggctttgctaaggagaccacccaaaatgccctgcagacaccctgctatactccctattatgtggcccctgaggtcctgggtccagagaagtatgacaagtcatgtgacatgtggtccctgggtgtcatcatgtacatcctcctttgtggcttcccacccttctactccaacacgggccaggccatctccccggggatgaagaggaggattcgcctgggccagtacggcttccccaatcctgagtggtcagaagtctctgaggatgccaagcagctgatccgcctcctgttgaagacagaccccacagagaggctgaccatcactcagttcatgaaccacccctggatcaaccaatcgatggtagtgccacagaccccactccacacggcccgagtgctgcaggaggacaaagaccactgggacgaagtcaaggaggagatgaccagtgccttggccactatgcgggtagactacgaccaggtgaagatcaaggacctgaagacctctaacaaccggctcctcaacaagaggagaaaaaagcaggcaggcagctcctctgcctcacagggctgcaacaaccagtagctcatggggccttggaggagcctggcctctcagcctgcataacagactgaaatgtgctcaggccctggccaggagggcccagggtcattcttttaacaaaaggattattttgttgtgttttaatttgtcactcggaacttcaggatggaggaccctgaccctaaacctccttcagatctctggcccaggctcaagccctagagatgggcagggcctaggggctgggagctgcctgctgccatagcagcacctttagctaggttggcccgagtgaggcctctgtgctgtcctgccctggtgcatggccttagctttctaggccactgggagttgtggctgggcttcccatcttccacagagacatctccctgtgggatgggcagatgggcctggccttgagaaaggcattggccattggttgccatggtgaccagggaccacgttgctgcctgtgaatgctgagtgagcgagtaagggaggaggggcgattgagggttcacctctgccttggggaggctgatttctcacacactggctggccctctcattctcactcctccttgggccctgaggctgctggatccggtctgcctgcctccctgtgcagtccagccctgccttgctgcagccccagcccagatggcactcagcgctctcccctgagggagtccctgggcctagccatcccctcactattcccgacccaaagggtgacttttcatctgaacttaaggtgggagatatttttaacttttttccactttggaaaatgtcactgtgacaaaagccagcatactttccctgcacccatctgctcaccagatctcaggcaggaaagcccctctctgttgaagtcaggggctatcttttggtatacttgtgtgaaagtggctggttgggagcagagctaagtggcttcccattaacctgaggtctctttctttactctgggtcagacctgaggttggggaaggcgactgagccatgctcagaatgtctggtcctggcttgggcctgagtagggcagagagggcctttcctggctgatcagagcttaccagccccaccccaccatggtagccttagggtgctgagtgcctgatactgcctgacaagtgcctgacacgcagcctagttccttcctggcccctctctcactggctgggaaaccctagaccatgtcagataggacaacactgctgggttttacatccagatagtaataaacaccatttcatcattttctcttgg

SEQ ID NO: 155109 - DNA, 875 bp, Homo sapiens
  Payload ID: 10490
  Gene Symbol: MAPKAPK5
  Gene Name: mitogen-activated protein kinase-activated protein kinase 5
  ENST ID: ENST00000553053
  CDS Start-End: 252-476
gtggggcccagcacaaagacctgtccccaggggccgccgcctccgccgctgctgctgccgccagcctagagccgcccgccgaagcagagccggcgccggggtcctcatccccaccggtcccgaggggcggctgctgcccgtcgccacgaggcccaggggcccgagtgccgagccctttgctccctcggccgcgcggggacagggctgctgagcagcctccgcctctcccggctgtgggggccccactgagtatgtcggaggagagcgacatggacaaagccatcaaggatgccccagtgaagttgtgtgactttggatttgccaagattgaccaaggtgacttgatgacaccccagttcaccccttattatgtagcaccccaggtactggaggcgcaaagaaggcatcagaaggagaaatctggcatcatacctacctcaccgacgccctacacttacaacaagtcctctccatgatctgtgtcaaactgctttgggcctttatgaagtggcctgtgctgtactgtagagctgtgacttgtggtccctaggggtgattatctatgtgatgctgtgcggataccctcctttttactccaaacaccacagccggactatcccaaaggatatgcgaagaaagatcatgacaggcagttttgagttcccagaggaagagtggagtcagatctcagagatggccaaagatgttgtgaggaagctcctgaaggtcaaaccggaggagagactcaccatcgagggagtgctggaccacccctggctcaattccaccgaggccctggataatgtgctgccttctgctcagctgatgatggacaaggcagtggttgcaggaatccagcaggctcacgcggaaca

SEQ ID NO: 155110 - DNA, 1630 bp, Homo sapiens
  Payload ID: 10490
  Gene Symbol: MAPKAPK5
  Gene Name: mitogen-activated protein kinase-activated protein kinase 5
  Uniprot ID: Q8IW41
  ENST ID: ENST00000551404
  CDS Start-End: 109-1530
ccacgaggcccaggggcccgagtgccgagccctttgctccctcggccgcgcggggacagggctgctgagcagcctccgcctctcccggctgtgggggccccactgagtatgtcggaggagagcgacatggacaaagccatcaaggaaacttccattttagaagaatacagtatcaattggactcagaagctgggagctggaattagtggtccagttagagtctgtgtaaagaaatctactcaagaacggtttgcgctgaaaattcttcttgatcgtccaaaagctagaaatgaggtacgtctgcacatgatgtgtgccacacacccaaacatagttcagattattgaagtgtttgctaacagtgtccagtttccccatgagtccagccctagggcccgactcttaattgtaatggagatgatggaagggggagagctatttcacagaatcagccagcaccggcactttacagagaagcaagccagccaagtaacaaagcagatagctttggctctgcggcactgtcacttgttaaacattgcgcacagagacctcaagcctgaaaatctgctttttaaggataactctttggatgccccagtgaagttgtgtgactttggatttgccaagattgaccaaggtgacttgatgacaccccagttcaccccttattatgtagcaccccaggtactggaggcgcaaagaaggcatcagaaggagaaatctggcatcatacctacctcaccgacgccctacacttacaacaagagctgtgacttgtggtccctaggggtgattatctatgtgatgctgtgcggataccctcctttttactccaaacaccacagccggactatcccaaaggatatgcgaagaaagatcatgacaggcagttttgagttcccagaggaagagtggagtcagatctcagagatggccaaagatgttgtgaggaagctcctgaaggtcaaaccggaggagagactcaccatcgagggagtgctggaccacccctggctcaattccaccgaggccctggataatgtgctgccttctgctcagctgatgatggacaaggcagtggttgcaggaatccagcaggctcacgcggaacagttggccaacatgagaatccaggatctgaaagtcagcctcaaacccctgcactcagtgaacaaccccattctgcggaagaggaagttacttggcaccaagccaaaggacagtgtctatatccacgaccatgagaatggagccgaggattccaatgttgccttggaaaaactccgagatgtgattgctcagtgtattctcccccaggctggtaaaggagagaatgaagatgagaaactgaatgaagtaatgcaggaggcttggaagtataaccgggaatgcaaactcctaagagatactctgcagagcttcagctggaatggtcgtggattcacagataaagtagatcgactaaaactggcagaaattgtgaagcaggtgatagaagagcaaaccacgtcccacgaatcccaataatgacagcttcagactttgtttttttaacaatttgaaaaattattctttaatgtataaagtaattttatgtaaattaataaatcataatttcatttccaca

SEQ ID NO: 155111 - DNA, 11349 bp, Homo sapiens
  Payload ID: 10490
  Gene Symbol: MAPKAPK5
  Gene Name: mitogen-activated protein kinase-activated protein kinase 5
  Uniprot ID: Q8IW41
  ENST ID: ENST00000550735
  CDS Start-End: 757-2172
attagcgcagcgccatcgccgcggaaggcccaggggcctgtcctgtatgcggcgtgtcttagggaggcccaggcggacgcctgcaagtcgggtgcgcggttcgggggcggctcggaaaccccagcggaaggcagcaaggggcgcgtggggccgtggagtcacgaagctgggcggcaggaggggcggcctggagctcccgcggggcacagcgcgtgcgtgagggcggccggcggggctgcccggcgcgggtgtcccggcgatgtgtggcgctgaggcggcggcgggagcagcggcgccgagctctgcttcggcttcggcttcggcttcgcggcggtgcaggcggcggaggcggaggcgcaggctcttctttaggacctggcgagcccaggtctaagcggcggccccgcgaggcccttgcacggcgccccgggtcgaggccctccccgcctcgccctaccccaggagcctgcctccccagctggggatgaggctaggaggcggccgcgtggggcccagcacaaagacctgtccccaggggccgccgcctccgccgctgctgctgccgccagcctagagccgcccgccgaagcagagccggcgccggggtcctcatccccaccggtcccgaggggcggctgctgcccgtcgccacgaggcccaggggcccgagtgccgagccctttgctccctcggccgcgcggggacagggctgctgagcagcctccgcctctcccggctgtgggggccccactgagtatgtcggaggagagcgacatggacaaagccatcaaggaaacttccattttagaagaatacagtatcaattggactcagaagctgggagctggaattagtggtccagttagagtctgtgtaaagaaatctactcaagaacggtttgcgctgaaaattcttcttgatcgtccaaaagctagaaatgaggtacgtctgcacatgatgtgtgccacacacccaaacatagttcagattattgaagtgtttgctaacagtgtccagtttccccatgagtccagccctagggcccgactcttaattgtaatggagatgatggaagggggagagctatttcacagaatcagccagcaccggcactttacagagaagcaagccagccaagtaacaaagcagatagctttggctctgcggcactgtcacttgttaaacattgcgcacagagacctcaagcctgaaaatctgctttttaaggataactctttggatgccccagtgaagttgtgtgactttggatttgccaagattgaccaaggtgacttgatgacaccccagttcaccccttattatgtagcaccccaggtactggaggcgcaaagaaggcatcagaaggagaaatctggcatcatacctacctcaccgacgccctacacttacaacaagagctgtgacttgtggtccctaggggtgattatctatgtgatgctgtgcggataccctcctttttactccaaacaccacagccggactatcccaaaggatatgcgaagaaagatcatgacaggcagttttgagttcccagaggaagagtggagtcagatctcagagatggccaaagatgttgtgaggaagctcctgaaggtcaaaccggaggagagactcaccatcgagggagtgctggaccacccctggctcaattccaccgaggccctggataatgtgctgccttctgctcagctgatgatggacaaggcagtggttgcaggaatccagcaggctcacgcggaacagttggccaacatgagaatccaggatctgaaagtcagcctcaaacccctgcactcagtgaacaaccccattctgcggaagaggaagttacttggcaccaagccaaaggacagtgtctatatccacgaccatgagaatggagccgaggattccaatgttgccttggaaaaactccgagatgtgattgctcagtgtattctcccccaggctggagagaatgaagatgagaaactgaatgaagtaatgcaggaggcttggaagtataaccgggaatgcaaactcctaagagatactctgcagagcttcagctggaatggtcgtggattcacagataaagtagatcgactaaaactggcagaaattgtgaagcaggtgatagaagagcaaaccacgtcccacgaatcccaataatgacagcttcagactttgtttttttaacaatttgaaaaattattctttaatgtataaagtaattttatgtaaattaataaatcataatttcatttccacattgattaaagctgctgtatagatttagggtgcaggacttaataatagtatagttattgtttgtttttaagaaaagctcagttctagagacatactattactttaggactgtgtagttgtatatttgtaagatgacagatgatgctgtcaagcaatattgttttatttgtaataaaatatacaaaaatcacttgccagcagtagaaaaaggaccgactataccgacctttctgattagtaaacagttgaatcaaggactctggattctggtttcaattgccctgtgtgtttattttccacaccattgctagattagctctactgccaagacatttttgtggctgtcattgcagactgcttgctggaactcacaggaggcacacttgagcttggggagccaacttccatgatggaagaagagggaggtgagccctcatttctcctgccccctaattcccaagagaaaagcaggaacatttcctttttgtcatatctgttaaaagggtactggtgtgtttcttaaatctaacagggttttcttttgggtttattctttttttttttttttttttgagacagagtcttgctgttgtagtggaggctggagtacagtggcactatctccgctcactgcaacctccgcctcccaggttccagtgatcctcccacatcagcctcccaagtagctgggattacaggtgcccgccaccacgcctggctaatttttgtatttttagtagagacagggtttcaccacgttggccaggctggtcttgaactcctgacctcaggtgatacgtctgccttggcctcccaaagtgctgggattacaggcgtgagccactgtgcccggccttgggtttattctttctttatatgtttgtttgtttgtttgttttgagatggagtcttgctcttatcacccagggtggagtgcagtggcacgatctcggctcactgcaacctctgtctcccaggttcaagtgattctcctgcctcagcctcccaagtagttgggattacaggcacccgccaccatgcccggctaatttttgtatttttagtagagacagggtttcaccatgttggccaggctggtctcgaactcctgaccatccacctcagcctctcaaagtactgggattacaggcatgagccaccaagcctggcctattctttatatgtttaaccggagcttccctttccccttccaggaggtcctgctttgtcctttccccttccctgcagccttcaccagctccattactccttatttctgttccctgttcctctggtcctgtttttggaataacttgtccgagaaatttacatataattaattgaagtgggactattggattatcatgtaagatgatccagttttggtttttttttttataaggctgccctgtttctctgtaatatgtctgtctgggttttgtgttggcatcctctgggctgcatttatcttgtttattacccttcattttcaggaagcatggttttggccccgagagcagctgtttgaaggaaaaataaggctaggtccttttttagttttctgttgtgagtatgggtttccataacaaaccaattttcgtgtatatgtgtgtgtgtgtgtgtgtgtgtgtgaagcagtttttggtgggtacttacgttggtacatagaaaagctggcaggtagactccagctcgcagagcagagggagaggatagtcatctgttattcaattttttctcatctcattctcttcgatcaaaattgatctcaccagcaacttattttctaactcctccactgtgctgagtaattcctccaccctgaatcttcagggtgacatttggttagtatgccctgtatgtgtgtgactgcctgtgggaatagatgataaaaaacaagtgtcttaagaattaccttattacattgcttccttttttttttttttttttttttgagatggattcttgctctgtcgcccaggctggagtgcagtggcgcgatcttggctcactgcaagctctgcctcccaggttcacaccattctcctacctcagcctcctgagtagctgggactatacaggtgcccgccaccgcgcccggctaatttctttttgtatttttagtagagacagggtttcaccgtgttagccaggatggtcttgatctcctgacctcgtgatccgcccacctcagcctccaaaagtgctgggattacaggtgtgagccactgcacccagcctacattggttcctttttatcttggagaatttaattgaaagatattttttgagataaagttcactaatcttaggtgactgataactgttataaatggatttcctgtaaggagaatatgtctcccccccaccccccaccctgctgccaccaagacagagtctcgctctgtcccccaggctggagtgcagtggcttgctcttggctcactgcaacctctgcctcccaggttcaagcgattctcgtgcctcagacttccaagtagctgggactacaggcacacaccaccacgcccagctaatttttgtgtttttagtagagacggggtttcatcatattggccaggctggtctcaaactcctgacctcgtgatccgcccacctcggcctcccaaagtgctgggattacaggcgtgagccaccgtgcgcgacctgaatacttttcatgatggcaaaatctcaccggcaacagaagaaaaaccaatgtttttaaatttactgaccagaaaacttgactgagagttgaattaagtgcctgttgttgtgtttttcagtgaaatgcaaatcttacagatcacttcttacagttaggaatactgcacttgtttgtgtaatattagaacaactgtagttttcctatcttagggcagaggttcagtattccatggggagaaaaaaacagtaattatctttgttactcttcttctttagaggaatattctagcatatccattatatccataacttcttaaatttgtgacttgggtgtcttctaaaaaggctcaggatgattattttttccttcagtgtatgctgaattttaggtgcgatggaaaaggtatccaaagtgatactccctttgactctgagcatcagttgcccgtgtttcagtcacttcaagctgaattcatgccctcaatgtaagtgctgtgtccagacacatccaaatgagcaccaagctggaagtttgtgaacactctggaggatgccccagctgttgtaatgcaacagcataccttgaaaaaaaacagtagctcccaagggactcagcatggcttggtcttcgaagtggagttttgtttgtgtattcctagtccagcagtaaattctgctttaacataactgtcaggtttgctactcgaaatttgcacataactggaagtgaaacgatatctttctcatattttttggcctaacaaacacctatacctgtggaaacataacactgtaaatataattcttataaagcagcaggttatgctctcctgtttgcctacatgatttattaaccttctgcttactaaagccattactggtcaatcagatacttttagactttaccacagttataaaagtcagcttgatgtagtaaaaaaacttgtctctctctgactaatatgtatgaatataggagaatcccagtctgaatttactgtttgaaacatagatgaggctcagcgtggtggctcatgcctttagtaatcccagcactttgggaagctgaggcgggcagatcaccttaggtcaagagttcaagaccagcttggccaacatggtgaaatgccgtctctactaaaaatacaaaaattagccaggcatggtggcacatgcctgtaatcccagctgctcgggaggctgaggcaggagaattgcttgaacctgggaggcagaggttgcagtgagtggagatcgcaccattgcactccagcctgggtgacagagcaaaactccgtctcagaaataaaaaagagacgtgatcctgctatgttgcccaagttagactcaagctcctgggctcaagcaatcctcctgcctcagccttctaagtagctgggactacaggagcaaaccactgtgcctggcaggaattactctttaaaaagagtttatgttgcttgtattcatttgagaaaaaatgagttgaagaaatggtaattgttggtcaaagaagccaaaagatttaaataaggtcttgtgtgtgggtatgtgtatgtgcatgtatttattgaagaaaataagtttcaatttgagaattagaaaattggatatttcattttaattatttatttaaagagtagagtgttcttccattattgaatcttcttttatcccaccaaatggcttaacctaatttgcgctgcctattttggttaagaaacagggaaacaccctaaaatctgtgataattttcaaaatacaattttaagaagctttgcgcttacataaatcacaagaaatacagctggaaatcatttcacttttcttgctgtaaatttttttagtgggtttgtgacagtataaattttcttgctagatgctaatgatacattgtattatctgtattaggaattaaatatttaataggaatagtgaataaattgatctgctctcatgctgttatctaagatcttatgctaccattacattcctttctgtagtcgtatctcatatttgaaaggtctcatgttgtaaatatttgacttgctgtaaaattatacaagataaaaaatgtagagttttatttttcttcatctagaatgcacagaataactgcgtaaggaatgggtgcatagggcttcttttccttttaaatttgtactgctaaatacaccaaggaaattgacatcaaaaccaaattcaaggacttccacagacatttcaggtcaattttagttccaaaccgaagaaatcttttaaaagttcttatatagcccagttttcttttcttgatgaaatgttaactagacacctggttagtcagcttttattttgaccccacagttttttttttgagacggattctcactctgttgcccaggttggagtgcaatggtgtgatctcggcttactgcaacctacgcctcctgggttcaagcgattctcctgcctcaccttcctgagtagctgagattacaggcgcctgccaccacgccccgctaatttttgcatttttagtagggacagggtttcaccatgctggccaggctggtctcgaactcccgacctcaggtgatccgcctgcctcggcctcccaaagtgctgggattacaggggtgagccaccgtgcccgggccccacactttgtttttatgttagggcagttggaggaactgaactttgatcctgatcctttatatactcccatggtgaaacttgagcccattttacttaacacaatatatccgtgcattaggaaaacttggtagagaagattatatgcagatataaaatatctaaactcatttgttatgaaccaacgataatgagggaaaacttggacatccacatacagattttcttgaattaaagaaaaaaaccagacactgacaaaggagagctgaactgataaatggtaccctgaaaactgcagaaatgagggaaagaggcagtgggccacaaagaactttgtccttttcagagatccccagagaagccctgcccccttccccccaccccctgacagaatgttgtgtttcaaagaatgagcagattaatggatatcaagttgtgtggcctgagctgaggataaagaataatttgcctgaggagttacagtactggctggatcactacaggccttctacttggaatatcttcccatgaaagtaaaaggaatataactaaggaagattaaagttgttgctgttggaaggaagacatactaaagaaactgccgaaggccaggagagaagcaggaagagaaacacggcttgaagttctgtaagaatcagagttgggcaagaactgccaataagggagccagcgtagatctgagtactaaacacctgagcctccgagggtttgtgtgcgagggagagctctgctgatggacataggcccagaatcattaactgatttatttgggccatgtcactggtggcattattaaaagactctgccaacatcctgctttatggaaaaaccaagtggccttggaagaggctaagataaagtttcaaacttgggctccacagaagtggaacttaaggctggggctagtaccaggaccttcatgtatcaggttagagattttgatgcttttggtgatttttgtgccaagcatgtactgtcacctgggatcaatctattactctttctatgaaataattattccaaagaggctgacagtccagggaggagatagcccagtggaaggactgtcctacttgttacttatgcaaggccagaagcacctggttcatctgaaggtgaagagaaaccattttgtgaataactttccagtctacagttaccacaatggcctcctggggcaagaatcgcctttcatctcacatgactgccactatgaaggctacatagaaggagtgtcaggttcttttgtttctgtcaacatctgtgcaggtctcaggggcacatcctcctgattaaggaggaaaaatcttacagcattgagcccatggactcttcaagacggtttgaacatgtgttatacaccatggcacatcaagcgtgagtctcctgtggtgtctactagctggcaacaagggagcaggaagcctcatgatctacaggcactgtcctacttgtggtcacacaaaaagtacgtggagatgtttgtcgtggtcaacaaccagcggttccagatgtggggcagtaacgtcaatgagacggtccagacagtagtggatgtcattgctctggccaacagcttcactaggggaataaacacagaggtggtgctggctggaatggagatttggaccgagggggacctaatagatgtcacagtggacttgcaaatcacactcaggaatttcaatcactggagacaagagatgctcttccatcgtgcaaaacacgatgttgcccacatgatcgttgggcatcaccctggacagaatatgggccaggcctttctcagtggtgcctgctcaagcggttttgcggcagctgttgaatccttccatcatgaagatgtgctgttgtttgcagccctgatggcccatgagctcgggcacaacctgggtattcagcacgaccactcggcctgcttttgtaaagataagcacttttgcctcatgcatgaaaatatcacaaaagaaagtggcttcagcagctgcagctctgactacttctaccagttccttcgagaacacaaaggggcctgcctatttaacaagccacggcccaggggccgcaagcgtagggattctgcctgtggaaatggtgtggtggaggacacggagcagtgtgactgtggttctctatgtcagcatcatgcatgctgtgatgaaaactgtatactgaaggcgaaagcagagtgcagtgatggtccatgttgtcataagtgtaaatttcaccgtaagggatatccttgctgtccttctagtcgttcctgtgatctcccagaattttgcaatggtacatctgcattatgccccaacaacaggcataagcaagatggctcaaaatgtcatacaatttacgagtgccttaaagttcattgtatggaccctaataatcagtgcttacaattatatggatatggtgcaaaatcagcctcacaagagtgttacaattcaatgaacagcaaaggggaccaatttggaaactgtggcatttctaccagtcctgggtcacaatatgttcggtgttcagatggtaatatattttgtgggaaacttatatgttcaggtattacaggcttaccaaaaatcaatctccaacatacaatgattcaggtccctcagggagatggctcatgttggagcatggatgcctatatgagtactgacattcctgatgaaggagatgtgcacaatggcacttactgtgcaccaaacaaagtctgcctgaattccgcctgcacagataaaaccccagtgatttctgcctgcaacccagaaaaaacgtgtaatgggaagggagtttgtaatgatttagggcactgccactgtaatgaagggcatgccccccctgactgtgttactgcaggaagtggaggtagtgtggacagtggccctcctggtaagctaggtgggacaccttcaggagaaggtgaaaatcacaatatgactcattccagacgtgaagaacatgctgtagacatgatgatattatcattcattatactttttataatattattattaagtacaattatttgatctgcttgcttaaaaaatcaccagaggctgccccggcagaagctcctccagcagtggctccaccaccggccccagaaataaagccagaagcagcagaagtggccacagaagaaaaagaagagaaggaggaagaaaaagaagaggaggaggaggaagaagaggaggaagaatcagattcctaaggttagaaatagggagatgaagccaagtatatcaaactcctcaagtactgagtgggaatgagatgtttggtgaagtagaaatagatagctttagtggctctgactcagatatactgatgtagaaggaaggattctttcacttttattatttattttggtaattaaatttacattaatttaatatgttaaatattttagtaccttttgctttttcacatttcatttgaaccattaacatgcatctttggacatcaatgtccttgtctttttggcccaattgttttagtcaccagaaactttttcaggacatgctatcttctatttgtttgacatacagaatcatatgtacctgaatttattactaactctgggattttcattttaagtaacaactacctattatgtgaggacagttgtttatgtgattggttgttctaacttgccctataaatgtgcattcatcaaaggagaagtttttaaatccaaaaacaaataaaacccgattcatattagacaactcttcaggttccaca

SEQ ID NO: 155112 - DNA, 974 bp, Homo sapiens
  Payload ID: 10490
  Gene Symbol: MAPKAPK5
  Gene Name: mitogen-activated protein kinase-activated protein kinase 5
  ENST ID: ENST00000549875
  CDS Start-End: 1-974
atgtcggaggagagcgacatggacaaagccatcaaggatgccccagtgaagttgtgtgactttggatttgccaagattgaccaaggtgacttgatgacaccccagttcaccccttattatgtagcaccccaggtactggaggcgcaaagaaggcatcagaaggagaaatctggcatcatacctacctcaccgacgccctacacttacaacaagagctgtgacttgtggtccctaggggtgattatctatgtgatgctgtgcggataccctcctttttactccaaacaccacagccggactatcccaaaggatatgcgaagaaagatcatgacaggcagttttgagttcccagaggaagagtggagtcagatctcagagatggccaaagatgttgtgaggaagctcctgaaggtcaaaccggaggagagactcaccatcgagggagtgctggaccacccctggctcaattccaccgaggccctggataatgtgctgccttctgctcagctgatgatggacaaggcagtggttgcaggaatccagcaggctcacgcggaacagttggccaacatgagaatccaggatctgaaagtcagcctcaaacccctgcactcagtgaacaaccccattctgcggaagaggaagttacttggcaccaagccaaaggacagtgtctatatccacgaccatgagaatggagccgaggattccaatgttgccttggaaaaactccgagatgtgattgctcagtgtattctcccccaggctggtaaaggagagaatgaagatgagaaactgaatgaagtaatgcaggaggcttggaagtataaccgggaatgcaaactcctaagagatactctgcagagcttcagctggaatggtcgtggattcacagataaagtagatcgactaaaactggcagaaattgtgaagcaggtgatagaagagcaaaccacgtcccacgaatcccaata

SEQ ID NO: 155113 - DNA, 494 bp, Homo sapiens
  Payload ID: 10490
  Gene Symbol: MAPKAPK5
  Gene Name: mitogen-activated protein kinase-activated protein kinase 5
  ENST ID: ENST00000547305
  CDS Start-End: 260-415
gcggccgcgtggggcccagcacaaagacctgtccccaggggccgccgcctccgccgctgctgctgccgccagcctagagccgcccgccgaagcagagccggcgccggggtcctcatccccaccggtcccgaggggcggctgctgcccgtcgccacgaggcccaggggcccgagtgccgagccctttgctccctcggccgcgcggggacagggctgctgagcagcctccgcctctcccggctgtgggggccccactgagtatgtcggaggagagcgacatggacaaagccatcaaggccgccagcatttgcttccggatggtctacagaacttggagagttggaatttatccatccctcccgatttgtttgaaatcagccttctggaaatctgcagttggaaaaaggaagcattgagtttacttaggaaaagttaacagttcctgtgacttaactgcacttaaaccaaaagaaaagcaaatgtgtgttcgaaaat

SEQ ID NO: 155114 - DNA, 2299 bp, Homo sapiens
  Payload ID: 10491
  Gene Symbol: MZT1
  Gene Name: mitotic spindle organizing protein 1
  Uniprot ID: Q08AG7
  ENST ID: ENST00000377818
  CDS Start-End: 86-334
gagacgcgctgtgtgattgcctcggagagaggaaggcgctccagttccgggtcaggcccttctcccgcctccctcggccttagccatggcgagtagcagcggtgctggggcggcggcggcggccgcggcggcgaatctgaatgcggtgcgggagaccatggacgttctgcttgagatttcaagaattttgaatactggcttagatatggaaactctgtctatttgtgtacggctttgtgaacaaggaattaacccagaagctttatcatcggttattaaggagcttcgcaaggctactgaagcactgaaggctgctgaaaatatgacaagctgactttctggagaaattctgatgagatatgtcaagctctgcaagagggtttgaagattgcattgtagttgagaatgtacaatgaaattactgcatgcagcagtgtagaaaaattttactttttaaaagaattataaaaccatagctttataaatcagtggaaagtggcttacagagagaactatcagatgtgtttacatcacatcttattcactttttttaacagctctaatgctttggcattgctatgttcatatttatgtattccttatttatagctctgatagctttaattttctaagcagtctgtctatcagatgtgcacatctgctgtgccaggttgaagtatagtggaacccatcagtagtaatgtgtagtagttatgacttgttgacatttccattataaactttaattttgaattgtttatgcattataactgtggatttatattgtattgggctgaaagttgacaggatttcagccaccacttgtgaatttttatttagattcattatgtatatcagaatcttgttttttgaaataagagcatggaaaacatttcttgtaatctactcttgaacaaagaatatttagtttttcaaacagtttgttgggcagctaatagtgtgaaccaggtcatttttgtattgagtaaaaaaatcaaactttgagaaacttggattttaaaagtaatgacaatgcttaggttagtattatttgtaatttgaatcatttacatctaatgagaatgttagttgagaatgttttcttaaagttttatatcctataaataacggaataaaaaaatttgtaaaatgaaacaacaaacatgcaaaattcctatttacttttattacataaaagtaattttagtgcttacctaataaatcttgaatggttatttaataaattattagatgggtgatgtgtttcaaaagatacttgctattttttgaagaaataaggatttccagtcattaaacaaaactaaacaatcttattagatgggtgatgtgtttcaaaggatacttgctattttttgaagaaataaggatttccagtcattaaacaaaactaaacaatcaaatgttctatattaggaatctcaagtatggctttttttaaaaaacctttttaacatcttgatgtcaaggattataagtatggcttttcagaattgttttgtttgtcattattcttgcctttaaaattttaactcatcaaagtgaagattagaaataaattttagaaaatgtagaatagtattgattctgttcctgtaatagaatctcagtggagtttttttgcaaaactaatatggatttcatctgattttattatttcttaaattttagattttattgagtaccatttatatgattgtacaagcattcactctttactagcattttttgtttttcagacaagctgaagtggttttattaagatttggtaatatttaaatagcaaccttctctgcctttttttttttttaatatagaattttgaccattttgactttttaaatgcctggcatctttaccaaccaagtaaactggaagatctgttactggtagaacaggttgaggagacagtaggaatttgtaaaaagtcatttgatttataatcaacactacaaatactatgtgttatttataaaatcataaagaacacttttgtcagactccaaaatttgtatatacttccaggccataagagttgatagtattatttatgactttgtagattaagttatttatgtatgaaacaaagcaggaaaatatattgagaagggatcgtgtttacagaggacttctttaaagtgtcacatttttaaaatgtaaacatatttttaatgcatacttaagtaatatttaagaaactaaacaaaataatgatacaattgcagtgttgtgcttgttgtcaatgacaaaaataaaaccattttggtggtattggcctgta

SEQ ID NO: 155115 - DNA, 624 bp, Homo sapiens
  Payload ID: 10492
  Gene Symbol: MZT2A
  Gene Name: mitotic spindle organizing protein 2A
  Uniprot ID: Q6P582
  ENST ID: ENST00000309451
  CDS Start-End: 47-523
tagggggcgcggcggggcggggcgcacctttcggcgggcctcgcggatggcggcgcagggcgtagggcctgggccggggtcggcggcgcccccggggctggaggcggcccggcagaagctggcgctgcggcgcaagaaggtgctgagcaccgaggagatggagctgtacgagctggctcaggcggcgggcggcggtatcgaccccgacgtgttcaagatcctggtggacctgctgaagctgaacgtggcccccctcgccgtcttccagatgctcaagtccatgtgtgccgggcagaggctagcgagcgagccccaggaccctgcggccgtgtctctgcccacgtcgagcgtgcccgagacccgagggagagacaaaggcagcgctgccctcgggggagtattggccctggcggaacgcagcaaccacgagggatccagccagaggatgccacgccagcccagcgctaccaggctgcccaaggggggcgggcctgggaagagccctacgcagggcagcacctaggatggggcagagacttgtcacatctttgtccccagcaaaggctacatgttacctccttcagttgataataaacctttctgagatgcagagggtccaggtca

SEQ ID NO: 155116 - DNA, 679 bp, Homo sapiens
  Payload ID: 10492
  Gene Symbol: MZT2A
  Gene Name: mitotic spindle organizing protein 2A
  ENST ID: ENST00000427024
  CDS Start-End: 1-421
gcccccggggctggaggcggcccggcagaagctggcgctgcggcgcaagaaggtgctgagcaccgaggagatggagctgtacgagctggctcaggcggcgggcggcggtatcgaccccgacgtgttcaagatcctggtggacctgctgaagctgaacgtggcccccctcgccgtcttccagatgctcaagtccatgtgtgccgggcagaggctagcgagcgagccccaggaccctgcggccgtgtctctgcccacgtcgagcgtgcccgagacccgaggcttgagtgacaacttgaggacaaggcggcgcctcaacaagatttcacacagcagctacgggggccagagaagcagcaccgcatggtgtggcaggagaaggaggacatgcacaagcaattggttgaagcttcagagacattgaaatcccaagccaaagaactgaaagatgcccatcagcagcaaaagctggccctgcaggagttcttggagctcaatgagctcatggcagagctctactcccagaagcagaagaccagctgagctagtgagcaagaaacacaagcactgaagctggaagcgtctgcatcaatttctgtggctgccagcacagaaccgcaggaagtaagacagcgttgtcctactgatgctctcacctggggtctgccctcatgtccaggtg

SEQ ID NO: 155117 - DNA, 933 bp, Homo sapiens
  Payload ID: 10493
  Gene Symbol: MZT2B
  Gene Name: mitotic spindle organizing protein 2B
  Uniprot ID: Q6NZ67
  ENST ID: ENST00000281871
  CDS Start-End: 356-832
tttcttgaaagaggcatttaccgagcgcccaatgtatgcctggcactgggctgggtgctgccacctaagcgagcacgaccaatgcagtctatcagggaggcccagatcgccaagcagcggacccctgcggtccgccatgccactcccggctcctagagcgccgctcagcacaccgtgagcgcccaataactgttgggcttcaatgacgccgcggaggcggccccgtccccgcgctcccgcccctcccgccagggcagcccgggaggccagacgttgacgctgcagggagagggtggtgggcgcagccgctagggggcgcggcggggcggagcgcacctttccgcgggccgcggggatggcggcgcagggcgtagggcctgggccggggtcggcggcgcccccggggctggaggcggcccggcagaagctggcgctgcggcggaagaaggtgctgagcaccgaggagatggagctgtacgagctggcgcaggcggcgggcggcgctatcgaccccgacgtgttcaagatcctggtggacctgctgaagctgaacgtggcccccctcgccgtcttccagatgctcaagtccatgtgtgccgggcagaggctagcgagcgagccccaggaccctgcggccgtgtctctgcccacgtcgagcgtgcccgagacccgagggagaaacaaaggcagcgctgccctcgggggagcattggccctggcggaacgcagcagccgcgaaggatccagccagaggatgccacgccagcccagcgctaccaggctgcccaaggggggcgggcctgggaagagccctacacggggcagcacctaggatggggcagagacttgttgcatctttgtccccagcaaaggctacatgttacctccttcaattgataataaacctttctgagatgcagagggtccaggtca

SEQ ID NO: 155118 - DNA, 769 bp, Homo sapiens
  Payload ID: 10493
  Gene Symbol: MZT2B
  Gene Name: mitotic spindle organizing protein 2B
  ENST ID: ENST00000409255
  CDS Start-End: 27-683
agcgcacctttccgcgggccgcggggatggcggcgcagggcgtagggcctgggccggggtcggcggcgcccccggggctggaggcggcccggcagaagctggcgctgcggcggaagaaggtgctgagcaccgaggagatggagctgtacgagctggcgcaggcggcgggcggcgctatcgaccccgacgtgttcaagatcctggtggacctgctgaagctgaacgtggcccccctcgccgtcttccagatgctcaagtccatgtgtgccgggcagaggctagcgagcgagccccaggaccctgcggccgtgtctctgcccacgtcgagcgtgcccgagacccgagaggcctcctttctctctgccaggaacagtagcccccctgcaaggccctccttttcctccagcccgcagcctgcggcctctccggttctgctccacagcccggctgccacacactcgcctctctctccaggccccccgggttccctccgcctctcttgctgcctgttctctccttttgcagggagaaacaaaggcagcgctgccctcgggggagcattggccctggcggaacgcagcagccgcgaaggatccagccagaggatgccacgccagcccagcgctaccaggctgcccaaggggggcgggcctgggaagagccctacacggggcagcacctaggatggggcagagacttgttgcatctttgtccccagcaaaggctacatgttacctccttcaattgataataaacctttctgagatgc

SEQ ID NO: 155119 - DNA, 435 bp, Homo sapiens
  Payload ID: 10493
  Gene Symbol: MZT2B
  Gene Name: mitotic spindle organizing protein 2B
  ENST ID: ENST00000457492
  CDS Start-End: 1-366
gttgtggcggcctccggcgccccaaggtactttctccccagcaaggaatccgcgtgcgcgatcctggtggacctgctgaagctgaacgtggcccccctcgccgtcttccagatgctcaagtccatgtgtgccgggcagaggctagcgagcgagccccaggaccctgcggccgtgtctctgcccacgtcgagcgtgcccgagacccgagggagaaacaaaggcagcgctgccctcgggggagcattggccctggcggaacgcagcagccgcgaaggatccagccagaggatgccacgccagcccagcgctaccaggctgcccaaggggggcgggcctgggaagagccctacacggggcagcacctaggatggggcagagacttgttgcatctttgtccccagcaaaggctacatgttacctccttcaattgataat

SEQ ID NO: 155120 - DNA, 455 bp, Homo sapiens
  Payload ID: 10493
  Gene Symbol: MZT2B
  Gene Name: mitotic spindle organizing protein 2B
  ENST ID: ENST00000425361
  CDS Start-End: 1-368
gggggagggagtggtccttagctgaatgcgcctgcgttgtggcggcctccggcgccccaaggatcctggtggacctgctgaagctgaacgtggcccccctcgccgtcttccagatgctcaagtccatgtgtgccgggcagaggctagcgagcgagccccaggaccctgcggccgtgtctctgcccacgtcgagcgtgcccgagacccgagggagaaacaaaggcagcgctgccctcgggggagcattggccctggcggaacgcagcagccgcgaaggatccagccagaggatgccacgccagcccagcgctaccaggctgcccaaggggggcgggcctgggaagagccctacacggggcagcacctaggatggggcagagacttgttgcatctttgtccccagcaaaggctacatgttacctccttcaattgataataaacctttctgagatgca

SEQ ID NO: 155121 - DNA, 401 bp, Homo sapiens
  Payload ID: 10493
  Gene Symbol: MZT2B
  Gene Name: mitotic spindle organizing protein 2B
  ENST ID: ENST00000455239
  CDS Start-End: 1-363
gggtcggcggcgcccccggggctggaggcggcccggcagaagctggcgctgcggcggaagaaggtgctgagcaccgaggagatggagctgtacgagctggcgcaggcggcgggcggcgctatcgaccccgacgtgttcaaggagaaacaaaggcagcgctgccctcgggggagcattggccctggcggaacgcagcagccgcgaaggatccagccagaggatgccacgccagcccagcgctaccaggctgcccaaggggggcgggcctgggaagagccctacacggggcagcacctaggatggggcagagacttgttgcatctttgtccccagcaaaggctacatgttacctccttcaattgataataaacctttctgagatgcagagggtccaggtcaga

SEQ ID NO: 155122 - DNA, 2871 bp, Homo sapiens
  Payload ID: 10494
  Gene Symbol: MISP
  Gene Name: mitotic spindle positioning
  Uniprot ID: Q8IVT2
  ENST ID: ENST00000215582
  CDS Start-End: 104-2143
aggagtcagagtggaggctgcagactgtggagccgggagccggcagtaagcccagaggtctccaccccacgggaggaaggctgaggccaagaccccggaagagatggaccgcgtgaccagataccccatcctgggcatccctcaggcacaccgtggcaccggcctggtgctggatggagacaccagctacacataccatctggtgtgcatgggccccgaggccagcggctggggccaggatgagccgcagacatggcccactgaccacagggcccagcagggcgtgcagaggcagggggtgtcctacagcgtgcatgcctacactggccagccgtccccacgggggctccactcggagaacagggaggatgagggttggcaggtttaccgcctgggcgccagggatgcccaccagggacgtccaacatgggcactccgcccagaggacggggaggacaaggagatgaagacctaccgcctggatgctggggacgctgaccccaggaggctgtgtgacctggagcgggagcgctgggccgtcatccagggccaggcagtcaggaagagcagcaccgtggccacgctccagggcactcctgaccacggagaccccaggacccccggcccacctcggtccacgcccctggaggagaacgtggttgacagggagcagattgacttcctggcagcgagacagcagttcctgagtctggagcaggcgaacaagggggcccctcatagctccccggccagggggacccctgcaggcacaaccccaggggccagccaggcccccaaggccttcaacaagccccacctggccaacgggcacgtggttcccatcaagccccaggtgaagggggtggtcagggaagagaacaaggtgcgtgctgtgcccacctgggccagtgtccaagttgtggatgaccctggctccttggcctcagtggagtccccggggacccccaaggagacgcccatcgagcgggagatccgtctggctcaggagcgtgaggcagacctgcgagagcagagggggcttcggcaggcaaccgaccaccaggagctggtggaaatccccaccaggccgctgctgaccaagctgagcctgatcacagccccacggcgggagagagggcgcccgtccctctacgtgcagcgggacatagtacaggagacacagcgtgaggaagaccaccggcgggagggcctgcacgtgggccgggcgtccacacccgactgggtctcggagggtccccagcccggactccggagagccctcagctcagattccatcctcagcccggccccagatgcccgtgcggccgacccagctccagaagtgaggaaggtgaaccgcatcccacctgatgcctaccagccgtacctgagccccgggaccccccagctagaattctcagccttcggagcattcggcaagcccagcagtctctccacagcggaggccaaggctgcgacttcaccaaaggccacgatgtccccgaggcatctctcagaatcctctggaaaacccctgagcacaaagcaagaggcatcgaagccccctcggggatgcccgcaagccaacaggggtgtcgtgcggtgggagtacttccgcctgcgtcctctgcggttcagggccccagacgagccccagcaggcccaagtcccccatgtctggggctgggaggtggctggggcccctgcactgaggctgcagaagtcccagtcatctgatctgctggaaagggagagggagagtgtcctgcgccgggagcaagaggtggcagaggagcggagaaatgctctcttcccagaggtcttctccccaacgccagatgagaactctgaccagaactccaggagctcctcccaggcatccggcatcacgggcagttactcggtgtctgagtctcccttcttcagccccatccacctacactcaaacgtggcgtggacagtggaagatccagtggacagtgctcctcccgggcagagaaagaaggagcaatggtacgctggcatcaacccctcggacggtatcaactcagaggtcctggaagccatacgggtgacccgtcacaagaacgccatggcagagcgctgggaatcccgcatctacgccagtgaggaggatgactgagcctcgggatggggcgcccaccccctgccctgccctgaccctcgtgggaactgccaagaccatcgccaagcccccaccctaggaaatgggtcctaggtccaggatccaagaaccacagctcatctgccaacaatcccaccatgggcacatttgggactgttgggtttttcgtttccgtttctatcttcctttagaaatgtttctgcctttggggtctaaagcttttggggatgaaatgggacccctgctgattctttctgcttctaagactttgccaaatgccctgggtctaagaaagaaagagacccgctcctccactttcaggtgtaatttgcttccgctagtctgagggcagagggaccggtcaaagagggtggcacagatcgcagcaccttgaggggctgcgggtctgagggaggagacactcagctcctccctctgagaagtcccaagctgagaggggagacctgcccctttccaaccctgggaaaccatccagtctgagggaggaggccaaactcccagtgctgggggtccctgtgcagccctcaaacccttcaccttggtgcacccagccacacctggtggacacaaagctctcacatcgataggatcccatgaggatggtccccttcacctgggagaaaagtgacccagtttaggagctggaggggggtctttgtcccccacccccaaactgccctgaaataaacctggagtgagctgcc

SEQ ID NO: 155123 - DNA, 2005 bp, Homo sapiens
  Payload ID: 10495
  Gene Symbol: MIXL1
  Gene Name: Mix paired-like homeobox
  Uniprot ID: Q9H2W2
  ENST ID: ENST00000366810
  CDS Start-End: 65-763
cctggcccgggagggtataagtgcggcccgcgcccctccgagcggcgcgctgggttccggagcgatggccacagccgagtcccgtgcgctccagtttgccgagggcgccgcgtttccagcgtaccgggccccccacgccggcggggcgctcctgccgcccccgagccctgcggcagccctgctccctgcgccgcccgcgggccccggcccagcgacctttgcgggcttcctcggccgggaccccgggccggccccgccgccccccgccagcctgggctcgcctgcgccccccaaaggcgcggccgccccgtcggcgtcgcagcgccgcaagcgcacgtctttcagcgccgaacagctgcagctgctggagctcgtcttccgccggacccggtaccccgacatccacttgcgcgagcgcctggccgcgctcaccctgctccccgagtccaggatccaggtatggttccagaacaggcgtgccaagtctcggcgtcagagtgggaaatccttccaacctttggctaggccggagattatcctcaaccactgtgctcctggaactgaaacgaaatgtctgaagccccagctgcctcttgaggtagatgtgaactgcctgcccgaaccaaacggggttggagggggcatctctgactctagctcccaaggtcagaattttgaaacctgttcccctctctctgaagacattggttcaaagctggactcatgggaggaacacatcttttctgcctttggtaacttttgaggattctgggagaattcgggataagctctgaggagccatgactgacagcctgggagagacacatcagcatactgtcctttctgacttccatgctaaggacatgtccttgttaaccttgatgatggttttgacagcacctctcacatttgaaggtaccccgccactttgtcaatgacgttttaagcccacactcccaccccagagttcccgcattcgtttttacctgtgttctctccaagcctgcacattccattggtctgcatccctatgccttcttgccaggcctgtttttagtttttggactggttgttcagaactcattattttcttcacaagaatgcctcagcttgactcagtttccccttgtgtttgacagctgccattttctcctggtccctccaaggcttataatcttaaagtcactctaccccgtctcttcaaccctcatcctaggtttattactttttaaaattgggcctgtcatcttcacgttcaatcatagctccaatgactctgcatgcagattatttcgacagcccccttgcctctagcttctcaactacttaaaaaaaattaccctctgtgggccaggtgcagtggctcactcctgcaatctcagcactttgggaggccgagtgggtggatcacctgaagtcaggagttcaagaccagcctggccaatatggcgaaaccccatctctgctaaaaatataaaacttagctgggcacggtgacgggagcctgtagtcccagctactcaggaggctgaggcaggagaatcacttgagcctgggaggtggaggttgcagtgatctaagatcgtgccactgcacttcagcctgggagacagagggaggctctcaaaaaaaaaaaaaaaaaaaaaaaaaattactctatggttctgtggtagcctccagttgctaccaaattataaaaagctttcagttaccctcccagataactgatatcatccttagcctgcaggacagctatgcaaatctgaaggtcaactatccacaatatatgctttggtcttaaagtcactcctttcagttttgaaccaaattcataccttttgctttcaaaacactcgaggactccccacctgccttctgaagtctgaaattttctctaagtaatcctgattttgcacctgttacttcgatcactccattacccttagcacttgttattgtacttcctgtgcaagttttgtggattattaaatgtctttcacaaatg

SEQ ID NO: 155124 - DNA, 839 bp, Homo sapiens
  Payload ID: 10495
  Gene Symbol: MIXL1
  Gene Name: Mix paired-like homeobox
  Uniprot ID: Q9H2W2
  ENST ID: ENST00000542034
  CDS Start-End: 65-787
cctggcccgggagggtataagtgcggcccgcgcccctccgagcggcgcgctgggttccggagcgatggccacagccgagtcccgtgcgctccagtttgccgagggcgccgcgtttccagcgtaccgggccccccacgccggcggggcgctcctgccgcccccgagccctgcggcagccctgctccctgcgccgcccgcgggccccggcccagcgacctttgcgggcttcctcggccgggaccccgggccggccccgccgccccccgccagcctgggctcgcctgcgccccccaaaggcgcggccgccccgtcggcgtcgcagcgccgcaagcgcacgtctttcagcgccgaacagctgcagctgctggagctcgtcttccgccggacccggtaccccgacatccacttgcgcgagcgcctggccgcgctcaccctgctccccgagtccaggatccagcttttattttctcccctcttccaggtatggttccagaacaggcgtgccaagtctcggcgtcagagtgggaaatccttccaacctttggctaggccggagattatcctcaaccactgtgctcctggaactgaaacgaaatgtctgaagccccagctgcctcttgaggtagatgtgaactgcctgcccgaaccaaacggggttggagggggcatctctgactctagctcccaaggtcagaattttgaaacctgttcccctctctctgaagacattggttcaaagctggactcatgggaggaacacatcttttctgcctttggtaacttttgaggattctgggagaattcgggataagctctgaggagccatgactgacagcctg

SEQ ID NO: 155125 - DNA, 1781 bp, Homo sapiens
  Payload ID: 10496
  Gene Symbol: MLKL
  Gene Name: mixed lineage kinase domain-like
  Uniprot ID: Q8NB16
  ENST ID: ENST00000306247
  CDS Start-End: 341-1132
gacctgaggcagtggcctccggagggcactggacagaaacagccatccaagtggctgagtggagggaccctgctcaagtgcagctgcagtggccggggtttccctcaggtagggatcggggcgccttgtcgccgccagccacgtgtggcgtccggtacagtcagcagagtgcagggtgcgggcaccaggaaagggggcgcaggggaactcccgcgggcctcgcgtttgcaaacttctcgcctgggcaggaggcggtcgtgggaaagaaggtggaagagcgagctttttggaactgtgcacgggacagattggacgcacacccctcgggaggcgcgaaggcatggaaaatttgaagcatattatcacccttggccaggtcatccacaaacggtgtgaagagatgaaatactgcaagaaacagtgccggcgcctgggccaccgcgtcctcggcctgatcaagcctctggagatgctccaggaccaaggaaagaggagcgtgccctctgagaagttaaccacagccatgaaccgcttcaaggctgccctggaggaggctaatggggagatagaaaagttcagcaatagatccaatatctgcaggtttctaacagcaagccaggacaaaatactcttcaaggacgtgaacaggaagctgagtgatgtctggaaggagctctcgctgttacttcaggttgagcaacgcatgcctgtttcacccataagccaaggagcgtcctgggcacaggaagatcagcaggatgcagacgaagacaggcgagctttccagatgctaagaagagataatgaaaaaatagaagcttcactgagacgattagaaatcaacatgaaagaaatcaaggaaactttgaggcagtctttggaatcgtcctctgggaaatcgccactggagatatcccgtttcaaggtgaagaatgtgaagactggctcagccagtggctgtaattctgagaagatccgcaagctggtggctgtgaagcggcagcaggagccactgggtgaagactgcccttcagagctgcgggagatcattgatgagtgccgggcccatgatccctctgtgcggccctctgtggatgaaatcttaaagaaactctccaccttttctaagtagtgtatcaaaatctaaaccaaggagtctctggacaagaagctgggagaggcacaaactggacatctctctctctcatatccttcggcattgggttatctatgggtgcaaggagtgggcacgcttctctgttacaaatagaaaacgattccagtcatacaggacacatcccactccaaatgatatttccaaaaacatacctctgacagtaactttgatagatggtttgtcaaatgtatctttctgggtatccacacctcttggcaatgaaatttgcagctcctcccttccataaatgaagtctctttccccaccatttgaatctgggctggcactgtgacttgatttgatcaatagaatgtggaagaagtgactgtatgccagttccaagcctaggtttcaagaggccttataaatgtctgttggaaccttacccagccatgaacatgttgagtgagcatgctggagaatgagagaccacatgaagcagaaacatgctttcctagctgaagtcatactagcccaaccaacatggcagctaacacatgaatgaggccaatcaagaccagaagaaccactcaagcagatcccagcccaaattgcccattcacacaatcaggagctaaataaattactgttgtcttaacactaa

SEQ ID NO: 155126 - DNA, 2523 bp, Homo sapiens
  Payload ID: 10496
  Gene Symbol: MLKL
  Gene Name: mixed lineage kinase domain-like
  Uniprot ID: Q8NB16
  ENST ID: ENST00000308807
  CDS Start-End: 465-1880
ggggccgtggctccgagctgcctagaaagcggctccagggagccagggcaccgtgagcctggtggttggcagctggagccacgtcggagggggaagtgtcgcagcattctctgcaggcatcacagacctgaggcagtggcctccggagggcactggacagaaacagccatccaagtggctgagtggagggaccctgctcaagtgcagctgcagtggccggggtttccctcaggtagggatcggggcgccttgtcgccgccagccacgtgtggcgtccggtacagtcagcagagtgcagggtgcgggcaccaggaaagggggcgcaggggaactcccgcgggcctcgcgtttgcaaacttctcgcctgggcaggaggcggtcgtgggaaagaaggtggaagagcgagctttttggaactgtgcacgggacagattggacgcacacccctcgggaggcgcgaaggcatggaaaatttgaagcatattatcacccttggccaggtcatccacaaacggtgtgaagagatgaaatactgcaagaaacagtgccggcgcctgggccaccgcgtcctcggcctgatcaagcctctggagatgctccaggaccaaggaaagaggagcgtgccctctgagaagttaaccacagccatgaaccgcttcaaggctgccctggaggaggctaatggggagatagaaaagttcagcaatagatccaatatctgcaggtttctaacagcaagccaggacaaaatactcttcaaggacgtgaacaggaagctgagtgatgtctggaaggagctctcgctgttacttcaggttgagcaacgcatgcctgtttcacccataagccaaggagcgtcctgggcacaggaagatcagcaggatgcagacgaagacaggcgagctttccagatgctaagaagagataatgaaaaaatagaagcttcactgagacgattagaaatcaacatgaaagaaatcaaggaaactttgaggcagtatttaccaccaaaatgcatgcaggagatcccgcaagagcaaatcaaggagatcaagaaggagcagctttcaggatccccgtggattctgctaagggaaaatgaagtcagcacactttataaaggagaataccacagagctccagtggccataaaagtattcaaaaaactccaggctggcagcattgcaatagtgaggcagactttcaataaggagatcaaaaccatgaagaaattcgaatctcccaacatcctgcgtatatttgggatttgcattgatgaaacagtgactccgcctcaattctccattgtcatggagtactgtgaactcgggaccctgagggagctgttggatagggaaaaagacctcacacttggcaagcgcatggtcctagtcctgggggcagcccgaggcctataccggctacaccattcagaagcacctgaactccacggaaaaatcagaagctcaaacttcctggtaactcaaggctaccaagtgaagcttgcaggatttgagttgaggaaaacacagacttccatgagtttgggaactacgagagaaaagacagacagagtcaaatctacagcatatctctcacctcaggaactggaagatgtattttatcaatatgatgtaaagtctgaaatatacagctttggaatcgtcctctgggaaatcgccactggagatatcccgtttcaaggctgtaattctgagaagatccgcaagctggtggctgtgaagcggcagcaggagccactgggtgaagactgcccttcagagctgcgggagatcattgatgagtgccgggcccatgatccctctgtgcggccctctgtggatgaaatcttaaagaaactctccaccttttctaagtagtgtatcaaaatctaaaccaaggagtctctggacaagaagctgggagaggcacaaactggacatctctctctctcatatccttcggcattgggttatctatgggtgcaaggagtgggcacgcttctctgttacaaatagaaaacgattccagtcatacaggacacatcccactccaaatgatatttccaaaaacatacctctgacagtaactttgatagatggtttgtcaaatgtatctttctgggtatccacacctcttggcaatgaaatttgcagctcctcccttccataaatgaagtctctttccccaccatttgaatctgggctggcactgtgacttgatttgatcaatagaatgtggaagaagtgactgtatgccagttccaagcctaggtttcaagaggccttataaatgtctgttggaaccttacccagccatgaacatgttgagtgagcatgctggagaatgagagaccacatgaagcagaaacatgctttcctagctgaagtcatactagcccaaccaacatggcagctaacacatgaatgaggccaatcaagaccagaagaaccactcaagcagatcccagcccaaattgcccattcacacaatcaggagctaaataaattactgttgtcttaa

SEQ ID NO: 155127 - DNA, 1004 bp, Homo sapiens
  Payload ID: 10496
  Gene Symbol: MLKL
  Gene Name: mixed lineage kinase domain-like
  ENST ID: ENST00000573267
  CDS Start-End: 371-1004
tggggaaggcaggaagagtgtggaaaggacaggaggaaggaagggaggggccgtggctccgagctgcctagaaagcggctccagggagccagggcaccgtgagcctggtggttggcagctggagccacgtcggagggggaagtgtcgcagcattctctgcaggcatcacagacctgaggcagtggcctccggagggcactggacagaaacagccatccaagtggctgagtggagggaccctgctcaagtgcagctgcagtggccggggtttccctcaggaggcggtcgtgggaaagaaggtggaagagcgagctttttggaactgtgcacgggacagattggacgcacacccctcgggaggcgcgaaggcatggaaaatttgaagcatattatcacccttggccaggtcatccacaaacggtgtgaagagatgaaatactgcaagaaacagtgccggcgcctgggccaccgcgtcctcggcctgatcaagcctctggagatgctccaggaccaaggaaagaggagcgtgccctctgagaagttaaccacagccatgaaccgcttcaaggctgccctggaggaggctaatggggagatagaaaagttcagcaatagatccaatatctgcaggtttctaacagcaagccaggacaaaatactcttcaaggacgtgaacaggaagctgagtgatgtctggaaggagctctcgctgttacttcaggttgagcaacgcatgcctgtttcacccataagccaaggagcgtcctgggcacaggaagatcagcaggatgcagacgaagacaggcgagctttccagatgctaagaagagataatgaaaaaatagaagcttcactgagacgattagaaatcaacatgaaagaaatcaaggaaactttgaggcagtatttaccaccaaaatgcatgcaggagatcccgcaagagcaaatcaaggagatcaagaaggagcagctttcaggatccccgtggattctgctaagggaaa

SEQ ID NO: 155128 - DNA, 458 bp, Homo sapiens
  Payload ID: 10496
  Gene Symbol: MLKL
  Gene Name: mixed lineage kinase domain-like
  ENST ID: ENST00000576529
  CDS Start-End: 1-307
gaaaaatcagaagctcaaacttcctggtaactcaaggctaccaagtgaagctttggaatcgtcctctgggaaatcgccactggagatatcccgtttcaaggtgaagaatgtgaagactggctcagccagtggctgtaattctgagaagatccgcaagctggtggctgtgaagcggcagcaggagccactgggtgaagactgcccttcagagctgcgggagatcattgatgagtgccgggcccatgatccctctgtgcggccctctgtggatgaaatcttaaagaaactctccaccttttctaagtagtgtatcaaaatctaaaccaaggagtctctggacaagaagctgggagaggcacaaactggacatctctctctctcatatccttcggcattgggttatctatgggtgcaaggagtgggcacgcttctctgttacaaatagaaaacgattccag

SEQ ID NO: 155129 - DNA, 781 bp, Homo sapiens
  Payload ID: 10496
  Gene Symbol: MLKL
  Gene Name: mixed lineage kinase domain-like
  ENST ID: ENST00000571303
  CDS Start-End: 1-527
ggtcagatttaccaccaaaatgcatgcaggagatcccgcaagagcaaatcaaggagatcaagaaggagcagctttcaggatccccgtggattctgctaagggaaaatgaagtcagcacactttataaaggagaataccacagagctccagtggccataaaagtattcaaaaaactccaggctggcagcattgcaatagtgaggcagactttcaataaggagatcaaaaccatgaagaaattcgaatctcccaacatcctgcgtatatttgggatttgcattgatgaaacagtgactccgcctcaattctccattgtcatggagtactgtgaactcgggaccctgagggagctgttggatagggaaaaagacctcacacttggcaagcgcatggtcctagtcctgggggcagcccgaggcctataccggctacaccattcagaagcacctgaactccacggaaaaatcagaagctcaaacttcctggtaactcaaggctaccaagtgaagatttgggtacctggctgagtttggggctggcagccttcagcacaccaatggtgtcaatggcaggtgtgcatgggacaagaacatatgctgtcatgattgtgctacagtttctttaagaacaccagcttgcaggatttgagttgaggaaaacacagacttccatgagtttgggaactacgagagaaaagacagacagagtcaaatctacagcatatctctcacctcaggaactggaagatgtattttatcaatatgatgtaaagtctgaaata

SEQ ID NO: 155130 - DNA, 567 bp, Homo sapiens
  Payload ID: 10496
  Gene Symbol: MLKL
  Gene Name: mixed lineage kinase domain-like
  ENST ID: ENST00000575686
  CDS Start-End: 382-567
attctctgcaggcatcacagacctgaggcagtggcctccggagggcactggacagaaacagccatccaagtggctgagtggagggaccctgctcaagtgcagctgcagtggccggggtttccctcaggtagggatcggggcgccttgtcgccgccagccacgtgtggcgtccggtacagtcagcagagtgcagggtgcgggcaccaggaaagggggcgcaggggaactcccgcgggcctcgcgtttgcaaacttctcgcctgggcaggaggcggtcgtgggaaagaaggtggaagagcgagctttttggaactgtgcacgggacagattggacgcacacccctcgggaggcgcgaaggtcatccacaaacggtgtgaagagatgaaatactgcaagaaacagtgccggcgcctgggccaccgcgtcctcggcctgatcaagcctctggagatgctccaggaccaaggaaagaggagcgtgccctctgagaagttaaccacagccatgaaccgcttcaaggctgccctggaggaggctaatggggagatagaaaagttcagcaataga

SEQ ID NO: 155131 - DNA, 8608 bp, Homo sapiens
  Payload ID: 10497
  Gene Symbol: MKL2
  Gene Name: MKL/myocardin-like 2
  Uniprot ID: Q9ULH7
  ENST ID: ENST00000318282
  CDS Start-End: 131-3280
aggttcacaataaaggtgctaagaaagagaatgtaagacaggaaaataattaaatattcttaccgagtgtcttcaataggccgtgtttaagaggcgtcttacactccctgttgccagtggctggaacacaatggatcacacaggggcgatagacaccgaggatgaagtgggacctttagcccatcttgctccaagtcctcagagtgaagctgtggctcatgaattccaggaactctccttgcagtccagtcaaaacttaccccctctgaacgaaaggaaaaatgtgctccagctgaggctgcaacaaaggaggacgagagaacaactagtggaccagggcatcatgccacctttgaagagcccagcggcattccatgaacagataaaaagcttggaacgagccagaactgaaaactttttgaaacacaagattcggagtcgaccagatcgttctgaacttgtcaggatgcacattttagaagaaacatttgcagagccatccctgcaggctactcagatgaagttgaaaagagctcgactagcagatgatctgaatgaaaagattgctcaaagacctggtcctatggagctggtagagaaaaacatccttcctgtggactccagtgttaaagaagcaattataggcgttgggaaggaggactatccccacactcagggcgatttctcatttgatgaagacagcagtgacgctttgtctccggaccagcctgcgagtcaggagtcacaggggtcagccgcgtccccaagtgagccaaaagttagtgaatcgccatctcctgtgactacaaacactccagcgcagtttgcttcagtgtccccaacagttcctgaattcttgaaaactcctccaactgcagatcagcctcccccacggcctgcagctcctgtcctccccacaaacactgtgtcctcagcaaagcctggcccagcactggtgaagcaaagccatcccaagaatccaaatgacaaacaccgtagcaaaaagtgcaaagatcccaaaccacgggtaaagaagttaaagtaccaccaatacattccaccagatcagaagggtgagaagaatgagccgcagatggactctaactacgcccgcctgctccagcagcagcagctgttcctgcaactgcagatcctgagtcagcagaagcagcactacaactaccagaccatcctgcctgcaccattcaagccactcaatgacaaaaatagtaacagtgggaattcagctttgaacaatgccacacctaacacaccaagacagaatacatctactcctgtgagaaagccaggacctctgccttctagcctggatgacttaaaggtatcagaactgaagacagaactgaagttaaggggtctgccagtgtcaggcaccaaaccggacctcattgagcgcctaaaaccctaccaggaagtgaacagcagcggccttgctgctgggggcatcgtggcagtgtcatcatcagccattgtcaccagtaacccagaagtcactgtggccttgccggttacaacactacacaacactgtgactagctcagtctctactctcaaggcagaattgccacctacaggaaccagcaacgcaacccgtgtggaaaatgttcattcccctctgcccatttcaccatctccctccgaacagtccagtctcagtactgatgacacaaacatggcagacactttcaccgagattatgaccatgatgtcgccttcacagttcttgagttcatctcctttgagaatgacaaataatgaagacagtctgagtcccaccagcagcactctgtcaaacctggaactggatgcagccgaaaaggatcgcaagcttcaggagaaagagaagcaaatcgaagagctgaagaggaaactggaacaagagcagaagctcgtggaagtgctgaaaatgcaacttgaggttgaaaaacgagggcagcagcagcggcccctggaagcccagcccagtgccccaggtcattctgtcaagtcagatcagaagcacggcagccttggctcctccatcaaagatgaggcctcactccctgactgctccagctccaggcagcccatcccagtagccagccacgctgtaggccagcccgtctctacaggtggccagacccttgttgccaaaaaggctgtagttatcaagcaagaggtccctgtgggccaggcagagcagcagagtgtcgtctcgcagttttatacttcaccacaagcaggaatgcagactcagcctcagatagcaactgctgcacaaataccaactgctgccttggcctcaggcttggccccaactgtacctcagacacaagacacgttcccgcagcatgtgctcagtcagcctcaacaagtcagaaaggttttcacaaactcagcatcatcaaatacagttcttccatatcagagacatcctgccccagctgtccagcagccctttatcaataaggcctccaacagtgttcttcaatccagaaatgctccgcttccatccctgcaaaatggacctaacacacccaacaagcctagttcacccccgccaccccagcaatttgtcgtccagcactctctatttgggagtccagtcgccaagacaaaagatcccccccgctatgaggaggccatcaagcagacacgcagcacacaggcccctctgccagagatttccaacgctcacagtcagcagatggatgacctctttgatatcctcattaagagtggagagatctccctccccataaaagaagaaccttctcctatttccaaaatgagaccagtgacagccagcatcaccacaatgccagtgaatacagtggtgtcccggccaccaccccaagtccaaatggcaccacctgtatctttagaacctatgggcagtttatctgccagcttagagaaccaactagaagctttcttggatggaactttaccctcagccaatgaaattcctccactacaaagcagcagtgaagacagagagcccttctctctgatcgaggacctccagaatgatctgctgagtcactcaggtatgctggaccattcacactcacccatggagacttccgagacccagtttgctgcaggtactccctgtctgtctctcgacctgtcagactcaaacttggacaacatggagtggttggacattaccatgcccaactcctcttcaggactcactcctctcagcaccaccgcgccgagcatgttctctgctgactttctagacccacaggacctaccgctgccatgggactaacgtcacagatttcttttctgagagttgatgaggtttaagaacatgaagattctaaaaggtcagtttttagagatagatctatagttgcattgttgcaatcaaaatatgttgtcacagaaagaataggtggaaggtcatagcctggaacccaagtttgaaaacatttcattgtgttcagtagtgaatttctacagtttaacatagcacagggccttctgaaaatcgcacttgtcaaagacgactcatctatttctccagacttcagtaaagaatgaaaagtacctttagataaaaacaaagaagagtaatatatgcagcacagtgacgttaggattctggtaattaactacatttaaatctctggtcactttaagaccctaaataaaaggcagacagctccactcaaaaactaaggctgatgtgagggaggtgagaggtcactgcacttggtacttcctagagacggccggagccaggcccaagacacagcagaggtcaaaggcagtggagagccttggccagttcagtgacagcttctggctgaagacttttggttctattcagaaacctgtgtcgtttttttggtgttgtagtttattttgtgattttttggaatcgtactttatatttccaaatttaaatttaaatgcaagatctttcaacataaacagaagatacctacaaaatactgtcagaagtccaggtatactgataacactgaaaattctattagcaaccttctgggttggttagattgattttaatgtatatattagacatttgtatgtatgctctgacattgtgatttgtacagcctacgctggggtaaggaaatgggtatccaaggtcctacttttttaatagctcgaatatttctagagtacttgagccacatgtatttctgtatttaaagaattgctgactaactttcaggtaaccagacccatctcaaagaaccaagaaaaggctttagcatgaaatatctttctgagctggcgagttagaagaatggaaggtaaggggaaggtctgtcatctacccaggacattcccatgatgagtacaggtcagattgtgccacaaggtgggcctccacgtccctgccctggccctctttcttctgtcactaaccctggttatcattttacaggcttgtaactggatattctaccagagctctcactatattgtcaagcctaagattgaaaaactggaggctttattagtgtttttatatagaaaacagttattacatatgtgttaagtcatttcttaagaattttctaaaatgccaactatcacaggattatttcaagctagtcattgaggtatatgacaaaatgtaaataacaaaaaactgaaatctaccaaaagagcatggagatttttcttaaataataatattgtgctctccacctcacccttgtgtaaaccctcaggtcaggttggttcccctgggtcacaaaatggtaaatgttccatactgacatgccggaggcagcctgacccgttatttggaaagaatttgtgaattatttctgggtttgtgttttgcctaagagctgatcttatttctgatttgtgtgtgtgtggtttataaattttactacgtgtaacaaaagtctgcttttccagcatgagcacactggagccctctgctcactggcacttcctgactcaaaggcactaacagtgctcatgtgccttccagacggttcaaggcagaggccactgtgctcagtgtagtctgtgatgaatagtttaagtgttcagaaattggtaaaccaacacacgggatacaataactctctgttaaccagaacaccgtcatttgaccaagccctacaagagtttaccacactagatgttctgtgaatcctcgagtcagttccattgagaggggcctgtctccagggccaggctatttacttgggaaagtatttttcttacagttcttggccacagtttttttgctgagggtttctgtctgggcctatcaggtccatacttagaccctgagcatcttcttcattcagatttgaatggcttattaaattagcaccaaatatcagtgggactgtagaaggtaaccgaacactagtaccattgactctcgttgaataactttatatttccataatcctgaattgtgtagatagttttctagctctcgggtccctttattgctttttaaaatagggtttgaaacatgccacaggaaggttgctctccaaaaatacacagtgcagtgcaagaaaatgctatctcattggcctactctcctatgaattgctaaagtgcccacttcacatatgtgtttaaacctttataaaccagtatttcacttttaaaaagacaaggcatctctacccattaactctgcaagccactccacttgcaccattccgcttgaccctcctctctcctggcttgggtcaccagccaggcacctgtgacacgagtgctgctctccaggatctccactacatgttccaggttggagtgaggacgcgctatgtgctcacactcatgtgacatgaccaaagatgatactctgtaaacaaggcccttctgaccggactcagtgcgtgtgatggtgagtgcaatgaggaagggtggatattgactaaagactggttgttgttgttgtttaggttagtgtcacagccattacagcacaagtcaaagtcgccagttgaattttcattatgcacgtgtgtggtttaagcagtggtactgttgtatatcatattgtaaagtatcatactgccaagaaaataactcctagaaaggcattatctcacatccccatcttactttcctacatgttctcaaaacacagtagtaccagccttacctttctgctgtatgtagatagtcagatcatcctactgggggtgggatgaatttaaaagttataccaaaatttctgtaaagtctttgaaagtctaggagtaggtggtcatcttgtacatttcagcaaagcatccactaggaaacctcataggacagtgttagtggttcacgttctagtgtttttcctgaaatgtgcaatctactgtatagtattgccacataattgtacatagatgtattctgaatttgtggaatttcttgcttagatactattgtgtttgtttcatatgaatatttttgtaattctaaaagagatcttatttaaatttcctttttaaaagccgcatggttctgtgatccatgtaactgacactttttggctttcagtgctgtttagaaacagtggcaaaggcagggtggtgctgcctgcaagctgctgcctatggaaggcaaagtcatagtaatgagatagcacctctgaactgtgcagtcagcataccctgagtgatggctcaggggcgcactacctattttgtcaccagagctgactcaggcttcctggaccctcaaccccagatcattccaggcagcatagctttcttcacagtcctttcagaattcccaggctgaaatcagccatagcagttgacaaaacagctatccccacaagtgatgagatagtccctttactgtcctcaaatggacttggccttagagacgtggtaaagcactttggcagggtttaaaatatttgtgagaagcccacatttcagtatacatcctcactggcttccatgcacccacctgacggtagcctcacagaagtcctggctgtcactcaggtggggagctcatggtgccgctggggactttttagagaaatgtaaagagaatagctattcagtgtctactagcagagcaacatgtgtcaatttaaccaaattcacaaataaccctccatttttcaatatctgctactgtaaacatgaatattgaatactgacaagagaatacccatacaaatcgtcccaccgccctagaggccacagaattagcccaaaattatcaaagaacattaactggaaggtcaggtttttcaaggaacatagcttacaaatgcatcagtgtgtatctggagagcatcctaactgcatttcaactcatcttttaagtgatttcagtcaaaactggaaaacaactaagatgtagtaatttttttttcctggttcaaaccttcaataacttgctcattcagcagtctctctgagctacatttttatttgtaaagtgactctgtctgcatggcaatgagcaggtgcgtgttttttccacattcgccctttcttgcagtatccagggaaacacatcattacaaagggtttctacctgaaatctttcatggaaggcctacaattcgaaaagctgcacatgtttacagaagagctcttaccctccatgcaaacactttgctctgtggtgtcacagctttgtgacaataagatggcaatctcggatctacaaggtgctgtcgggaatcaaataaaatatgttatcagagatatcatcacatctatagtgtttaacagagctttatgccaactactaagacaaagctttaacaaagtttatagaatactgaaactcgtaacaattacctctctacgtgatgctgtaaggaatcttgctaatttggtaggaagaggaagcatttaggaaagggtttagtatctaccaaaagtacttgacctcaagtaaccaatagtaatgcaaacttgctttaaaggaaccaaaggcattgccaagtatttgccaaaaggaggcactttttatttaaaatttgagactaatgagatctcaaaaatcagccccaaaaaggtattatccatttaaggttataattttcactaagatgtagatatttctcttattgttttcatgtaaaatagtatagagttgttttgttggtttaagagtaacattcagtagtaatacaaagttttttttctatgtagaaattagttttcttttcttgcttgcaatagaaatgcaatgtgataggtgtttctcttcttattttcattgtcacattatgtcttagcatctcactttatgaaaaaaaggagaaagataccaatctacagagccctgcttgttgaagcactagtttaatcaacaaaaaattatggcaatcgggggtccattcatctattgcctttatgttgttttttaaaagaaaaaccatgatgcctttgtatttgctgtttgcacccctgaaatcaattccatatcatgtttgaatgccatacattttgcacatgtactgtacataagtaatgcatactgtatttttatatgtgtgcacatttatcatcagatcttttgtacatagtggcagtattgtagctgatcgggaaatgtttgatatctcagcaattttgcatttttgtgtctcaaataaaagacattttgatgt

SEQ ID NO: 155132 - DNA, 545 bp, Homo sapiens
  Payload ID: 10497
  Gene Symbol: MKL2
  Gene Name: MKL/myocardin-like 2
  ENST ID: ENST00000574998
  CDS Start-End: 336-545
gatcgcgcggcggcggcgggagcggcggcggcggcggccggggaggttcacaataaaggtgctaagaaagagaatgtaagacaggaaaataattaaatattcttaccgagatcactcctgtaaactctcacaagagatgtttataaaacacttggaacaatacagattgtactaagaaaatgtgctttgatcaactgtggagatacaaagcaggaaacttaataaatcaagtcctatttgtgaatggaaaggactggaagttcaccttaaaatgtcttcaataggccgtgtttaagaggcgtcttacactccctgttgccagtggctggaacacaatggatcacacaggggcgatagacaccgaggatgaagtgggacctttagcccatcttgctccaagtcctcagagtgaagctgtggctcatgaattccaggaactctccttgcagtccagtcaaaacttaccccctctgaacgaaaggaaaaatgtgctccagctgaggctgcaacaaaggaggacgagagaacaactagtggaccagggc

SEQ ID NO: 155133 - DNA, 3309 bp, Homo sapiens
  Payload ID: 10497
  Gene Symbol: MKL2
  Gene Name: MKL/myocardin-like 2
  Uniprot ID: Q9ULH7
  ENST ID: ENST00000574045
  CDS Start-End: 156-3305
ggagcggcggcggcggcggccggggaggttcacaataaaggtgctaagaaagagaatgtaagacaggaaaataattaaatattcttaccgagtgtcttcaataggccgtgtttaagaggcgtcttacactccctgttgccagtggctggaacacaatggatcacacaggggcgatagacaccgaggatgaagtgggacctttagcccatcttgctccaagtcctcagagtgaagctgtggctcatgaattccaggaactctccttgcagtccagtcaaaacttaccccctctgaacgaaaggaaaaatgtgctccagctgaggctgcaacaaaggaggacgagagaacaactagtggaccagggcatcatgccacctttgaagagcccagcggcattccatgaacagataaaaagcttggaacgagccagaactgaaaactttttgaaacacaagattcggagtcgaccagatcgttctgaacttgtcaggatgcacattttagaagaaacatttgcagagccatccctgcaggctactcagatgaagttgaaaagagctcgactagcagatgatctgaatgaaaagattgctcaaagacctggtcctatggagctggtagagaaaaacatccttcctgtggactccagtgttaaagaagcaattataggcgttgggaaggaggactatccccacactcagggcgatttctcatttgatgaagacagcagtgacgctttgtctccggaccagcctgcgagtcaggagtcacaggggtcagccgcgtccccaagtgagccaaaagttagtgaatcgccatctcctgtgactacaaacactccagcgcagtttgcttcagtgtccccaacagttcctgaattcttgaaaactcctccaactgcagatcagcctcccccacggcctgcagctcctgtcctccccacaaacactgtgtcctcagcaaagcctggcccagcactggtgaagcaaagccatcccaagaatccaaatgacaaacaccgtagcaaaaagtgcaaagatcccaaaccacgggtaaagaagttaaagtaccaccaatacattccaccagatcagaagggtgagaagaatgagccgcagatggactctaactacgcccgcctgctccagcagcagcagctgttcctgcaactgcagatcctgagtcagcagaagcagcactacaactaccagaccatcctgcctgcaccattcaagccactcaatgacaaaaatagtaacagtgggaattcagctttgaacaatgccacacctaacacaccaagacagaatacatctactcctgtgagaaagccaggacctctgccttctagcctggatgacttaaaggtatcagaactgaagacagaactgaagttaaggggtctgccagtgtcaggcaccaaaccggacctcattgagcgcctaaaaccctaccaggaagtgaacagcagcggccttgctgctgggggcatcgtggcagtgtcatcatcagccattgtcaccagtaacccagaagtcactgtggccttgccggttacaacactacacaacactgtgactagctcagtctctactctcaaggcagaattgccacctacaggaaccagcaacgcaacccgtgtggaaaatgttcattcccctctgcccatttcaccatctccctccgaacagtccagtctcagtactgatgacacaaacatggcagacactttcaccgagattatgaccatgatgtcgccttcacagttcttgagttcatctcctttgagaatgacaaataatgaagacagtctgagtcccaccagcagcactctgtcaaacctggaactggatgcagccgaaaaggatcgcaagcttcaggagaaagagaagcaaatcgaagagctgaagaggaaactggaacaagagcagaagctcgtggaagtgctgaaaatgcaacttgaggttgaaaaacgagggcagcagcagcggcccctggaagcccagcccagtgccccaggtcattctgtcaagtcagatcagaagcacggcagccttggctcctccatcaaagatgaggcctcactccctgactgctccagctccaggcagcccatcccagtagccagccacgctgtaggccagcccgtctctacaggtggccagacccttgttgccaaaaaggctgtagttatcaagcaagaggtccctgtgggccaggcagagcagcagagtgtcgtctcgcagttttatacttcaccacaagcaggaatgcagactcagcctcagatagcaactgctgcacaaataccaactgctgccttggcctcaggcttggccccaactgtacctcagacacaagacacgttcccgcagcatgtgctcagtcagcctcaacaagtcagaaaggttttcacaaactcagcatcatcaaatacagttcttccatatcagagacatcctgccccagctgtccagcagccctttatcaataaggcctccaacagtgttcttcaatccagaaatgctccgcttccatccctgcaaaatggacctaacacacccaacaagcctagttcacccccgccaccccagcaatttgtcgtccagcactctctatttgggagtccagtcgccaagacaaaagatcccccccgctatgaggaggccatcaagcagacacgcagcacacaggcccctctgccagagatttccaacgctcacagtcagcagatggatgacctctttgatatcctcattaagagtggagagatctccctccccataaaagaagaaccttctcctatttccaaaatgagaccagtgacagccagcatcaccacaatgccagtgaatacagtggtgtcccggccaccaccccaagtccaaatggcaccacctgtatctttagaacctatgggcagtttatctgccagcttagagaaccaactagaagctttcttggatggaactttaccctcagccaatgaaattcctccactacaaagcagcagtgaagacagagagcccttctctctgatcgaggacctccagaatgatctgctgagtcactcaggtatgctggaccattcacactcacccatggagacttccgagacccagtttgctgcaggtactccctgtctgtctctcgacctgtcagactcaaacttggacaacatggagtggttggacattaccatgcccaactcctcttcaggactcactcctctcagcaccaccgcgccgagcatgttctctgctgactttctagacccacaggacctaccgctgccatgggactaacgtc

SEQ ID NO: 155134 - DNA, 696 bp, Homo sapiens
  Payload ID: 10497
  Gene Symbol: MKL2
  Gene Name: MKL/myocardin-like 2
  ENST ID: ENST00000571770
  CDS Start-End: 1-575
agatggatgacctctttgatatcctcattaagagtggagagatctccctccccataaaagaagaaccttctcctatttccaaaatgagaccagtgacagccagcatcaccacaatgccagtgaatacagtggtgtcccggccaccaccccaagtccaaatggcaccacctgtatctttagaacctatgggcagtttatctgccagcttagagaaccaactagaagctttcttggatggaactttaccctcagccaatgaaattcctccactacaaagcagcagtgaagacagagagcccttctctctgatcgaggacctccagaatgatctgctgagtcactcaggtatgctggaccattcacactcacccatggagacttccgagacccagtttgctgcaggtactccctgtctgtctctcgacctgtcagactcaaacttggacaacatggagtggttggacattaccatgcccaactcctcttcaggactcactcctctcagcaccaccgcgccgagcatgttctctgctgactttctagacccacaggacctaccgctgccatgggactaacgtcacagatttcttttctgagagttgatgaggtttaagaacatgaagattctaaaaggtaaccagacccatctcaaagaaccaagaaaaggctttagcatgaaatatctttctgagctgg

SEQ ID NO: 155135 - DNA, 8799 bp, Homo sapiens
  Payload ID: 10497
  Gene Symbol: MKL2
  Gene Name: MKL/myocardin-like 2
  Uniprot ID: Q9ULH7
  ENST ID: ENST00000571589
  CDS Start-End: 173-3472
atcgcgcggcggcggcgggagcggcggcggcggcggccggggaggttcacaataaaggtgctaagaaagagaatgtaagacaggaaaataattaaatattcttaccgagtgtcttcaataggccgtgtttaagaggcgtcttacactccctgttgccagtggctggaacacaatggatcacacaggggcgatagacaccgaggatgaagtgggacctttagcccatcttgctccaagtcctcagagtgaagctgtggctcatgaattccaggaactctccttgcagtccagtcaaaacttaccccctctgaacgaaaggaaaaatgtgctccagctgaggctgcaacaaaggaggacgagagaacaactagtggaccagggcatcatgccacctttgaagagcccagcggcattccatgaacagataaaaagcttggaacgagccagaactgaaaactttttgaaacacaagattcggagtcgaccagatcgttctgaacttgtcaggatgcacattttagaagaaacatttgcagagccatccctgcaggctactcagatgaagttgaaaagagctcgactagcagatgatctgaatgaaaagattgctcaaagacctggtcctatggagctggtagagaaaaacatccttcctgtggactccagtgttaaagaagcaattataggcgttgggaaggaggactatccccacactcagggcgatttctcatttgatgaagacagcagtgacgctttgtctccggaccagcctgcgagtcaggagtcacaggggtcagccgcgtccccaagtgagccaaaagttagtgaatcgccatctcctgtgactacaaacactccagcgcagtttgcttcagtgtccccaacagttcctgaattcttgaaaactcctccaactgcagatcagcctcccccacggcctgcagctcctgtcctccccacaaacactgtgtcctcagcaaagcctggcccagcactggtgaagcaaagccatcccaagaatccaaatgacaaacaccgtagcaaaaagtgcaaagatcccaaaccacgggtaaagaagttaaagtaccaccaatacattccaccagatcagaagggtgagaagaatgagccgcagatggactctaactacgcccgcctgctccagcagcagcagctgttcctgcaactgcagatcctgagtcagcagaagcagcactacaactaccagaccatcctgcctgcaccattcaagccactcaatgacaaaaatagtaacagtgggaattcagctttgaacaatgccacacctaacacaccaagacagaatacatctactcctgtgagaaagccaggacctctgccttctagcctggatgacttaaaggtatcagaactgaagacagaactgaagttaaggggtctgccagtgtcaggcaccaaaccggacctcattgagcgcctaaaaccctaccaggaagtgaacagcagcggccttgctgctgggggcatcgtggcagtgtcatcatcagccattgtcaccagtaacccagaagtcactgtggccttgccggttacaacactacacaacactgtgactagctcagtctctactctcaaggcagaattgccacctacaggaaccagcaacgcaacccgtgtggaaaatgttcattcccctctgcccatttcaccatctccctccgaacagtccagtctcagtactgatgacacaaacatggcagacactttcaccgagattatgaccatgatgtcgccttcacagttcttgagttcatctcctttgagaatgacaaataatgaagacagtctgagtcccaccagcagcactctgtcaaacctggaactggatgcagccgaaaaggatcgcaagcttcaggagaaagagaagcaaatcgaagagctgaagaggaaactggaacaagagcagaagctcgtggaagtgctgaaaatgcaacttgaggttgaaaaacgagggcagcagcagcggcccctggaagcccagcccagtgccccaggtcattctgtcaagtcagatcagaagcacggcagccttggctcctccatcaaagatgaggcctcactccctgactgctccagctccaggcagcccatcccagtagccagccacgctgtaggccagcccgtctctacaggtggccagacccttgttgccaaaaaggctgtagttatcaagcaagaggtccctgtgggccaggcagagcagcagagtgtcgtctcgcagttttatgtgagttcccagggacagccaccgcctgctgttgttgctcagccccaggctttactgaccacgcagactgctcagctgctgctcccagtgtccatccagggctcgagtgtcacctcagtgcaactccctgtaggcagcctcaaactccagacttcaccacaagcaggaatgcagactcagcctcagatagcaactgctgcacaaataccaactgctgccttggcctcaggcttggccccaactgtacctcagacacaagacacgttcccgcagcatgtgctcagtcagcctcaacaagtcagaaaggttttcacaaactcagcatcatcaaatacagttcttccatatcagagacatcctgccccagctgtccagcagccctttatcaataaggcctccaacagtgttcttcaatccagaaatgctccgcttccatccctgcaaaatggacctaacacacccaacaagcctagttcacccccgccaccccagcaatttgtcgtccagcactctctatttgggagtccagtcgccaagacaaaagatcccccccgctatgaggaggccatcaagcagacacgcagcacacaggcccctctgccagagatttccaacgctcacagtcagcagatggatgacctctttgatatcctcattaagagtggagagatctccctccccataaaagaagaaccttctcctatttccaaaatgagaccagtgacagccagcatcaccacaatgccagtgaatacagtggtgtcccggccaccaccccaagtccaaatggcaccacctgtatctttagaacctatgggcagtttatctgccagcttagagaaccaactagaagctttcttggatggaactttaccctcagccaatgaaattcctccactacaaagcagcagtgaagacagagagcccttctctctgatcgaggacctccagaatgatctgctgagtcactcaggtatgctggaccattcacactcacccatggagacttccgagacccagtttgctgcaggtactccctgtctgtctctcgacctgtcagactcaaacttggacaacatggagtggttggacattaccatgcccaactcctcttcaggactcactcctctcagcaccaccgcgccgagcatgttctctgctgactttctagacccacaggacctaccgctgccatgggactaacgtcacagatttcttttctgagagttgatgaggtttaagaacatgaagattctaaaaggtcagtttttagagatagatctatagttgcattgttgcaatcaaaatatgttgtcacagaaagaataggtggaaggtcatagcctggaacccaagtttgaaaacatttcattgtgttcagtagtgaatttctacagtttaacatagcacagggccttctgaaaatcgcacttgtcaaagacgactcatctatttctccagacttcagtaaagaatgaaaagtacctttagataaaaacaaagaagagtaatatatgcagcacagtgacgttaggattctggtaattaactacatttaaatctctggtcactttaagaccctaaataaaaggcagacagctccactcaaaaactaaggctgatgtgagggaggtgagaggtcactgcacttggtacttcctagagacggccggagccaggcccaagacacagcagaggtcaaaggcagtggagagccttggccagttcagtgacagcttctggctgaagacttttggttctattcagaaacctgtgtcgtttttttggtgttgtagtttattttgtgattttttggaatcgtactttatatttccaaatttaaatttaaatgcaagatctttcaacataaacagaagatacctacaaaatactgtcagaagtccaggtatactgataacactgaaaattctattagcaaccttctgggttggttagattgattttaatgtatatattagacatttgtatgtatgctctgacattgtgatttgtacagcctacgctggggtaaggaaatgggtatccaaggtcctacttttttaatagctcgaatatttctagagtacttgagccacatgtatttctgtatttaaagaattgctgactaactttcaggtaaccagacccatctcaaagaaccaagaaaaggctttagcatgaaatatctttctgagctggcgagttagaagaatggaaggtaaggggaaggtctgtcatctacccaggacattcccatgatgagtacaggtcagattgtgccacaaggtgggcctccacgtccctgccctggccctctttcttctgtcactaaccctggttatcattttacaggcttgtaactggatattctaccagagctctcactatattgtcaagcctaagattgaaaaactggaggctttattagtgtttttatatagaaaacagttattacatatgtgttaagtcatttcttaagaattttctaaaatgccaactatcacaggattatttcaagctagtcattgaggtatatgacaaaatgtaaataacaaaaaactgaaatctaccaaaagagcatggagatttttcttaaataataatattgtgctctccacctcacccttgtgtaaaccctcaggtcaggttggttcccctgggtcacaaaatggtaaatgttccatactgacatgccggaggcagcctgacccgttatttggaaagaatttgtgaattatttctgggtttgtgttttgcctaagagctgatcttatttctgatttgtgtgtgtgtggtttataaattttactacgtgtaacaaaagtctgcttttccagcatgagcacactggagccctctgctcactggcacttcctgactcaaaggcactaacagtgctcatgtgccttccagacggttcaaggcagaggccactgtgctcagtgtagtctgtgatgaatagtttaagtgttcagaaattggtaaaccaacacacgggatacaataactctctgttaaccagaacaccgtcatttgaccaagccctacaagagtttaccacactagatgttctgtgaatcctcgagtcagttccattgagaggggcctgtctccagggccaggctatttacttgggaaagtatttttcttacagttcttggccacagtttttttgctgagggtttctgtctgggcctatcaggtccatacttagaccctgagcatcttcttcattcagatttgaatggcttattaaattagcaccaaatatcagtgggactgtagaaggtaaccgaacactagtaccattgactctcgttgaataactttatatttccataatcctgaattgtgtagatagttttctagctctcgggtccctttattgctttttaaaatagggtttgaaacatgccacaggaaggttgctctccaaaaatacacagtgcagtgcaagaaaatgctatctcattggcctactctcctatgaattgctaaagtgcccacttcacatatgtgtttaaacctttataaaccagtatttcacttttaaaaagacaaggcatctctacccattaactctgcaagccactccacttgcaccattccgcttgaccctcctctctcctggcttgggtcaccagccaggcacctgtgacacgagtgctgctctccaggatctccactacatgttccaggttggagtgaggacgcgctatgtgctcacactcatgtgacatgaccaaagatgatactctgtaaacaaggcccttctgaccggactcagtgcgtgtgatggtgagtgcaatgaggaagggtggatattgactaaagactggttgttgttgttgtttaggttagtgtcacagccattacagcacaagtcaaagtcgccagttgaattttcattatgcacgtgtgtggtttaagcagtggtactgttgtatatcatattgtaaagtatcatactgccaagaaaataactcctagaaaggcattatctcacatccccatcttactttcctacatgttctcaaaacacagtagtaccagccttacctttctgctgtatgtagatagtcagatcatcctactgggggtgggatgaatttaaaagttataccaaaatttctgtaaagtctttgaaagtctaggagtaggtggtcatcttgtacatttcagcaaagcatccactaggaaacctcataggacagtgttagtggttcacgttctagtgtttttcctgaaatgtgcaatctactgtatagtattgccacataattgtacatagatgtattctgaatttgtggaatttcttgcttagatactattgtgtttgtttcatatgaatatttttgtaattctaaaagagatcttatttaaatttcctttttaaaagccgcatggttctgtgatccatgtaactgacactttttggctttcagtgctgtttagaaacagtggcaaaggcagggtggtgctgcctgcaagctgctgcctatggaaggcaaagtcatagtaatgagatagcacctctgaactgtgcagtcagcataccctgagtgatggctcaggggcgcactacctattttgtcaccagagctgactcaggcttcctggaccctcaaccccagatcattccaggcagcatagctttcttcacagtcctttcagaattcccaggctgaaatcagccatagcagttgacaaaacagctatccccacaagtgatgagatagtccctttactgtcctcaaatggacttggccttagagacgtggtaaagcactttggcagggtttaaaatatttgtgagaagcccacatttcagtatacatcctcactggcttccatgcacccacctgacggtagcctcacagaagtcctggctgtcactcaggtggggagctcatggtgccgctggggactttttagagaaatgtaaagagaatagctattcagtgtctactagcagagcaacatgtgtcaatttaaccaaattcacaaataaccctccatttttcaatatctgctactgtaaacatgaatattgaatactgacaagagaatacccatacaaatcgtcccaccgccctagaggccacagaattagcccaaaattatcaaagaacattaactggaaggtcaggtttttcaaggaacatagcttacaaatgcatcagtgtgtatctggagagcatcctaactgcatttcaactcatcttttaagtgatttcagtcaaaactggaaaacaactaagatgtagtaatttttttttcctggttcaaaccttcaataacttgctcattcagcagtctctctgagctacatttttatttgtaaagtgactctgtctgcatggcaatgagcaggtgcgtgttttttccacattcgccctttcttgcagtatccagggaaacacatcattacaaagggtttctacctgaaatctttcatggaaggcctacaattcgaaaagctgcacatgtttacagaagagctcttaccctccatgcaaacactttgctctgtggtgtcacagctttgtgacaataagatggcaatctcggatctacaaggtgctgtcgggaatcaaataaaatatgttatcagagatatcatcacatctatagtgtttaacagagctttatgccaactactaagacaaagctttaacaaagtttatagaatactgaaactcgtaacaattacctctctacgtgatgctgtaaggaatcttgctaatttggtaggaagaggaagcatttaggaaagggtttagtatctaccaaaagtacttgacctcaagtaaccaatagtaatgcaaacttgctttaaaggaaccaaaggcattgccaagtatttgccaaaaggaggcactttttatttaaaatttgagactaatgagatctcaaaaatcagccccaaaaaggtattatccatttaaggttataattttcactaagatgtagatatttctcttattgttttcatgtaaaatagtatagagttgttttgttggtttaagagtaacattcagtagtaatacaaagttttttttctatgtagaaattagttttcttttcttgcttgcaatagaaatgcaatgtgataggtgtttctcttcttattttcattgtcacattatgtcttagcatctcactttatgaaaaaaaggagaaagataccaatctacagagccctgcttgttgaagcactagtttaatcaacaaaaaattatggcaatcgggggtccattcatctattgcctttatgttgttttttaaaagaaaaaccatgatgcctttgtatttgctgtttgcacccctgaaatcaattccatatcatgtttgaatgccatacattttgcacatgtactgtacataagtaatgcatactgtatttttatatgtgtgcacatttatcatcagatcttttgtacatagtggcagtattgtagctgatcgggaaatgtttgatatctcagcaattttgcatttttgtgtctcaaataaaagacattttgatg

SEQ ID NO: 155136 - DNA, 2185 bp, Homo sapiens
  Payload ID: 10497
  Gene Symbol: MKL2
  Gene Name: MKL/myocardin-like 2
  ENST ID: ENST00000572567
  CDS Start-End: 199-1308
gtatttgcaggtcaagctgggaactaaagggtaatggctgccttcagctgcttaaagacataattggccagtgattggggtattgtggggagcaaccagggacccagggaccagagtgttctgcgcaccgcacttcgctcttctgcaaattaagcttttctcctgcttgatgctgcctgtcttcagaagcctctcaccatgatcgatagctccaagaagcagcaacagggcttcccagagattttaactgctggggattttgaaccattaaaagaaaaggaatgccttgaggggagcaaccagaaaagtctcaaggaagtgctccagctgaggctgcaacaaaggaggacgagagaacaactagtggaccagggcatcatgccacctttgaagagcccagcggcattccatgaacagataaaaagcttggaacgagccagaactgaaaactttttgaaacacaagattcggagtcgaccagatcgttctgaacttgtcaggatgcacattttagaagaaacatttgcagagccatccctgcaggctactcagatgaagttgaaaagagctcgactagcagatgatctgaatgaaaagattgctcaaagacctggtcctatggagctggtagagaaaaacatccttcctgtggactccagtgttaaagaagcaattataggcgttgggaaggaggactatccccacactcagggcgatttctcatttgatgaagacagcagtgacgctttgtctccggaccagcctgcgagtcaggagtcacaggggtcagccgcgtccccaagtgagccaaaagttagtgaatcgccatctcctgtgactacaaacactccagcgcagtttgcttcagtgtccccaacagttcctgaattcttgaaaactcctccaactgcagatcagcctcccccacggcctgcagctcctgtcctccccacaaacactgtgtcctcagcaaagcctggcccagcactggtgaagcaaagccatcccaagaatccaaatgacaaacaccgtagcaaaaagtgcaaagatcccaaaccacgggtaaagaagttaaagtaccaccaatacattccaccagatcagaagggtgagaagaatgagccgcagatggactctaactacgcccgcctgctccagcagcagcagctgttcctgcaactgcagatcctgagtcagcagaagcagcactacaactaccagaccatcctgcctgcaccattcaagtacggcggggcccatgctatcctcaacgcggggttttctgtggttttttatgaggaactataagttaccaaaagttgaatgttgtcatttatttgtgctcagtaatgattttcatttctttgttatcagagcttatcacacagtgtctgaagtccacatggtgagagtggcctgcattccattccagtttctgtcctccaaaataggttctgaatttttacaagttagaaatgccttttcacaattattcatccagatttgcctattattagaacaccaaaatagtactagatgctctgagaaaagcgtaagtagtataatacctggcataaacagctaaaagaagagaaggatgggcatgaaagctggagtggtcaaaggaaagcctggtggaaaagacaggatctttgtatatagaaggctcgagaagggcctttccaggcacaggggaatgctgtgagcactagtacagaggaaggaatagagtaagtagtgcctcttcattggaaggtgagaaaaattgcctaaacaaagaatctgattaatttttaagtaaaaagtggaagacaaaaatcgagtacagccaatgtctaaggggacttgaagctgggcagaagaccttactcaacacagcagatagacaacggagtgcttcagagcaggctgctgacgcagtgaggccaaaatataagaaaaaacagctggatgctggtgttgaagggacgtctggagacaatgaagagctctggcagcagagtgagtgtttcagaagacagttaaaggccttggtgacgaacaactgcggagaaggaaggtgttttcaaagtttgaacccaactgtgggggacggaagggagtgaattctgacaatttctgaaactgaattcacagcaagacatcaatggctaattttaattacgtaataaagaaaatttctgga

SEQ ID NO: 155137 - DNA, 1938 bp, Homo sapiens
  Payload ID: 10497
  Gene Symbol: MKL2
  Gene Name: MKL/myocardin-like 2
  Uniprot ID: Q9ULH7
  ENST ID: ENST00000573051
  CDS Start-End: 159-1295
cggaagtaaggctggcgtagggccgccatgttgcagcaggatagtaatgatgacactaaagatgtttcactgtttgatgcggaagaggagacgactaatagaccaagaaaagtcaaaatcagacatccagtagcatcgtttttccacttattctttcgatgctccagctgaggctgcaacaaaggaggacgagagaacaactagtggaccagggcatcatgccacctttgaagagcccagcggcattccatgaacagataaaaagcttggaacgagccagaactgaaaactttttgaaacacaagattcggagtcgaccagatcgttctgaacttgtcaggatgcacattttagaagaaacatttgcagagccatccctgcaggctactcagatgaagttgaaaagagctcgactagcagatgatctgaatgaaaagattgctcaaagacctggtcctatggagctggtagagaaaaacatccttcctgtggactccagtgttaaagaagcaattataggcgttgggaaggaggactatccccacactcagggcgatttctcatttgatgaagacagcagtgacgctttgtctccggaccagcctgcgagtcaggagtcacaggggtcagccgcgtccccaagtgagccaaaagttagtgaatcgccatctcctgtgactacaaacactccagcgcagtttgcttcagtgtccccaacagttcctgaattcttgaaaactcctccaactgcagatcagcctcccccacggcctgcagctcctgtcctccccacaaacactgtgtcctcagcaaagcctggcccagcactggtgaagcaaagccatcccaagaatccaaatgacaaacaccgtagcaaaaagtgcaaagatcccaaaccacgggtaaagaagttaaagtaccaccaatacattccaccagatcagaagggtgagaagaatgagccgcagatggactctaactacgcccgcctgctccagcagcagcagctgttcctgcaactgcagatcctgagtcagcagaagcagcactacaactaccagaccatcctgcctgcaccattcaaagcttatcacacagtgtctgaagtccacatggtgagagtggcctgcattccattccagtttctgtcctccaaaataggttctgaatttttacaagttagaaatgccttttcacaattattcatccagatttgcctattattagaacaccaaaatagtactagatgctctgagaaaagcgtaagtagtataatacctggcataaacagctaaaagaagagaaggatgggcatgaaagctggagtggtcaaaggaaagcctggtggaaaagacaggatctttgtatatagaaggctcgagaagggcctttccaggcacaggggaatgctgtgagcactagtacagaggaaggaatagagtaagtagtgcctcttcattggaaggtgagaaaaattgcctaaacaaagaatctgattaatttttaagtaaaaagtggaagacaaaaatcgagtacagccaatgtctaaggggacttgaagctgggcagaagaccttactcaacacagcagatagacaacggagtgcttcagagcaggctgctgacgcagtgaggccaaaatataagaaaaaacagctggatgctggtgttgaagggacgtctggagacaatgaagagctctggcagcagagtgagtgtttcagaagacagttaaaggccttggtgacgaacaactgcggagaaggaaggtgttttcaaagtttgaacccaactgtgggggacggaagggagtgaattctgacaatttctgaaactgaattcacagcaagacatcaatggctaattttaattacgtaataaagaaaatttctggatatacattcccaatatgctttttctgggaaacagagataaaaa

SEQ ID NO: 155138 - DNA, 466 bp, Homo sapiens
  Payload ID: 10497
  Gene Symbol: MKL2
  Gene Name: MKL/myocardin-like 2
  ENST ID: ENST00000573434
  CDS Start-End: 1-159
atagacaccgaggatgaagtgggacctttagcccatcttgctccaagtcctcagagtgaagctgtggctcatgaattccaggaactctccttgcagtccagtcaaaacttaccccctctgaacgaaaggaaaaatgtgaacattcctccatgttattaaatgttcctctcagctgggcatgatggctcacacctgtaatcccagcactttgggaggctgaggtgggaggatcatttaaggccaggagctcgagaccagcctgcacaacatagcaagactcctctacaaaaaatgtttaaagtagctgggcgtggtgatgcacgcctgtagtcccaactactcagaaggcaagagagaggttcccttgcaaccacaatctgggtgacacagccagatcctgtctttccctgtctgttaaaaaacaaaaacttctgaaataaaattactttttacttctttggctcat

SEQ ID NO: 155139 - DNA, 985 bp, Homo sapiens
  Payload ID: 10498
  Gene Symbol: MKRN2OS
  Gene Name: MKRN2 opposite strand
  Uniprot ID: H3BPM6
  ENST ID: ENST00000564146
  CDS Start-End: 93-764
aggttccttggggcggtgtgcattcgccaggtgtataatgaggaaaaggaagtctccggaaacctcccctagcattccaggaggcgaaagctatgcactgcgcagaggctgggaaggctttaattaaattcaaccactgtgagaaatacatctacagcttcagtgtgccccagtgctgccctctctgccagcaggacctgggctcgaggaagctggaggacgcacctgttagcatcgctaatccatttactaatggacatcaagaaaaatgttcattcctcctcagaccaactcaggggacatttcttagagagtatgatggaaggtctgatcttcatgttggaataactaacacaaatggggttgtgtataattacagtgcacatggtgtccagcgagacggagaagggtgggaagagagcataagcatcccattactgcagcccaacatgtatggaatgatggagcaatgggacaagtacctggaagacttctccacctcgggggcctggctgcctcacaggtatgaagacaaccaccataactgctactcttacgcactcacgttcattaactgcgttctgatggcagaaggtagacagcaactggacaagggtgaatttacggagaagtacgtggtcccgcggacaaggctggcatccaagttcatcacactctaccgggcgatacgggagcatggcttctacgtcactgactgtccccagcagcaggcacaaccccctgagggcggcggtttgtgctgagagctatgtaagcgcagcctggacgctggagggtagggtggttgctacctttaatcagtactatggatttctaaatgcatttaactgtggttaataaaagcgtgtatgggccgggcatggtggctcacacctgtaatcccagcactttgggaagctaagacaggtaggtcacctgaggttgggagtttgagaccagcctgaccaacatggagaaaccccgt

SEQ ID NO: 155140 - DNA, 901 bp, Homo sapiens
  Payload ID: 10498
  Gene Symbol: MKRN2OS
  Gene Name: MKRN2 opposite strand
  ENST ID: ENST00000561645
  CDS Start-End: 59-289
ataatgaggaaaaggaagtctccggaaacctcccctagcattccaggaggcgaaagctatgcactgcgcagaggctgggaaggctttaattaaattcaaccactgtgagaaatacatctacagcttcagtgtgccccagtgctgccctctctgccagcaggacctgggctcgaggaagctggaggacgcacctgttagcatcgctaatccatttactaatggacatcaagaaaaatgttcattcctcctcagaccaactcaggggacatttcttaggggttgtgtataattacagtgcacatggtgtccagcgagacggagaagggtgggaagagagcataagcatcccattactgcagcccaacatgtatggaatgatggagcaatgggacaagtacctggaagacttctccacctcgggggcctggctgcctcacaggtatgaagacaaccaccataactgctactcttacgcactcacgttcattaactgcgttctgatggcagaaggtagacagcaactggacaagggtgaatttacggagaagtacgtggtcccgcggacaaggctggcatccaagttcatcacactctaccgggcgatacgggagcatggcttctacgtcactgactgtccccagcagcaggcacaaccccctgagggcggcggtttgtgctgagagctatgtaagcgcagcctggacgctggagggtagggtggttgctacctttaatcagtactatggatttctaaatgcatttaactgtggttaataaaagcgtgtatgggccgggcatggtggctcacacctgtaatcccagcactttgggaagctaagacaggtaggtcacctgaggttgggagtttgagaccagcctgaccaacatggagaaaccccgt

SEQ ID NO: 155141 - DNA, 8427 bp, Homo sapiens
  Payload ID: 10499
  Gene Symbol: MLXIP
  Gene Name: MLX interacting protein
  Uniprot ID: Q9HAP2
  ENST ID: ENST00000319080
  CDS Start-End: 133-2892
cctccccctcccgccgcgccgcgcgctcgcggacagtcggcgcgcgggccgggccgggccggcgcccctctgcctcgcgcgcttgtcgcgttgccccgggctccgggggatgcccccggccgagcccttctcatggccgccgacgtcttcatgtgctccccgcgccggcctcgcagccggggccgccaggtgctgctcaagccccaggtgtccgaggacgacgacgactcggacacggatgagccgtccccgccgcccgcctccggcgcggccaccccggcccgggcccacgcgagcgccgcgccaccgccgcctcgggccgggccgggccgcgaggaacctccgcgccgccagcagatcatccacagcggccacttcatggtgtcgtcgccgcaccgagagcacccgcccaagaagggctacgatttcgacacggtcaacaaacagacgtgccagacctacagcttcggcaagactagctcctgccacctgtccatcgacgcctcgctcaccaagctcttcgagtgcatgactttggcctacagtgggaagttggtgtctccaaagtggaagaatttcaagggcctgaagctacagtggagagacaagatccggctcaataatgccatctggcgggcctggtacatgcagtatctggagaagcgcaagaatcctgtgtgccactttgtgacacccctggacggctctgtggacgtagacgagcaccgccggccggaggccatcaccacggaagggaagtactggaagagccgcatcgagattgtgatccgggagtatcacaagtggagaacctacttcaagaaaaggctacagcagcacaaggatgaggacctctccagcctggtccaggacgatgacatgctgtattggcacaagcacggggatggatggaagacccccgtccccatggaggaggatcccctgctggacacagacatgctcatgtcggaattcagcgacaccctcttctccacactttcttcacaccagccggtggcctggcccaatccccgggaaatagcacatctgggaaatgcagacatgatccagccgggactgattcctttgcagcctaacctggacttcatggacacctttgagcctttccaggacctcttctcttctagccgctccatttttggctccatgctacctgcatctgcctcagcacctgtaccagatcccaacaacccacctgcacaggagagcatcctgccgaccacagccctccccactgtgagccttcctgacagcctcatcgcgccccctaccgccccatccctggctcacatggatgagcagggctgtgaacacacctcccggactgaggacccgtttatccagcccacggacttcggtccctcagagccgccactgagtgtcccgcagcccttcctccctgtcttcaccatgcccctgctgtctcccagccccgccccaccgcccatctcccccgtgttaccattagttcctcctcctgccactgccctgaaccccccggctccacccaccttccatcagccacagaagtttgctggagtcaacaaagcgccgtctgtcatcacccacacggcctctgccaccctcacccacgatgcccccgccaccacctttagccagagtcagggccttgtgatcaccacccatcaccctgccccgtcagcggccccttgtgggctggcactgtctcctgtcacccggcctccccagccacggttaacttttgtgcaccccaaacctgtatccttgactgggggcaggcctaagcagccccacaaaatagtgcctgctcccaaaccagagcccgtgtccttggtgttgaagaatgcccgtatcgccccagctgccttttcaggccaaccacaagcggtgatcatgacgtcagggcctctgaagagagaagggatgttggcctccaccgtgtcccagtccaacgtggtcattgcgcctgctgccatcgccagggctcctggggtcccggagttccacagcagcatcctggtgacagatctcggccatggcacgagcagcccgcctgcccccgtctcccggctcttcccaagcacagcgcaagaccccctggggaagggcgagcaggtcccgctgcatgggggcagcccccaggtcactgtcacagggcccagtcgggactgcccaaactcagggcaggcctctccgtgtgcatcggagcagagccccagtcctcaatctccccagaacaactgctcagggaaatccgaccccaaaaatgtggctgcactaaagaaccggcagatgaagcacatctcagctgagcagaaaaggcgcttcaacatcaagatgtgcttcgacatgctcaacagcctcatctccaacaattccaagctgaccagtcacgccatcacactgcagaagactgtggagtacatcaccaagctgcagcaggagagaggccagatgcaggaggaggcccggcggctgcgggaggagatcgaggagctcaatgccaccatcatctcctgccagcagctgctccctgccacgggagtccccgttacccggcgccagtttgatcacatgaaagacatgtttgacgaatacgtgaaaacccggaccttgcagaattggaagttctggattttcagcatcatcatcaagccgctgtttgagtcgttcaagggcatggtgtccaccagcagcctggaggagctgcaccggacggcgctctcctggctggaccagcactgctccctgcccatcctcaggccgatggtattgagcacgctgcggcagctgagcacctccacctccatcctcacagacccggcacagctgccagagcaggcgtccaaggctgtcaccaggattggcaagagattgggagagtcctagctgcttagctggcatgtggccgcatgagatgccaggagacccttccctgcccatggagagtaggctgcgccccccagcccttcctgacgctcagcctcggggcctctctccaactctgccggcccaccgtggcatcgggaggccatgctcaggtctgaagcaggtttggggcctgctgacagcaatagcccgcctttgggaaccccttgctgtgaactctctcactcagtgacctcagtcaccaacctcctctgccctcggggcagcccacacaaaagggaagtgctggccgtgctggtcctgccctgctggtggcctgccgggcctggcgccggtgagcggaatcgatgggatgagggtgacagggcctgctcctgtcctgaggcccagccttgtccctcctgccacgtcctgtccacatgcatgcctctgcctgatgccctgctccactctctggtctgcccgtggggcagttggaaggcgtctttctttctcccctcaactctgacagcacccagcccttgtggatggacttgggcttctattcaggcttatgcatggcaggctgccagggggaagtgccttcttcagaggtcctccaggacacatgtgtgcagaaacggtggatgtggaacacacaggaccagaatggaagcgtgtgatgcacggtggctgctctggctgagaggccctgctgggcatgtttcatctgtccccttttagctccacctgacattgcaggatccatggggactcagcccagggccttctcggatgtcacctcaccgctgtggcccttctgccgttcttctccacttggctccagctgcagctgttgacagatcaagcatgtcctgtgggagcttagaaccctgaagttctagtgtctgaaagatcagactccacgtcctgctgtcagccttgtcatcttgtctgatgtctttcagctgggagccccaaaccaggacagttctcggaccaaagatgcccccacactcaaaagtctgtcccgtcttgtgtttggagaaggaaacaatgttggcaggcagcactctgtggtggtcagccctcagagctgtttctaggcatctctcagatcagacagcaaagaatctacccagatctgggctgggtggaggtgtggctgggctgggggccattctgagcctgcagtgagagtttggcccagcctcagtccttgctcttctctggctacctctgcagggagctgcaggggcaagcactctctccagcactcaggaagcccggccgagggtacctcctcgtggaaagaatgcactttaaagctctgctgaggagttcggagcccaggctttcaggcgacctctgccctccctgcctctcctcaccctccctctcttcctgcagggcctgggaagggctttgagggagcctgggagccatgtgaagaggggcacgcctgggctgtcccacagtttagatccagttggaggttctccctggctcctgcaggcctgcggggatctctccccacttcaggcctccggccagctgcctgccctcttgtctgtgcttcagccctgcacaaaagcagcttggtgacaccactcagccacccagagtacgtgtttacaggctttccagatcaccttcctgtggggtgaacgtaatgaggcggggctggtccttggaatttcccctggaaaatggtaacagactccatccttgacccggggatgagcatgaaggcattgtcccaaaggcagaggccaccgtggtaggaattccaccaaggccagaagggaaaaaggaagaacccaccgtgtctggctgtgcgggccctggggagggtcgtgagtgcagcccctctctacttctgtgcctttgtaaaacgtgtagataaccgcagtggttggctgagccaagaactctcctaaatcagtggctttctccccaccccttgctggggagtcatttttaaaaaaatctgtgggatataaaattggcctcctgctgcttcagcctacctctccctctgctgacttaatgtcgtgattctgtttcttcagatatttaaggctgttaggttgtgtgagccttgaagtgtgtgtgtgtgtcccagcgactgtccactgtccaggagatgcatgtctttgtattggagatatttctgtaactcattctcttggtgctcacgattgccatggccatagggccacagtgccgtatctgctgcagacatgattgtttcttgttctagaggttttcttgttttcgaatcttgcctgatgaatccagccagaccaaggggcctagatttgacctctgtcctgggctcctgggccaggtgcaggaacatctgaggccactctgctggccacctccagtgggtgctgaccacaggatgggctttgtttacactcattttcaccctgattcttgcccccactttcataaaagaaacttcaaaatgctgacgctttggagagtaagaaaatcaatcttggctgggcacggtggctcctgcctgtgatcctagcactttgggaggctgaagctgaaggatcacttgagctcaggagttggagaccaaccctggcaacataacaagaccctgtctctacaaaaaaaaaaaaaaaaaaaaaaaatttagccgtgtgtagcagtgagtgcctgtggtcccagctacttgggcctgaggctggaggattgcttgagcctagaagttgcagtgagctatgatcatgccacactgtactccagcctggatgacagagtgaaaccctgcctctaaataaaagaaaatagaggcagactgtggtggctcacgcctgtaatcccagcactttggtaggccaaggcgggtggatcacctgcagtcaggagttcacaaccagcctgaccaacatggtgaaaccctgtctatactaaaaatacaaaacattagccacgtgtggtggtacacgcctgtaatcccagctactcgggaggctgagtcaggagaatcacttgaacctgggaggcggaggttgcagtgagctgagattgtaccactgcactccagcctgggtgacagagcaaaaccctatctcaaaaaaaaaaagaagaaaaaaatagaaaatccaaaaagaaaaaccagaaggcctgctggcgtataaatccctgggcgggtttctgataaattgccctgtgctgtcagcccctgcactgcactgctgccttccatggtgggtgggagaccccagagcggggcaggcgccactgagggcttttcttggagtcggccagcaggccacgcagcatccggcaccctgggcgggctggctagctgccttcttaggacatctctactttgaaggattttaccgcaggaagcaatagcagcgctggccattggtgctgatgacagcattgggtctggttgaggggaaggggctggaaagcagcagacccccccagtgctgcgcatggtcccggagctgtcagccaggggagtggggtcagccgtcagccagccctcccatttcccgcccatgggccctgaccacactcccttttctagaagtcaatcctaaggtttctctgctctggctaagaggatgtaaatttggattcttagagggcatggcacccccagtccctgcccagataaagtagcacagtggcaggcagcacctctgtctgttgctgacgttggggggcttacacacccacctcatctccgtgcacagccatgactggccctgccggcagctggggtgcaggtaagggtctctctcatagaggggagctgcagctgagaactggcgaggccccttcctccaaggccctagctggcccccgggtgaacctgaggtggcaggttcaggttttcaagatggtgaggtctcgctgtctgctggacagtacgttaggctctcagaactcatgggtgtggagctgggcctgtcccgggccagtggacccctgtgtgtgggggatttggggtgctgtgggcctggttatgcactggcagatggaccttgctttggtccagctcttttccttaccctggctctgacgtgggaaggcttggagggcccgtctcatcacccccgttcgccctcagctgtccctttcccttgtcgcctggccgctgcctcgcccgcctgaggcctcctagcaggcagcctgggtgtgagttgagcctctctcttttccctctggtgggaaagtggcctttccctcaacacctgctccccggccccagaggaacccacctgttttggagctcagcttggcccagcgtttccttggggaagggaaaggagggctggacagcactgatccgggcaggcagcgtgtgcagcagtggccagccagagtgccaaagatgcacggggatgtggtgtgtggctccgggccctcgacatctctgctttgggggatttttaccttgtctgcacacttgtcaggggagaggggacagcaaggtgggaggttgaagagctttgaggctcagcagcatgtttgtggcattcggtggacaccatggccttgggcggctggacaggtttttgtgatgtgagggacacgcatggggcacatggtaagcttggcaagggctccaggaacgctgacgaagggttttaggacccccacccccatgcctgtaccagggctggcctccagagcgggtgaggacagagcagctgtgggcttttcattctgaggtcttggcccccctggccaccgcaagggactctttgcttgtcagggcttgcaaaaaccaaccttcgagaaagaaaagggaactcttcacgttgaatgttgactttgtgtgtatgcgtgtgtgtgtgtgtgtgtgcacgcgcgcgtgtgcgtgttgacttcatggaattttgttttgtgaaattcccctccaatcgtgtcagaatttacctccatgccccagtcacactgttggttctgcgctctgaacctgggtgtagctcatttgaaggactctcttctgcgtttcctaacagttatttggtggtctcaagagttgaggttgtggagggttgggagaaactgaagttctatacatttccatagagtttacatcctgcagttaaaaggcagggagggctcagcccgggccccacagctccaggccatcccctacgggctgcccacagtgcccccttttctctagccgaatctttttcgaacagcccgggaaaggaaaacggattcacttgctgattttgttcacggcggaagcaccatgttccgttcctttttcaggttcagtttgttgtgtaaatggcggttttttctggtgtgagctttggtgatggtggcagggctcctttgaagagatggttccacctcgtggtctgaagaacaaaccagagaagagtctggtttggccagaggccccctccggtccacgtcaccctgagtacacccctctgattgctctgctgtcaagaagcacgtttccaccagctgtattcaacactacaatgcattttttaaactatatttgcatccaagacaataaagacaccttattttttttgaaaagcc

SEQ ID NO: 155142 - DNA, 805 bp, Homo sapiens
  Payload ID: 10499
  Gene Symbol: MLXIP
  Gene Name: MLX interacting protein
  Uniprot ID: Q9HAP2
  ENST ID: ENST00000377037
  CDS Start-End: 138-791
gaattgtctgaccccagcattgcttcctggctcctttcttcctttttcaggagagcatcctgccgaccacagccctccccactgtgagccttcctgacagcctcatcgcgccccctaccgccccatccctggctcacatggatgagcagggctgtgaacacacctcccggactgaggacccgtttatccagcccacggacttcggtccctcagagccgccactgagtgtcccaccgcccatctcccccgtgttaccattagttcctcctcctgccactgccctgaaccccccggctccacccaccttccatcagccacagaagtttgctggagtcaacaaagcgccgtctgtcatcacccacacggcctctgccaccctcacccacgatgcccccgccaccacctttagccagagtcagggccttgtgatcaccacccatcaccctgccccgtcagcggccccttgtgggctggcactgtctcctgtcacccggcctccccagccacggttaacttttgtgcaccccaaacctgtatccttgactgggggcaggcctaagcagccccacaaaatagtgcctgctcccaaaccagagcccgtgtccttggtgttgaagaatgcccgtatcgccccaggtgagccaggcggggagactcagtgcggggctccccccgacccagagggatgttttcccatcccaaaggctttcaaacttgtgaccaccaccaccaccctggtgtgcacgtgcatgcgcacacacatacacttaaatgaaacaaaagtgtcatgaaataatacatggcc

SEQ ID NO: 155143 - DNA, 1619 bp, Homo sapiens
  Payload ID: 10499
  Gene Symbol: MLXIP
  Gene Name: MLX interacting protein
  ENST ID: ENST00000535430
  CDS Start-End: 1399-1619
cagatctggagaagcgcaagaatcctgtgtgccactttgtgacacccctggacggctctgtggacgtagacgagcaccgccggccggaggtacttggcagtgaccaagggtggctgagagtggaaacataccagcacctcaccgggagtggctcaccgcgggctggtcctgtaggagaggctgccgagggtagtgcagcgcctgccctgcgccatccatgccctgggggccaggcctgggagctggtggcctctggcaaccccaggctgcagagcctcccccttctcagagggactggcccagggactgagggggttaatatctttctgttaatttttaaagtgtgtgtctatgtgtgattatacatgcacaggaagtgtctagaggaatatatagaagtgtctttattaagagacttcaggaacctctggggagtaggattagggctgccagatgagggggagatgctttcttcactgcatactcttctgtgtggctttaattttgtctaggcatgtctcactgttaacgataaagggggaatttagaaggtaagctaatgaaagacagttttgagacaggtataatctggtattagacagtatcaagggatatcattttgttgggtatggcaatattgtaatcagttctttttaacagaaaagcatctttgctgtcgaggacacacacacagtgtttgtaggtgaggtgatttgggccttgagatcagaaagtgaggcaaccccaggcattggggctccttatctctggagctcgaaggctgtcatgcaaggcatccacactggcatcacgcgaaggttggatgagaggcccctggagggcacattccacctgaaacttcctggaattggctgttcatttttgccctttgaatgtggcagaggctgtggggaaggggcatttatgggggggcttgggaattgctgcagcgttcccctgcttcttcctctgtggagcattctgctctcaccctgtcctcctggacagagcctcaggaccgtgcccccaaggcctttggctaccttaggtcttgaaatgacagcgcattgttagctagagggtctgctatagcatggaagaagtgggacgtactttctgagtgatgtggtagccactgtggggtttcccgctggattgcctaaggcctgattatagtgccggatactcagtacaccagttgagctttgctaatcaagcagagccccctcttcactctgctctctgtccctgtcctaggccatcaccacggaagggaagtactggaagagccgcatcgagattgtgatccgggagtatcacaagtggagaacctacttcaagaaaaggctacagcagcacaaggatgaggacctctccagcctggtccaggacgatgacatgctgtattggcacaagcacggggatggatggaagacccccgtccccatggaggaggatcccctgctggacacagacatgctcatgtcggaattcagcgacaccctcttctccacactttcttcacaccagccggtggcctggcccaatccccgggaaatagcacatctgggaaatgcagacatgatccagccgggactgattcctttgcagcctaacct

SEQ ID NO: 155144 - DNA, 5097 bp, Homo sapiens
  Payload ID: 10499
  Gene Symbol: MLXIP
  Gene Name: MLX interacting protein
  Uniprot ID: Q9HAP2
  ENST ID: ENST00000538698
  CDS Start-End: 911-2491
gtgcagaggcacgattccatccctcttttacagcatccttcagcacccatggggtgggagactcttggtccaggtgtgcttctgcctgagtgccaggtaacctatgtgcagctagctctgctccgactaattaacacagaattagctagacagagaagaaaaacatggattactaataaaaataacttctgtatatttctttcacgttttactaagcaatccaaaaagttgcttacaggtgcttggggctacagagctgagtgaggtaccattctttgtccttacggagccctcatgcttatgcccatgaccagttagacactggtaacctggcaccatcttcaaacgggctccgggaagaattgctactgcagagactgggatctgaaccattgattcctcgtagcttttcttatttaggaagaggtggcctgatgaccagttgacacgtgaaattgtcctcggggattcccgagcagctgcaatccaggctgcctctgctcagtaatagaagatggcagagactttggggagactctgctggactccagaaacaagatattcccaggctgctagccagctgtgtgagggccgttgccttatctgagctctgagttatttagtttttaatggaaacaagacccccgcagacacgcagggaaacacaaatccctatcagatcagcagccatggacgtggagacgtggcctttgtccctctgtcccagcgcccggcctgtgtagttggacttggcagtgtgcagcgctagaaaggaattgtctgaccccagcattgcttcctggctcctttcttcctttttcaggagagcatcctgccgaccacagccctccccactgtgagccttcctgacagcctcatcgcgccccctaccgccccatccctggctcacatggatgagcagggctgtgaacacacctcccggactgaggacccgtttatccagcccacggacttcggtccctcagagccgccactgagtgtcccgcagcccttcctccctgtcttcaccatgcccctgctgtctcccagccccgccccaccgcccatctcccccgtgttaccattagttcctcctcctgccactgccctgaaccccccggctccacccaccttccatcagccacagaagtttgctggagtcaacaaagcgccgtctgtcatcacccacacggcctctgccaccctcacccacgatgcccccgccaccacctttagccagagtcagggccttgtgatcaccacccatcaccctgccccgtcagcggccccttgtgggctggcactgtctcctgtcacccggcctccccagccacggttaacttttgtgcaccccaaacctgtatccttgactgggggcaggcctaagcagccccacaaaatagtgcctgctcccaaaccagagcccgtgtccttggtgttgaagaatgcccgtatcgccccagctgccttttcaggccaaccacaagcggtgatcatgacgtcagggcctctgaagagagaagggatgttggcctccaccgtgtcccagtccaacgtggtcattgcgcctgctgccatcgccagggctcctggggtcccggagttccacagcagcatcctggtgacagatctcggccatggcacgagcagcccgcctgcccccgtctcccggctcttcccaagcacagcgcaagaccccctggggaagggcgagcaggtcccgctgcatgggggcagcccccaggtcactgtcacagggcccagtcgggactgcccaaactcagggcaggcctctccgtgtgcatcggagcagagccccagtcctcaatctccccagaacaactgctcagggaaatccgaccccaaaaatgtggctgcactaaagaaccggcagatgaagcacatctcagctgagcagaaaaggcgcttcaacatcaagatgtgcttcgacatgctcaacagcctcatctccaacaattccaagctgaccagtcacgccatcacactgcagaagactgtggagtacatcaccaagctgcagcaggagagaggccagatgcaggaggaggcccggcggctgcgggaggagatcgaggagctcaatgccaccatcatctcctgccagcagctgctccctgccacgggagtccccgttacccggcgccagtttgatcacatgaaagacatgtttgacgaatacgtgaaaacccggaccttgcagaattggaagttctggattttcagcatcatcatcaagccgctgtttgagtcgttcaagggcatggtgtccaccagcagcctggaggagctgcaccggacggcgctctcctggctggaccagcactgctccctgcccatcctcaggccgatggtattgagcacgctgcggcagctgagcacctccacctccatcctcacagacccggcacagctgccagagcaggcgtccaaggctgtcaccaggattggcaagagattgggagagtcctagctgcttagctggcatgtggccgcatgagatgccaggagacccttccctgcccatggagagtaggctgcgccccccagcccttcctgacgctcagcctcggggcctctctccaactctgccggcccaccgtggcatcgggaggccatgctcaggtctgaagcaggtttggggcctgctgacagcaatagcccgcctttgggaaccccttgctgtgaactctctcactcagtgacctcagtcaccaacctcctctgccctcggggcagcccacacaaaagggaagtgctggccgtgctggtcctgccctgctggtggcctgccgggcctggcgccggtgagcggaatcgatgggatgagggtgacagggcctgctcctgtcctgaggcccagccttgtccctcctgccacgtcctgtccacatgcatgcctctgcctgatgccctgctccactctctggtctgcccgtggggcagttggaaggcgtctttctttctcccctcaactctgacagcacccagcccttgtggatggacttgggcttctattcaggcttatgcatggcaggctgccagggggaagtgccttcttcagaggtcctccaggacacatgtgtgcagaaacggtggatgtggaacacacaggaccagaatggaagcgtgtgatgcacggtggctgctctggctgagaggccctgctgggcatgtttcatctgtccccttttagctccacctgacattgcaggatccatggggactcagcccagggccttctcggatgtcacctcaccgctgtggcccttctgccgttcttctccacttggctccagctgcagctgttgacagatcaagcatgtcctgtgggagcttagaaccctgaagttctagtgtctgaaagatcagactccacgtcctgctgtcagccttgtcatcttgtctgatgtctttcagctgggagccccaaaccaggacagttctcggaccaaagatgcccccacactcaaaagtctgtcccgtcttgtgtttggagaaggaaacaatgttggcaggcagcactctgtggtggtcagccctcagagctgtttctaggcatctctcagatcagacagcaaagaatctacccagatctgggctgggtggaggtgtggctgggctgggggccattctgagcctgcagtgagagtttggcccagcctcagtccttgctcttctctggctacctctgcagggagctgcaggggcaagcactctctccagcactcaggaagcccggccgagggtacctcctcgtggaaagaatgcactttaaagctctgctgaggagttcggagcccaggctttcaggcgacctctgccctccctgcctctcctcaccctccctctcttcctgcagggcctgggaagggctttgagggagcctgggagccatgtgaagaggggcacgcctgggctgtcccacagtttagatccagttggaggttctccctggctcctgcaggcctgcggggatctctccccacttcaggcctccggccagctgcctgccctcttgtctgtgcttcagccctgcacaaaagcagcttggtgacaccactcagccacccagagtacgtgtttacaggctttccagatcaccttcctgtggggtgaacgtaatgaggcggggctggtccttggaatttcccctggaaaatggtaacagactccatccttgacccggggatgagcatgaaggcattgtcccaaaggcagaggccaccgtggtaggaattccaccaaggccagaagggaaaaaggaagaacccaccgtgtctggctgtgcgggccctggggagggtcgtgagtgcagcccctctctacttctgtgcctttgtaaaacgtgtagataaccgcagtggttggctgagccaagaactctcctaaatcagtggctttctccccaccccttgctggggagtcatttttaaaaaaatctgtgggatataaaattggcctcctgctgcttcagcctacctctccctctgctgacttaatgtcgtgattctgtttcttcagatatttaaggctgttaggttgtgtgagccttgaagtgtgtgtgtgtgtcccagcgactgtccactgtccaggagatgcatgtctttgtattggagatatttctgtaactcattctcttggtgctcacgattgccatggccatagggccacagtgccgtatctgctgcagacatgattgtttcttgttctagaggttttcttgttttcgaatcttgcctgatgaatccagccagaccaaggggcctagatttgacctctgtcctgggctcctgggccaggtgcaggaacatctgaggccactctgctggccacctccagtgggtgctgaccacaggatgggctttgtttacactcattttcaccctgattcttgcccccactttcataaaagaaacttcaaaatgctgacgctttggagagtaagaaaatcaatcttggctgggcacggtggctcctgcctgtgatcctagcactttgggaggctgaagctgaaggatcacttgagctcaggagttggagaccaaccctggcaacataacaagaccctgtctctac

SEQ ID NO: 155145 - DNA, 513 bp, Homo sapiens
  Payload ID: 10499
  Gene Symbol: MLXIP
  Gene Name: MLX interacting protein
  ENST ID: ENST00000542417
  CDS Start-End: 1-513
tgcatgggggcagcccccaggtcactgtcacagggcccagtcgggactgcccaaactcagggcaggcctctccgtgtgcatcggagcagagccccagtcctcaatctccccagaacaactgctcagggaaatccgaccccaaaaatgtggctgcactaaagaaccggcagatgaagcacatctcagctgagcagaaaaggcgcttcaacatcaagatgtgcttcgacatgctcaacagcctcatctccaacaattccaagctgaccagtcacgccatcacactgcagaagactgtggagtacatcaccaagctgcagcaggagagaggccagatgcaggaggaggcccggcggctgcgggaggagatcgaggagctcaatgccaccatcattgatccattctctgtgggcagatactttccagccccaggggaaaggagtacgccagtccaaccaccttcgggtctgcagtccccagcccctctccgtgcttgccttttctttaaccacacac

SEQ ID NO: 155146 - DNA, 1682 bp, Homo sapiens
  Payload ID: 10499
  Gene Symbol: MLXIP
  Gene Name: MLX interacting protein
  ENST ID: ENST00000366272
  CDS Start-End: 759-1682
agtagttgggattacaggtgtgcgccactatactcggctaatttttgtttgtttgtttgttttttgagatggagtctcactctgtcgcctagctggagtgcagtggtgtgatctcggctcactgcaacctccgcctcctgggttcaagtgattctcctgcctcagcctcccgagttagctgggattacaggcgcccatcactacacccagctaattttttgtatttttagtagagatggggtttcaccatgttggccaggctggtctcgaactcctgatctcaggcgatctgcccaccttggcctcccaaagtgctgggattacaggtgtgagcccccacacccagtctctattctcttttttttttttttgagacggagtttcactgttattgcccaggctggagtgagatgacatgatcttggctcactgcaacctctgcctcccgggttcaagtgattctcctgcctcatcctcctgagtagctgagattacaggcatgtgccaccacacctggctaattttgtatcttcagtagagatggggtttcaccacattggccaggctggtctcgaactcctgacctctggtgatccacctgcctcggcctcccaaggtgctgggattacagatgtgagccattgcacccagcctctctatcttttttttaaagttagtcacaacctacagtgtgaaaacatggtcctggccatctctttcctgggtctataacatgtctccttcaagaagtcacacaaatggttttaggtgccttggtggctttgtcttcctgtcccctggggttgagaacaagctgtctcactggcagagaggcagcctctgcagggtgggccaggccctgtggcccagggctgcacctgaacatcctccttatcctggcagctgccttttcaggccaaccacaagcggtgatcatgacgtcagggcctctgaagagagaagggatgttggcctccaccgtgtcccagtccaacgtggtcattgcgcctgctgccatcgccagggctcctggggtcccggagttccacagcagcatcctggtgacagatctcggccatggcacgagcagcccgcctgcccccgtctcccggctcttcccaagcacagcgcaagaccccctggggaagggcgagcaggtcccgctgcatgggggcagcccccaggtcactgtcacagggcccagtcgggactgcccaaactcagggcaggcctctccgtgtgcatcggagcagagccccagtcctcaatctccccagaacaactgctcagggaaatccgaccccaaaaatgtggctgcactaaagaaccggcagatgaagcacatctcagctgagcagaaaaggcgcttcaacatcaagatgtgcttcgacatgctcaacagcctcatctccaacaattccaagctgaccagtcacgccatcacactgcagaagactgtggagtacatcaccaagctgcagcaggagagaggccagatgcaggaggaggcccggcggctgcgggaggagatcgaggagctcaatgccaccatcatctcctgccagcagctgctccctgccacgggagtccccgttacccggcgccagtttgatcacatgaaagacatgtttgacgaatacgtgaaaacccggaccttgcagaattggaagttctggattgta

SEQ ID NO: 155147 - DNA, 805 bp, Homo sapiens; identical to SEQ ID NO: 155142
  Payload ID: 10499
  Gene Symbol: MLXIP
  Gene Name: MLX interacting protein
  ENST ID: ENST00000628109
  CDS Start-End: 138-791

SEQ ID NO: 155148 - DNA, 513 bp, Homo sapiens; identical to SEQ ID NO: 155145
  Payload ID: 10499
  Gene Symbol: MLXIP
  Gene Name: MLX interacting protein
  ENST ID: ENST00000625214
  CDS Start-End: 1-513

SEQ ID NO: 155149 - DNA, 1682 bp, Homo sapiens; identical to SEQ ID NO: 155146
  Payload ID: 10499
  Gene Symbol: MLXIP
  Gene Name: MLX interacting protein
  ENST ID: ENST00000626863
  CDS Start-End: 759-1682

SEQ ID NO: 155150 - DNA, 5097 bp, Homo sapiens; identical to SEQ ID NO: 155144
  Payload ID: 10499
  Gene Symbol: MLXIP
  Gene Name: MLX interacting protein
  ENST ID: ENST00000625732
  CDS Start-End: 911-2491

SEQ ID NO: 155151 - DNA, 1619 bp, Homo sapiens; identical to SEQ ID NO: 155143
  Payload ID: 10499
  Gene Symbol: MLXIP
  Gene Name: MLX interacting protein
  ENST ID: ENST00000626676
  CDS Start-End: 1399-1619

SEQ ID NO: 155152 - DNA, 8427 bp, Homo sapiens; identical to SEQ ID NO: 155141
  Payload ID: 10499
  Gene Symbol: MLXIP
  Gene Name: MLX interacting protein
  ENST ID: ENST00000629738
  CDS Start-End: 133-2892

SEQ ID NO: 155153 - DNA, 3278 bp, Homo sapiens
  Payload ID: 10500
  Gene Symbol: MLXIPL
  Gene Name: MLX interacting protein-like
  Uniprot ID: Q9NP71
  ENST ID: ENST00000313375
  CDS Start-End: 49-2607
ccccgcgctgcgcggagcagggaccaggcggttgcggcggcgacagccatggccggcgcgctggcaggtctggccgcgggcttgcaggtcccgcgggtcgcgcccagcccagactcggactcggacacagactcggaggacccgagtctccggcgcagcgcgggcggcttgctccgctcgcaggtcatccacagcggtcacttcatggtgtcgtcgccgcacagcgactcgctgccccggcggcgcgaccaggaggggtccgtggggccctccgacttcgggccgcgcagtatcgaccccacactcacacgcctcttcgagtgcttgagcctggcctacagtggcaagctggtgtctcccaagtggaagaatttcaaaggcctcaagctgctctgcagagacaagatccgcctgaacaacgccatctggagggcctggtatatccagtatgtgaagcggaggaagagccccgtgtgtggcttcgtgacccccctgcaggggcctgaggctgatgcgcaccggaagccggaggccgtggtcctggaggggaactactggaagcggcgcatcgaggtggtgatgcgggaataccacaagtggcgcatctactacaagaagcggctccgtaagcccagcagggaagatgacctcctggcccctaagcaggcggaaggcaggtggccgccgccggagcaatggtgcaaacagctcttctccagtgtggtccccgtgctgctgggggacccagaggaggagccgggtgggcggcagctcctggacctcaattgctttttgtccgacatctcagacactctcttcaccatgactcagtccggcccttcgcccctgcagctgccgcctgaggatgcctacgtcggcaatgctgacatgatccagccggacctgacgccactgcagccaagcctggatgacttcatggacatctcagatttctttaccaactcccgcctcccacagccgcccatgccttcaaacttcccagagccccccagcttcagccccgtggttgactccctcttcagcagtgggaccctgggcccagaggtgcccccggcttcctcggccatgacccacctctctggacacagccgtctgcaggctcggaacagctgccctggccccttggactccagcgccttcctgagttctgatttcctccttcctgaagaccccaagccccggctcccaccccctcctgtacccccacctctgctgcattaccctccccctgccaaggtgccaggcctggagccctgccccccacctcccttccctcccatggcaccacccactgctttgctgcaggaagagcctctcttctctcccaggtttcccttccccaccgtccctcctgccccaggagtgtctccgctgcctgctcctgcagccttcccacccaccccacagtctgtccccagcccagcccccacccccttccccatagagcttctacccttggggtattcggagcctgcctttgggccttgcttctccatgcccagaggcaagccccccgccccatcccctaggggacagaaagccagcccccctaccttagcccctgccactgccagtccccccaccactgcggggagcaacaacccctgcctcacacagctgctcacagcagctaagccggagcaagccctggagccaccacttgtatccagcaccctcctccggtccccagggtccccgcaggagacagtccctgaattcccctgcacattccttcccccgaccccggcccctacaccgccccggccacctccaggcccggccacattggccccttccaggcccctgcttgtccccaaagcggagcggctctcacccccagcgcccagcggcagtgaacggcggctgtcaggggacctcagctccatgccaggccctgggactctgagcgtccgtgtctctcccccgcaacccatcctcagccggggccgtccagacagcaacaagaccgagaaccggcgtatcacacacatctccgcggagcagaagcggcgcttcaacatcaagctggggtttgacacccttcatgggctcgtgagcacactcagtgcccagcccagcctcaaggtgagcaaagctaccacgctgcagaagacagctgagtacatccttatgctacagcaggagcgtgcgggcttgcaggaggaggcccagcagctgcgggatgagattgaggagctcaatgccgccattaacctgtgccagcagcagctgcccgccacaggggtacccatcacacaccagcgttttgaccagatgcgagacatgtttgatgactacgtccgaacccgtacgctgcacaactggaagttctgggtgttcagcatcctcatccggcctctgtttgagtccttcaacgggatggtgtccacggcaagtgtgcacaccctccgccagacctcactggcctggctggaccagtactgctctctgcccgctctccggccaactgtcctgaactccctacgccagctgggcacatctaccagtatcctgaccgacccgggccgcatccctgagcaagccacacgggcagtcacagagggcacccttggcaaacctttatagtcctggccagaccctgctgctcactcagctgccctgggggctgctttccctgggcacgggctccagggatcatctctgggcactcccttcctgccccaggccctggctctgcccttccctggggggtggagcagggtccaggtttcacacttgccacctcctggaggtcaagaagagcagagtccccgtccctgctctgccactgtgctccagcaccgtgaccttgggtgactcgtccgctgtctttggaccgctgtgtttcaatctgcaaaatggggatggggaaggttcaatcagcagatgacccccaggccttggcagctgtgacattgggggcctaggctggcaactccgggggctcaacggtggaaagaggaggatgctgtttctctgtcacctccacttgctccccgacaggtggggcacagacctctgttcctgagcagagaagcagaaaaggaggttccctctctctgctccttcactgctgacccagaggggctgcaggatggtttcccctgggagaggccaggagggcctgatcccaggagacaccagggccagagtgaccacagcagggcaggcatcatgtgtgtgtgtgtgtgtggatgtgtgtgtgtgggttttgtaaagaattcttgaccaataaaagcaaaaactgtctgctggtt

SEQ ID NO: 155154 - DNA, 3079 bp, Homo sapiens
  Payload ID: 10500
  Gene Symbol: MLXIPL
  Gene Name: MLX interacting protein-like
  Uniprot ID: Q9NP71
  ENST ID: ENST00000345114
  CDS Start-End: 1-1728
atggccggcgcgctggcaggtctggccgcgggcttgcaggtcccgcgggtcgcgcccagcccagactcggactcggacacagactcggaggacccgagtctccggcgcagcgcgggcggcttgctccgctcgcaggtcatccacagcggtcacttcatggtgtcgtcgccgcacagcgactcgctgccccggcggcgcgaccaggaggggtccgtggggccctccgacttcgggccgcgcagtatcgaccccacactcacacgcctcttcgagtgcttgagcctggcctacagtggcaagctggtgtctcccaagtggaagaatttcaaaggcctcaagctgctctgcagagacaagatccgcctgaacaacgccatctggagggcctggtatatccagtatgtgaagcggaggaagagccccgtgtgtggcttcgtgacccccctgcaggggcctgaggctgatgcgcaccggaagccggaggccgtggtcctggaggggaactactggaagcggcgcatcgaggtggtgatgcgggaataccacaagtggcgcatctactacaagaagcggctccgtaagcccagcagggaagatgacctcctggcccctaagcaggcggaaggcaggtggccgccgccggagcaatggtgcaaacagctcttctccagtgtggtccccgtgctgctgggggacccagaggaggagccgggtgggcggcagctcctggacctcaattgctttttgtccgacatctcagacactctcttcaccatgactcagtccggcccttcgcccctgcagctgccgcctgaggatgcctacgtcggcaatgctgacatgatccagccggacctgacgccactgcagccaagcctggatgacttcatggacatctcagatttctttaccaactcccgcctcccacagccgcccatgccttcaaacttcccagagccccccagcttcagccccgtggttgactccctcttcagcagtgggaccctgggcccagaggtgcccccggcttcctcggccatgacccacctctctggacacagccgtctgcaggctcggaacagctgccctggccccttggactccagcgccttcctgagttctgatttcctccttcctgaagaccccaagccccggctcccaccccctcctgtacccccacctctgctgcattaccctccccctgccaaggtgccaggcctggagccctgccccccacctcccttccctcccatggcaccacccactgctttgctgcaggaagagcctctcttctctcccaggtttcccttccccaccgtccctcctgccccaggagtgtctccgctgcctgctcctgcagccttcccacccaccccacagtctgtccccagcccagcccccacccccttccccatagagcttctacccttggggtattcggagcctgcctttgggccttgcttctccatgcccagaggcaagccccccgccccatcccctaggggacagaaagccagcccccctaccttagcccctgccactgccagtccccccaccactgcggggagcaacaacccctgcctcacacagctgctcacagcagctaagccggagcaagccctggagccaccacttgtatccagcaccctcctccggtccccagggtccccggcagtgaacggcggctgtcaggggacctcagctccatgccaggccctgggactctgagcgtccgtgtctctcccccgcaacccatcctcagccggggccgtccagacagcaacaagaccgagaaccggcgtatcacacacatctccgcggagcagaagcggcgcttcaacatcaagctggggtttgacacccttcatgggctcgtgagcacactcagtgcccagcccagcctcaaggtgagcaaagctaccacgctgcagaagacagctgagtacatccttatgctacagcaggagcgtgcgggcttgcaggaggaggcccagcagctgcgggatgagattgaggagctcaatgccgccattaacctgtgccagcagcagctgcccgccacaggggtacccatcacacaccagcgttttgaccagatgcgagacatgtttgatgactacgtccgaacccgtacgctgcacaactggaagttctgggtgttcagcatcctcatccggcctctgtttgagtccttcaacgggatggtgtccacggcaagtgtgcacaccctccgccagacctcactggcctggctggaccagtactgctctctgcccgctctccggccaactgtcctgaactccctacgccagctgggcacatctaccagtatcctgaccgacccgggccgcatccctgagcaagccacacgggcagtcacagagggcacccttggcaaacctttatagtcctggccagaccctgctgctcactcagctgccctgggggctgctttccctgggcacgggctccagggatcatctctgggcactcccttcctgccccaggccctggctctgcccttccctggggggtggagcagggtccaggtttcacacttgccacctcctggaggtcaagaagagcagagtccccgtccctgctctgccactgtgctccagcaccgtgaccttgggtgactcgtccgctgtctttggaccgctgtgtttcaatctgcaaaatggggatggggaaggttcaatcagcagatgacccccaggccttggcagctgtgacattgggggcctaggctggcaactccgggggctcaacggtggaaagaggaggatgctgtttctctgtcacctccacttgctccccgacaggtggggcacagacctctgttcctgagcagagaagcagaaaaggaggttccctctctctgctccttcactgctgacccagaggggctgcaggatggtttcccctgggagaggccaggagggcctgatcccaggagacaccagggccagagtgaccacagcagggcaggcatcatgtgtgtgtgtgtgtgtggatgtgtgtgtgtgggttttgtaaagaattcttgaccaataaaagcaaaaactgtctgctggtt

SEQ ID NO: 155155 - DNA, 3215 bp, Homo sapiens
  Payload ID: 10500
  Gene Symbol: MLXIPL
  Gene Name: MLX interacting protein-like
  Uniprot ID: Q9NP71
  ENST ID: ENST00000354613
  CDS Start-End: 49-2544
ccccgcgctgcgcggagcagggaccaggcggttgcggcggcgacagccatggccggcgcgctggcaggtctggccgcgggcttgcaggtcccgcgggtcgcgcccagcccagactcggactcggacacagactcggaggacccgagtctccggcgcagcgcgggcggcttgctccgctcgcaggtcatccacagcggtcacttcatggtgtcgtcgccgcacagcgactcgctgccccggcggcgcgaccaggaggggtccgtggggccctccgacttcgggccgcgcagtatcgaccccacactcacacgcctcttcgagtgcttgagcctggcctacagtggcaagctggtgtctcccaagtggaagaatttcaaaggcctcaagctgctctgcagagacaagatccgcctgaacaacgccatctggagggcctggtatatccagtatgtgaagcggaggaagagccccgtgtgtggcttcgtgacccccctgcaggggcctgaggctgatgcgcaccggaagccggaggccgtggtcctggaggggaactactggaagcggcgcatcgaggtggtgatgcgggaataccacaagtggcgcatctactacaagaagcggctccgtaagcccagcagggaagatgacctcctggcccctaagcaggcggaaggcaggtggccgccgccggagcaatggtgcaaacagctcttctccagtgtggtccccgtgctgctgggggacccagaggaggagccgggtgggcggcagctcctggacctcaattgctttttgtccgacatctcagacactctcttcaccatgactcagtccggcccttcgcccctgcagctgccgcctgaggatgcctacgtcggcaatgctgacatgatccagccggacctgacgccactgcagccaagcctggatgacttcatggacatctcagatttctttaccaactcccgcctcccacagccgcccatgccttcaaacttcccagagccccccagcttcagccccgtggttgactccctcttcagcagtgggaccctgggcccagaggtgcccccggcttcctcggccatgacccacctctctggacacagccgtctgcaggctcggaacagctgccctggccccttggactccagcgccttcctgagttctgatttcctccttcctgaagaccccaagccccggctcccaccccctcctgtacccccacctctgctgcattaccctccccctgccaaggtgccaggcctggagccctgccccccacctcccttccctcccatggcaccacccactgctttgctgcaggaagagcctctcttctctcccaggtttcccttccccaccgtccctcctgccccaggagtgtctccgctgcctgctcctgcagccttcccacccaccccacagtctgtccccagcccagcccccacccccttccccatagagcttctacccttggggtattcggagcctgcctttgggccttgcttctccatgcccagaggcaagccccccgccccatcccctaggggacagaaagccagcccccctaccttagcccctgccactgccagtccccccaccactgcggggagcaacaacccctgcctcacacagctgctcacagcagctaagccggagcaagccctggagccaccacttgtatccagcaccctcctccggtccccagggtccccgcaggagacagtccctgaattcccctgcacattccttcccccgaccccggcccctacaccgccccggccacctccaggcccggccacattggccccttccaggcccctgcttgtccccaaagcggagcggctctcacccccagcgcccagcggcagtgaacggcggctgtcaggggacctcagctccatgccaggccctgggactctgagcgtccgtgtctctcccccgcaacccatcctcagccggggccgtccagacagcaacaagaaccggcgtatcacacacatctccgcggagcagaagcggcgcttcaacatcaagctggggtttgacacccttcatgggctcgtgagcacactcagtgcccagcccagcctcaaggagcgtgcgggcttgcaggaggaggcccagcagctgcgggatgagattgaggagctcaatgccgccattaacctgtgccagcagcagctgcccgccacaggggtacccatcacacaccagcgttttgaccagatgcgagacatgtttgatgactacgtccgaacccgtacgctgcacaactggaagttctgggtgttcagcatcctcatccggcctctgtttgagtccttcaacgggatggtgtccacggcaagtgtgcacaccctccgccagacctcactggcctggctggaccagtactgctctctgcccgctctccggccaactgtcctgaactccctacgccagctgggcacatctaccagtatcctgaccgacccgggccgcatccctgagcaagccacacgggcagtcacagagggcacccttggcaaacctttatagtcctggccagaccctgctgctcactcagctgccctgggggctgctttccctgggcacgggctccagggatcatctctgggcactcccttcctgccccaggccctggctctgcccttccctggggggtggagcagggtccaggtttcacacttgccacctcctggaggtcaagaagagcagagtccccgtccctgctctgccactgtgctccagcaccgtgaccttgggtgactcgtccgctgtctttggaccgctgtgtttcaatctgcaaaatggggatggggaaggttcaatcagcagatgacccccaggccttggcagctgtgacattgggggcctaggctggcaactccgggggctcaacggtggaaagaggaggatgctgtttctctgtcacctccacttgctccccgacaggtggggcacagacctctgttcctgagcagagaagcagaaaaggaggttccctctctctgctccttcactgctgacccagaggggctgcaggatggtttcccctgggagaggccaggagggcctgatcccaggagacaccagggccagagtgaccacagcagggcaggcatcatgtgtgtgtgtgtgtgtggatgtgtgtgtgtgggttttgtaaagaattcttgaccaataaaagcaaaaactgtctgctggtt

SEQ ID NO: 155156 - DNA, 3252 bp, Homo sapiens
  Payload ID: 10500
  Gene Symbol: MLXIPL
  Gene Name: MLX interacting protein-like
  ENST ID: ENST00000434326
  CDS Start-End: 23-2188
ggcggttgcggcggcgacagccatggccggcgcgctggcaggtctggccgcgggcttgcaggtcccgcgggtcgcgcccagcccagactcggactcggacacagactcggaggacccgagtctccggcgcagcgcgggcggcttgctccgctcgcaggtcatccacagcggtcacttcatggtgtcgtcgccgcacagcgactcgctgccccggcggcgcgaccaggaggggtccgtggggccctccgacttcgggccgcgcagtatcgaccccacactcacacgcctcttcgagtgcttgagcctggcctacagtggcaagctggtgtctcccaagtggaagaatttcaaaggcctcaagctgctctgcagagacaagatccgcctgaacaacgccatctggagggcctggtatatccagtatgtgaagcggaggaagagccccgtgtgtggcttcgtgacccccctgcaggggcctgaggctgatgcgcaccggaagccggaggccgtggtcctggaggggaactactggaagcggcgcatcgagctgccgcctgaggatgcctacgtcggcaatgctgacatgatccagccggacctgacgccactgcagccaagcctggatgacttcatggacatctcagatttctttaccaactcccgcctcccacagccgcccatgccttcaaacttcccagagccccccagcttcagccccgtggttgactccctcttcagcagtgggaccctgggcccagaggtgcccccggcttcctcggccatgacccacctctctggacacagccgtctgcaggctcggaacagctgccctggccccttggactccagcgccttcctgagttctgatttcctccttcctgaagaccccaagccccggctcccaccccctcctgtacccccacctctgctgcattaccctccccctgccaaggtgccaggcctggagccctgccccccacctcccttccctcccatggcaccacccactgctttgctgcaggaagagcctctcttctctcccaggtttcccttccccaccgtccctcctgccccaggagtgtctccgctgcctgctcctgcagccttcccacccaccccacagtctgtccccagcccagcccccacccccttccccatagagcttctacccttggggtattcggagcctgcctttgggccttgcttctccatgcccagaggcaagccccccgccccatcccctaggggacagaaagccagcccccctaccttagcccctgccactgccagtccccccaccactgcggggagcaacaacccctgcctcacacagctgctcacagcagctaagccggagcaagccctggagccaccacttgtatccagcaccctcctccggtccccagggtccccggagacagtccctgaattcccctgcacattccttcccccgaccccggcccctacaccgccccggccacctccaggcccggccacattggccccttccaggcccctgcttgtccccaaagcggagcggctctcacccccagcgcccagcggcagtgaacggcggctgtcaggggacctcagctccatgccaggccctgggactctgagcgtccgtgtctctcccccgcaacccatcctcagccggggccgtccagacagcaacaagaccgagaaccggcgtatcacacacatctccgcggagcagaagcggcgcttcaacatcaagctggggtttgacacccttcatgggctcgtgagcacactcagtgcccagcccagcctcaaggtgagcaaagctaccacgctgcagaagacagctgagtacatccttatgctacagcaggagcgtgcgggcttgcaggaggaggcccagcagctgcgggatgagattgaggagctcaatgccgccattaacctgtgccagcagcagctgcccgccacaggggtacccatcacacaccagcgttttgaccagatgcgagacatgtttgatgactacgtccgaacccgtacgctgcacaactggaagttctgggtgttcagcatcctcatccggcctctgtttgagtccttcaacgggatggtgtccacggcaagtgtgcacaccctccgccagacctcactggcctggctggaccagtactgctctctgcccgctctccggccaagtacgtgagccatctccctgcctgctagagggacccagcctcgggggtggagggagcattccaccctgcttagatcccacatccagcttgccatcaacacagcctagggttgtggccaccccgcatcccccagatggtcctctggccaccagacgcctgtagacagaggttctaggagggggtgacagtcttgccaactaatacctccccctatccctttggttccacatccaagggtagggccctgaccccaggaagtgtctgtctctctctctctgtctcccacccagctgtcctgaactccctacgccagctgggcacatctaccagtatcctgaccgacccgggccgcatccctgagcaagccacacgggcagtcacagagggcacccttggcaaacctttatagtcctggccagaccctgctgctcactcagctgccctgggggctgctttccctgggcacgggctccagggatcatctctgggcactcccttcctgccccaggccctggctctgcccttccctggggggtggagcagggtccaggtttcacacttgccacctcctggaggtcaagaagagcagagtccccgtccctgctctgccactgtgctccagcaccgtgaccttgggtgactcgtccgctgtctttggaccgctgtgtttcaatctgcaaaatggggatggggaaggttcaatcagcagatgacccccaggccttggcagctgtgacattgggggcctaggctggcaactccgggggctcaacggtggaaagaggaggatgctgtttctctgtcacctccacttgctccccgacaggtggggcacagacctctgttcctgagcagagaagcagaaaaggaggttccctctctctgctccttcactgctgacccagaggggctgcaggatggtttcccctgggagaggccaggagggcctgatcccaggagacaccagggccagagtgaccacagcagggcaggcatcatgtgtgtgtgtgtgtgtggatgtgtgtgtgtgggttttgtaaagaattcttgaccaataaaagcaaaaactgtc

SEQ ID NO: 155157 - DNA, 690 bp, Homo sapiens
  Payload ID: 10500
  Gene Symbol: MLXIPL
  Gene Name: MLX interacting protein-like
  ENST ID: ENST00000453275
  CDS Start-End: 52-690
gttccccgcgctgcgcggagcagggaccaggcggttgcggcggcgacagccatggccggcgcgctggcaggtctggccgcgggcttgcaggtcccgcgggtcgcgcccagcccagactcggactcggacacagactcggaggacccgagtctccggcgcagcgcgggcggcttgctccgctcgcaggtcatccacagcggtcacttcatggtgtcgtcgccgcacagcgactcgctgccccggcggcgcgaccaggaggggtccgtggggccctccgacttcgggccgcgcagtatcgaccccacactcacacgcctcttcgagtgcttgagcctggcctacagtggcaagctggtgtctcccaagtggaagaatttcaaaggcctcaagctgctctgcagagacaagatccgcctgaacaacgccatctggagggcctggtatatccagtatttctttaccaactcccgcctcccacagccgcccatgccttcaaacttcccagagccccccagcttcagccccgtggttgactccctcttcagcagtgggaccctgggcccagaggtgcccccggcttcctcggccatgacccacctctctggacacagccgtctgcaggctcggaacagctgccctggccccttggactccagcgccttcctgagttctgatttcctccttcctgaa

SEQ ID NO: 155158 - DNA, 706 bp, Homo sapiens
  Payload ID: 10500
  Gene Symbol: MLXIPL
  Gene Name: MLX interacting protein-like
  ENST ID: ENST00000456640
  CDS Start-End: 1-706
cccaagtggaagaatttcaaaggcctcaagctgctctgcagagacaagatccgcctgaacaacgccatctggagggcctggtatatccagtatgtgaagcggaggaagagccccgtgtgtggcttcgtgacccccctgcaggggcctgaggctgatgcgcaccggaagccggaggccgtggtcctggaggggaactactggaagcggcgcatcgaggtggtgatgcgggaataccacaagtggcgcatctactacaagaagcgggtcagtgggggagggccagggaggccccagagctttcctcctgcggctgccggctaccgcccgcctcggaagatccctggaaaggggatcctgacccccgagcttgcgcccctcgggccctccattcagtcccgggccgacagcgccaccgtgtggccacagcgtctcctagcggcctccttacctaggggtcggctccgtaagcccagcagggaagatgacctcctggcccctaagcaggcggaaggcaggtggccgccgccggagcaatggtgcaaacagctcttctccagtgtggtccccgtgctgctgggggacccagaggaggagccgggtgggcggcagctcctggacctcaattgctttttgtccgacatctcagacactctcttcaccatgactcagtccggcccttcgcccctgcagctgccgcctgaggatg

SEQ ID NO: 155159 - DNA, 3173 bp, Homo sapiens
  Payload ID: 10500
  Gene Symbol: MLXIPL
  Gene Name: MLX interacting protein-like
  Uniprot ID: Q9NP71
  ENST ID: ENST00000429400
  CDS Start-End: 1-2502
atggccggcgcgctggcaggtctggccgcgggcttgcaggtcccgcgggtcgcgcccagcccagactcggactcggacacagactcggaggacccgagtctccggcgcagcgcgggcggcttgctccgctcgcaggtcatccacagcggtcacttcatggtgtcgtcgccgcacagcgactcgctgccccggcggcgcgaccaggaggggtccgtggggccctccgacttcgggccgcgcagtatcgaccccacactcacacgcctcttcgagtgcttgagcctggcctacagtggcaagctggtgtctcccaagtggaagaatttcaaaggcctcaagctgctctgcagagacaagatccgcctgaacaacgccatctggagggcctggtatatccagtatgtgaagcggaggaagagccccgtgtgtggcttcgtgacccccctgcaggggcctgaggctgatgcgcaccggaagccggaggccgtggtcctggaggggaactactggaagcggcgcatcgaggtggtgatgcgggaataccacaagtggcgcatctactacaagaagcggctccgtaagcccagcagggaagatgacctcctggcccctaagcaggcggaaggcaggtggccgccgccggagcaatggtgcaaacagctcttctccagtgtggtccccgtgctgctgggggacccagaggaggagccgggtgggcggcagctcctggacctcaattgctttttgtccgacatctcagacactctcttcaccatgactcagtccggcccttcgcccctgcagctgccgcctgaggatgcctacgtcggcaatgctgacatgatccagccggacctgacgccactgcagccaagcctggatgacttcatggacatctcagatttctttaccaactcccgcctcccacagccgcccatgccttcaaacttcccagagccccccagcttcagccccgtggttgactccctcttcagcagtgggaccctgggcccagaggtgcccccggcttcctcggccatgacccacctctctggacacagccgtctgcaggctcggaacagctgccctggccccttggactccagcgccttcctgagttctgatttcctccttcctgaagaccccaagccccggctcccaccccctcctgtacccccacctctgctgcattaccctccccctgccaaggtgccaggcctggagccctgccccccacctcccttccctcccatggcaccacccactgctttgctgcaggaagagcctctcttctctcccaggtttcccttccccaccgtccctcctgccccaggagtgtctccgctgcctgctcctgcagccttcccacccaccccacagtctgtccccagcccagcccccacccccttccccatagagcttctacccttggggtattcggagcctgcctttgggccttgcttctccatgcccagaggcaagccccccgccccatcccctaggggacagaaagccagcccccctaccttagcccctgccactgccagtccccccaccactgcggggagcaacaacccctgcctcacacagctgctcacagcagctaagccggagcaagccctggagccaccacttgtatccagcaccctcctccggtccccagggtccccgcaggagacagtccctgaattcccctgcacattccttcccccgaccccggcccctacaccgccccggccacctccaggcccggccacattggccccttccaggcccctgcttgtccccaaagcggagcggctctcacccccagcgcccagcggcagtgaacggcggctgtcaggggacctcagctccatgccaggccctgggactctgagcgtccgtgtctctcccccgcaacccatcctcagccggggccgtccagacagcaacaagaccgagaaccggcgtatcacacacatctccgcggagcagaagcggcgcttcaacatcaagctggggtttgacacccttcatgggctcgtgagcacactcagtgcccagcccagcctcaaggagcgtgcgggcttgcaggaggaggcccagcagctgcgggatgagattgaggagctcaatgccgccattaacctgtgccagcagcagctgcccgccacaggggtacccatcacacaccagcgttttgaccagatgcgagacatgtttgatgactacgtccgaacccgtacgctgcacaactggaagttctgggtgttcagcatcctcatccggcctctgtttgagtccttcaacgggatggtgtccacggcaagtgtgcacaccctccgccagacctcactggcctggctggaccagtactgctctctgcccgctctccggccaactgtcctgaactccctacgccagctgggcacatctaccagtatcctgaccgacccgggccgcatccctgagcaagccacacgggcagtcacagagggcacccttggcaaacctttatagtcctggccagaccctgctgctcactcagctgccctgggggctgctttccctgggcacgggctccagggatcatctctgggcactcccttcctgccccaggccctggctctgcccttccctggggggtggagcagggtccaggtttcacacttgccacctcctggaggtcaagaagagcagagtccccgtccctgctctgccactgtgctccagcaccgtgaccttgggtgactcgtccgctgtctttggaccgctgtgtttcaatctgcaaaatggggatggggaaggttcaatcagcagatgacccccaggccttggcagctgtgacattgggggcctaggctggcaactccgggggctcaacggtggaaagaggaggatgctgtttctctgtcacctccacttgctccccgacaggtggggcacagacctctgttcctgagcagagaagcagaaaaggaggttccctctctctgctccttcactgctgacccagaggggctgcaggatggtttcccctgggagaggccaggagggcctgatcccaggagacaccagggccagagtgaccacagcagggcaggcatcatgtgtgtgtgtgtgtgtggatgtgtgtgtgtgggttttgtaaagaattcttgaccaataaaagcaaaaactgtctgctggtt

SEQ ID NO: 155160 - DNA, 3224 bp, Homo sapiens
  Payload ID: 10500
  Gene Symbol: MLXIPL
  Gene Name: MLX interacting protein-like
  Uniprot ID: Q9NP71
  ENST ID: ENST00000414749
  CDS Start-End: 1-2553
atggccggcgcgctggcaggtctggccgcgggcttgcaggtcccgcgggtcgcgcccagcccagactcggactcggacacagactcggaggacccgagtctccggcgcagcgcgggcggcttgctccgctcgcaggtcatccacagcggtcacttcatggtgtcgtcgccgcacagcgactcgctgccccggcggcgcgaccaggaggggtccgtggggccctccgacttcgggccgcgcagtatcgaccccacactcacacgcctcttcgagtgcttgagcctggcctacagtggcaagctggtgtctcccaagtggaagaatttcaaaggcctcaagctgctctgcagagacaagatccgcctgaacaacgccatctggagggcctggtatatccagtatgtgaagcggaggaagagccccgtgtgtggcttcgtgacccccctgcaggggcctgaggctgatgcgcaccggaagccggaggccgtggtcctggaggggaactactggaagcggcgcatcgaggtggtgatgcgggaataccacaagtggcgcatctactacaagaagcggctccgtaagcccagcagggaagatgacctcctggcccctaagcaggcggaaggcaggtggccgccgccggagcaatggtgcaaacagctcttctccagtgtggtccccgtgctgctgggggacccagaggaggagccgggtgggcggcagctcctggacctcaattgctttttgtccgacatctcagacactctcttcaccatgactcagtccggcccttcgcccctgcagctgccgcctgaggatgcctacgtcggcaatgctgacatgatccagccggacctgacgccactgcagccaagcctggatgacttcatggacatctcagatttctttaccaactcccgcctcccacagccgcccatgccttcaaacttcccagagccccccagcttcagccccgtggttgactccctcttcagcagtgggaccctgggcccagaggtgcccccggcttcctcggccatgacccacctctctggacacagccgtctgcaggctcggaacagctgccctggccccttggactccagcgccttcctgagttctgatttcctccttcctgaagaccccaagccccggctcccaccccctcctgtacccccacctctgctgcattaccctccccctgccaaggtgccaggcctggagccctgccccccacctcccttccctcccatggcaccacccactgctttgctgcaggaagagcctctcttctctcccaggtttcccttccccaccgtccctcctgccccaggagtgtctccgctgcctgctcctgcagccttcccacccaccccacagtctgtccccagcccagcccccacccccttccccatagagcttctacccttggggtattcggagcctgcctttgggccttgcttctccatgcccagaggcaagccccccgccccatcccctaggggacagaaagccagcccccctaccttagcccctgccactgccagtccccccaccactgcggggagcaacaacccctgcctcacacagctgctcacagcagctaagccggagcaagccctggagccaccacttgtatccagcaccctcctccggtccccagggtccccgcaggagacagtccctgaattcccctgcacattccttcccccgaccccggcccctacaccgccccggccacctccaggcccggccacattggccccttccaggcccctgcttgtccccaaagcggagcggctctcacccccagcgcccagcggcagtgaacggcggctgtcaggggacctcagctccatgccaggccctgggactctgagcgtccgtgtctctcccccgcaacccatcctcagccggggccgtccagacagcaacaagaaccggcgtatcacacacatctccgcggagcagaagcggcgcttcaacatcaagctggggtttgacacccttcatgggctcgtgagcacactcagtgcccagcccagcctcaaggtgagcaaagctaccacgctgcagaagacagctgagtacatccttatgctacagcaggagcgtgcgggcttgcaggaggaggcccagcagctgcgggatgagattgaggagctcaatgccgccattaacctgtgccagcagcagctgcccgccacaggggtacccatcacacaccagcgttttgaccagatgcgagacatgtttgatgactacgtccgaacccgtacgctgcacaactggaagttctgggtgttcagcatcctcatccggcctctgtttgagtccttcaacgggatggtgtccacggcaagtgtgcacaccctccgccagacctcactggcctggctggaccagtactgctctctgcccgctctccggccaactgtcctgaactccctacgccagctgggcacatctaccagtatcctgaccgacccgggccgcatccctgagcaagccacacgggcagtcacagagggcacccttggcaaacctttatagtcctggccagaccctgctgctcactcagctgccctgggggctgctttccctgggcacgggctccagggatcatctctgggcactcccttcctgccccaggccctggctctgcccttccctggggggtggagcagggtccaggtttcacacttgccacctcctggaggtcaagaagagcagagtccccgtccctgctctgccactgtgctccagcaccgtgaccttgggtgactcgtccgctgtctttggaccgctgtgtttcaatctgcaaaatggggatggggaaggttcaatcagcagatgacccccaggccttggcagctgtgacattgggggcctaggctggcaactccgggggctcaacggtggaaagaggaggatgctgtttctctgtcacctccacttgctccccgacaggtggggcacagacctctgttcctgagcagagaagcagaaaaggaggttccctctctctgctccttcactgctgacccagaggggctgcaggatggtttcccctgggagaggccaggagggcctgatcccaggagacaccagggccagagtgaccacagcagggcaggcatcatgtgtgtgtgtgtgtgtggatgtgtgtgtgtgggttttgtaaagaattcttgaccaataaaagcaaaaactgtctgctggtt

SEQ ID NO: 155161 - DNA, 2586 bp, Homo sapiens
  Payload ID: 10501
  Gene Symbol: MLX
  Gene Name: MLX, MAX dimerization protein
  Uniprot ID: Q9UH92
  ENST ID: ENST00000246912
  CDS Start-End: 54-950
cctcgccgcagggggcccgcccgctggcccgtttccggtccggtgggtacaagatgacggagccgggcgcctctcccgaggacccttgggtcaaggcaagccccgtgggcgcgcacgccggcgaggggagggcgggtcgggctcgtgcacgtaggggggccggaagacgaggggcttccctcctgtccccaaagtcccccacgctctccgtgccccggggctgcagagaagacagctctcaccccgcgtgtgccaaggtggagtatgcctacagcgacaacagcctggaccccgggctttttgtagaaagcacccgcaaggggagtgtagtgtccagagctaatagcatcggttccaccagtgcctcttctgtccccaacacagatgatgaggacagtgattaccaccaggaggcctacaaggagtcctacaaagaccggcggcggcgcgcacacactcaggctgagcagaagaggagggacgccatcaagagaggctatgatgaccttcagaccatcgtccccacttgccagcagcaggacttctccattggctcccaaaagctcagcaaagccatcgttctacaaaagaccattgactacattcagtttttgcacaaggagaagaaaaagcaggaggaggaggtgtccacgttacgcaaggatgtcaccgccctaaagatcatgaaagtgaactatgagcagattgtgaaggcacaccaggacaacccccatgaaggggaggaccaggtctctgaccaggtcaagttcaacgtgtttcaaggcatcatggattccctgttccagtccttcaatgcctccatctcagtggccagcttccaggagctgtcagcgtgtgtcttcagctggatcgaggagcactgtaagcctcagaccctgcgggagattgtgattggcgtcctgcaccaattgaaaaaccagctttactgaccggttcttggaaacctggagaacagccaacaagaggcccttgaatctctacgtggccactgaactgctgggcccgggagactggactacaacacctcacactggtcagctggtttctacttggtgtttggtttttcccagccccattttatcttcagcggagccgcggtgtttgttttgtgaaagcttctgattaatttattatattgacgataaaactcaaacctacccagccttccccccactccatggaagtccttgggatgggcgtctgctctggacaccccaaagagctcctgccctctcagccctttattcaagcctcagatttctgctcatgatctacatagatttggaaactgttttcctctgttttggtctcttgggcaacatttttggcccaagtttgggcaacatttggcccaagtttgggcattttggcagtagctgtatgggagaaaaagagtaagaggaaatattcccacagccatgaagggtgaaagggcaccttgtgcctagactagggctgcctggtcagtcccaggtgaggccaagggctttctggccatctcagggaggggccaccaggttcctcccctcaccccatattccatcaccttcctcctctgctctgggtggtaagggaagccctcccggttcccacaggctatgatgctgcatggcagaggcaggtataacacagcactacatattggaaattttttatttttctaaataccaatgcagttttgctacggttacaattttgaaatattaactgagcctcaaaatcaccctttctgtcaagcatatcttggcctctcccatgtctcagtgttgcctgcatttctcccaggacttgggggtggggtgaaaagcgtacaaaagatacttaaaagggctcctggggtacacaagcccagcaggtcctgagtgaagccgtgggccctccaaatgctcgttttatagcaacctctctctaccctagttctccaaattcacttctgccttcctcaggtttgatatctggcaggtttgactatccagaggaaattaaatatttttatataaaattaaattataataaatattgccaaatgctttcctttagcattgttccaagtctaaatgttaacctcaagctactgcaatttagacaatgaaatgggctgggtctacccccagccaccagccctcatcctctctacccagtgctctggtttatgcttgtctcctgactgctctgcttaaaggtgaaagtagcaggaacaacaacaaaagccaaccaaaaacaaggtagccagtgcaagacatctcactcttctgacatcctgcagtccccaccagtcctgaccgtgggcccctcaggggtctgggagtgtgacgttgtaatcttcatccgtctctatcccaacttcctcctgtgagacagggagacaagtgaatgagatgtcaccaggataagaccacagggaagcaaagaaggaagagagctccacttacaaagaactgcttcttgctcttggggtatccttcaagtattgcatcagacagctctgtagcctgacaagaaataaaaccacccgttttcagatgggcagcactgggcactgcctgtcagtttatgatattgtgt

SEQ ID NO: 155162 - DNA, 2334 bp, Homo sapiens
  Payload ID: 10501
  Gene Symbol: MLX
  Gene Name: MLX, MAX dimerization protein
  Uniprot ID: Q9UH92
  ENST ID: ENST00000346833
  CDS Start-End: 54-698
cctcgccgcagggggcccgcccgctggcccgtttccggtccggtgggtacaagatgacggagccgggcgcctctcccgaggacccttgggtcaaggtggagtatgcctacagcgacaacagcctggaccccgatgatgaggacagtgattaccaccaggaggcctacaaggagtcctacaaagaccggcggcggcgcgcacacactcaggctgagcagaagaggagggacgccatcaagagaggctatgatgaccttcagaccatcgtccccacttgccagcagcaggacttctccattggctcccaaaagctcagcaaagccatcgttctacaaaagaccattgactacattcagtttttgcacaaggagaagaaaaagcaggaggaggaggtgtccacgttacgcaaggatgtcaccgccctaaagatcatgaaagtgaactatgagcagattgtgaaggcacaccaggacaacccccatgaaggggaggaccaggtctctgaccaggtcaagttcaacgtgtttcaaggcatcatggattccctgttccagtccttcaatgcctccatctcagtggccagcttccaggagctgtcagcgtgtgtcttcagctggatcgaggagcactgtaagcctcagaccctgcgggagattgtgattggcgtcctgcaccaattgaaaaaccagctttactgaccggttcttggaaacctggagaacagccaacaagaggcccttgaatctctacgtggccactgaactgctgggcccgggagactggactacaacacctcacactggtcagctggtttctacttggtgtttggtttttcccagccccattttatcttcagcggagccgcggtgtttgttttgtgaaagcttctgattaatttattatattgacgataaaactcaaacctacccagccttccccccactccatggaagtccttgggatgggcgtctgctctggacaccccaaagagctcctgccctctcagccctttattcaagcctcagatttctgctcatgatctacatagatttggaaactgttttcctctgttttggtctcttgggcaacatttttggcccaagtttgggcaacatttggcccaagtttgggcattttggcagtagctgtatgggagaaaaagagtaagaggaaatattcccacagccatgaagggtgaaagggcaccttgtgcctagactagggctgcctggtcagtcccaggtgaggccaagggctttctggccatctcagggaggggccaccaggttcctcccctcaccccatattccatcaccttcctcctctgctctgggtggtaagggaagccctcccggttcccacaggctatgatgctgcatggcagaggcaggtataacacagcactacatattggaaattttttatttttctaaataccaatgcagttttgctacggttacaattttgaaatattaactgagcctcaaaatcaccctttctgtcaagcatatcttggcctctcccatgtctcagtgttgcctgcatttctcccaggacttgggggtggggtgaaaagcgtacaaaagatacttaaaagggctcctggggtacacaagcccagcaggtcctgagtgaagccgtgggccctccaaatgctcgttttatagcaacctctctctaccctagttctccaaattcacttctgccttcctcaggtttgatatctggcaggtttgactatccagaggaaattaaatatttttatataaaattaaattataataaatattgccaaatgctttcctttagcattgttccaagtctaaatgttaacctcaagctactgcaatttagacaatgaaatgggctgggtctacccccagccaccagccctcatcctctctacccagtgctctggtttatgcttgtctcctgactgctctgcttaaaggtgaaagtagcaggaacaacaacaaaagccaaccaaaaacaaggtagccagtgcaagacatctcactcttctgacatcctgcagtccccaccagtcctgaccgtgggcccctcaggggtctgggagtgtgacgttgtaatcttcatccgtctctatcccaacttcctcctgtgagacagggagacaagtgaatgagatgtcaccaggataagaccacagggaagcaaagaaggaagagagctccacttacaaagaactgcttcttgctcttggggtatccttcaagtattgcatcagacagctctgtagcctgacaagaaataaaaccacccgttttcagatgggcagcactgggcactgcctgtcagtttatgatattgtgt

SEQ ID NO: 155163 - DNA, 2428 bp, Homo sapiens
  Payload ID: 10501
  Gene Symbol: MLX
  Gene Name: MLX, MAX dimerization protein
  Uniprot ID: Q9UH92
  ENST ID: ENST00000435881
  CDS Start-End: 58-792
gcttcctcgccgcagggggcccgcccgctggcccgtttccggtccggtgggtacaagatgacggagccgggcgcctctcccgaggacccttgggtcaaggtggagtatgcctacagcgacaacagcctggaccccgggctttttgtagaaagcacccgcaaggggagtgtagtgtccagagctaatagcatcggttccaccagtgcctcttctgtccccaacacagatgatgaggacagtgattaccaccaggaggcctacaaggagtcctacaaagaccggcggcggcgcgcacacactcaggctgagcagaagaggagggacgccatcaagagaggctatgatgaccttcagaccatcgtccccacttgccagcagcaggacttctccattggctcccaaaagctcagcaaagccatcgttctacaaaagaccattgactacattcagtttttgcacaaggagaagaaaaagcaggaggaggaggtgtccacgttacgcaaggatgtcaccgccctaaagatcatgaaagtgaactatgagcagattgtgaaggcacaccaggacaacccccatgaaggggaggaccaggtctctgaccaggtcaagttcaacgtgtttcaaggcatcatggattccctgttccagtccttcaatgcctccatctcagtggccagcttccaggagctgtcagcgtgtgtcttcagctggatcgaggagcactgtaagcctcagaccctgcgggagattgtgattggcgtcctgcaccaattgaaaaaccagctttactgaccggttcttggaaacctggagaacagccaacaagaggcccttgaatctctacgtggccactgaactgctgggcccgggagactggactacaacacctcacactggtcagctggtttctacttggtgtttggtttttcccagccccattttatcttcagcggagccgcggtgtttgttttgtgaaagcttctgattaatttattatattgacgataaaactcaaacctacccagccttccccccactccatggaagtccttgggatgggcgtctgctctggacaccccaaagagctcctgccctctcagccctttattcaagcctcagatttctgctcatgatctacatagatttggaaactgttttcctctgttttggtctcttgggcaacatttttggcccaagtttgggcaacatttggcccaagtttgggcattttggcagtagctgtatgggagaaaaagagtaagaggaaatattcccacagccatgaagggtgaaagggcaccttgtgcctagactagggctgcctggtcagtcccaggtgaggccaagggctttctggccatctcagggaggggccaccaggttcctcccctcaccccatattccatcaccttcctcctctgctctgggtggtaagggaagccctcccggttcccacaggctatgatgctgcatggcagaggcaggtataacacagcactacatattggaaattttttatttttctaaataccaatgcagttttgctacggttacaattttgaaatattaactgagcctcaaaatcaccctttctgtcaagcatatcttggcctctcccatgtctcagtgttgcctgcatttctcccaggacttgggggtggggtgaaaagcgtacaaaagatacttaaaagggctcctggggtacacaagcccagcaggtcctgagtgaagccgtgggccctccaaatgctcgttttatagcaacctctctctaccctagttctccaaattcacttctgccttcctcaggtttgatatctggcaggtttgactatccagaggaaattaaatatttttatataaaattaaattataataaatattgccaaatgctttcctttagcattgttccaagtctaaatgttaacctcaagctactgcaatttagacaatgaaatgggctgggtctacccccagccaccagccctcatcctctctacccagtgctctggtttatgcttgtctcctgactgctctgcttaaaggtgaaagtagcaggaacaacaacaaaagccaaccaaaaacaaggtagccagtgcaagacatctcactcttctgacatcctgcagtccccaccagtcctgaccgtgggcccctcaggggtctgggagtgtgacgttgtaatcttcatccgtctctatcccaacttcctcctgtgagacagggagacaagtgaatgagatgtcaccaggataagaccacagggaagcaaagaaggaagagagctccacttacaaagaactgcttcttgctcttggggtatccttcaagtattgcatcagacagctctgtagcctgacaagaaataaaaccacccgttttcagatgggcagcactgggcactgcctgtcagtttatgatattgtgt

SEQ ID NO: 155164 - DNA, 796 bp, Homo sapiens
  Payload ID: 10501
  Gene Symbol: MLX
  Gene Name: MLX, MAX dimerization protein
  ENST ID: ENST00000591024
  CDS Start-End: 52-796
tcgccgcagggggcccgcccgctggcccgtttccggtccggtgggtacaagatgacggagccgggcgcctctcccgaggacccttgggtcaaggcaagccccgtgggcgcgcacgccggcgaggggagggcgggtcgggctcgtgcacgtaggggggccggaagacgaggggcttccctcctgtccccaaagtcccccacgctctccgtgccccggggctgcagagaagacagctctcaccccgcgtgtgccaaggtggagtatgcctacagcgacaacagcctggaccccgatgatgaggacagtgattaccaccaggaggcctacaaggagtcctacaaagaccggcggcggcgcgcacacactcaggctgagcagaagaggagggacgccatcaagagaggctatgatgaccttcagaccatcgtccccacttgccagcagcaggacttctccattggctcccaaaagctcagcaaagccatcgttctacaaaagaccattgactacattcagtttttgcacaaggagaagaaaaagcaggaggaggaggtgtccacgttacgcaaggatgtcaccgccctaaagatcatgaaagtgaactatgagcagattgtgaaggcacaccaggacaacccccatgaaggggaggaccaggtctctgaccaggtcaagttcaacgtgtttcaaggcatcatggattccctgttccagtccttcaatgcctccatctcagtggccagcttccaggagctgtcagcgtgtgtcttcagctggatcgaggagcactgtaagc

SEQ ID NO: 155165 - DNA, 867 bp, Homo sapiens
  Payload ID: 10502
  Gene Symbol: MMP24-AS1
  Gene Name: MMP24 antisense RNA 1
  ENST ID: ENST00000424358
  CDS Start-End: 88-303
gtcccttctttccgctccaacgcacggagggtgaggtcggtacgcggtggtggcgtcacggcgccagctcctcccgacgccgagaccatgggggctcagctaagcggcggccgcggcgccccggagcctgcgcaaacccagccccagccccagccccagcctgcggcgccggagggcccggaacagccccggcatccgccccagccccagccccagccccagccccagccccagcccgagcccagcccgtgggggccgctggacgacgtgcgcttcctcatcgcctgcacttcctggtactgacggcgtcctccgcaggatgtcgcccgtctgtccgccgtcccctgtggttcttgcctgccttgtctcctctccccacgtccctgcgtctcttacaccccctcccacccgaggctccccagagatagcagagaattcgaagaggtcgccggggactggaaagaagtcccggcagggccgccttcgcagtctacaccccagcctgcttcccagcctacacccagacccagctcagaccttcgtgaccaccccatccctttctccggctggctgggtcgggggcatccctctctgtcgctggcttccagaggcaggacaggcctcctggtaagcccgcaaagttgctgacctcctgacttcgtctgccttttattaatatctgtattgctgataaccgtgctcttgactatgtgtcccaggtcatgtcccaggtcatggagaagcccgtgccacagtgaccctccccatactcctgggggggctgctctccatcctggatcgtaaggaggcatcatcaggctgtgttcctggaaccccaataaccctgggcccccagggccagcctgt

SEQ ID NO: 155166 - DNA, 1499 bp, Homo sapiens
  Payload ID: 10502
  Gene Symbol: MMP24-AS1
  Gene Name: MMP24 antisense RNA 1
  ENST ID: ENST00000435366
  CDS Start-End: 23-238
gcgggtctggctgcgagagaccatgggggctcagctaagcggcggccgcggcgccccggagcctgcgcaaacccagccccagccccagccccagcctgcggcgccggagggcccggaacagccccggcatccgccccagccccagccccagccccagccccagccccagcccgagcccagcccgtgggggccgctggacgacgtgcgcttcctcatcgcctgcacttcctggtactgacggcgtcctccgcaggatgtcgcccgtctgtccgccgtcccctgtggttcttgcctgccttgtctcctctccccacgtccctgcgtctcttacaccccctcccacccgaggctccccagagatagcagagaattcgaagaggtcgccggggactggaaagaagtcccggcagggccgccttcgcagtctacaccccagcctgcttcccagcctacacccagacccagctcagaccttcgtgaccaccccatccctttctccggctggctgggtcgggggcatccctctctgtcgctggcttccagaggcaggacaggcctcctggtcatgtcccaggtcatggagaagcccgtgccacagtgaccctccccatactcctgggggggctgctctccatcctggatcgtaaggaggcatcatcaggctgtgttcctggaaccccaataaccctgggcccccagggccagcctgttgtagagggaggctatctgaccgccggtctggcagaggagatgggtgggcagctcccagacaccccaaaggacccggttctcttcccagagcgtcctaaggttactcttggaacctgatctttgttccctcatcccagggaaatgacacactctgtatttctgttttatttagaaatgatttaaaaaacattatacaaaggctgatcagtttaaaatgtgactgacactgaaatgctgtgatgtcccccaggctgaggggaagctaggctctggggcccccagtgctttgcccctctgtctgccctgtcctggggtgatggacaaacagatgaccacaggcaggagaatctgagattggaagcctctaggctgagccctctgggcctggccccacatccctcacctctgcagcctgggctgcctgcctccatctcctgttcattctcagctggcctgccaggagccaatggggagcctggcgggaggcgggggtgcctagagctttcaagaagtgagagcaccaacctgaggagtggacagggaccaggaagtgggggaagggaggccaggaagaggtggatacaggagacacttctcatctcatctcagaccctagaggggtccacagatggggacacaagacccagccagcccactggatggcccgggcaagtaacaacctctctgtgcttcatctgagggcacggtgagagttaccgtcggcctcccagggcctaacacgagtttcatgtgagtggacaggtgtgagctaataaagtgctttgcaa

SEQ ID NO: 155167 - DNA, 712 bp, Homo sapiens
  Payload ID: 10502
  Gene Symbol: MMP24-AS1
  Gene Name: MMP24 antisense RNA 1
  ENST ID: ENST00000456790
  CDS Start-End: 125-340
gtcccttctttccgctccaacgcacggagggtgaggtcggtacgcggtggtggcgtcacggcgccagctcctcccgacgccgaggtgggttccgggagacccgcgggtctggctgcgagagaccatgggggctcagctaagcggcggccgcggcgccccggagcctgcgcaaacccagccccagccccagccccagcctgcggcgccggagggcccggaacagccccggcatccgccccagccccagccccagccccagccccagccccagcccgagcccagcccgtgggggccgctggacgacgtgcgcttcctcatcgcctgcacttcctggtactgacggcgtcctccgcaggatgtcgcccgtctgtccgccgtcccctgtggttcttgcctgccttgtctcctctccccacgtccctgcgtctcttacaccccctcccacccgaggctccccagagatagcagagaattcgaagaggtcgccggggactggaaagaagtcccggcagggccgccttcgcagtctacaccccagcctgcttcccagcctacacccagacccagctcagaccttcgtgaccaccccatccctttctccggctggctgggtcgggggcatccctctctgtcgctggcttccagaggcaggacaggcctcctggtaagcccgcaaagttgctgacctcctgacttcgtctgccttttatta

SEQ ID NO: 155168 - DNA, 3165 bp, Homo sapiens
  Payload ID: 10503
  Gene Symbol: MMS19
  Gene Name: MMS19 homolog, cytosolic iron-sulfur assembly component
  Uniprot ID: Q96T76
  ENST ID: ENST00000327238
  CDS Start-End: 1-2799
atggccgctgccgcggctgtggaggcggcggcgcctatgggtgccctatggggcctcgtgcacgacttcgtcgtgggtcagcaagagggccccgctgaccaggtggctgcagatgtgaaatctggcaactatacagtgttacaagttgtggaagcccttgggtcctctctagagaatccagaaccccgaactcgggcacgagcaatccagcttttgtcacaggtgctactccactgtcacaccttgctcctggagaaggaagtggtacacctgatactgttctatgagaaccggctgaaggaccatcatcttgtgatcccatctgtcctgcagggtttgaaggcacttagcctgtgtgtggccctgcccccagggctggctgtttctgtgcttaaagccatcttccaggaagtgcatgtacagtccctgccacaggtggaccgacacacagtctacaatatcatcaccaattttatgcgaacccgggaagaagagctaaagagcctaggagctgacttcacctttggcttcatccaggtgatggatggggaaaaggatccccgtaatcttctggtggccttccgcatcgtccatgacctcatctccagggactatagcctgggaccctttgtggaggagttgtttgaagtgacatcctgttatttccctatcgattttacccctccacctaatgatccccatggtatccagagagaagacctcatcctgagtcttcgcgctgtgctggcttctacaccacgatttgctgagtttctgctgcccctgttgattgagaaagtggattctgaggttctgagtgccaagttggattctctacagactctgaatgcttgctgtgctgtgtatggacagaaggaactgaaggacttcctccccagcctttgggcttctatccgcagagagagcagccagcggcggacaatccttgaaatgctcctgggtttcttgaagctgcagcagaaatggagctatgaagacaaagatcaaaggcctctgaatggcttcaaggaccagctgtgctcactggtattcatggctctaacagaccccagcacccagcttcagcttgttggcatccgtacactgacagtcttgggtgcccagccagatctcctatcttatgaggacttggagctggcagtgggtcacctgtacagactgagcttcctgaaggaggattcccagagttgcagggtggcagcactggaagcatcaggaaccctggctgctctctaccctgtggccttcagcagccacctcgtacccaagctcgctgaggagctgcgtgtaggggagtcaaatttgactaacggagatgagcccacccaatgctcccggcatctgtgctgtctgcaagccttgtcagctgtatcaacacatcccagcatcgtcaaggagacactgcctctgctgctgcagcatctctggcaagtgaacagagggaatatggttgcacaatccagtgacgttattgctgtctgtcagagcctcagacagatggcagaaaaatgtcagcaggaccctgagagttgctggtatttccaccagacagctataccttgcctgcttgccttggctgtgcaggcctctatgccagagaaggagccctcagttctgagaaaagtactattggaggatgaggtgttggctgccatggtgtctgtcattggcactgctacaacccacctgagccctgagttagctgcccagagtgtgacacacattgtgcccctcttcttggatggcaacgtgtcctttctgcctgaaaacagcttcccgagcagattccagccattccaggatggctcctcagggcagaggcggctgattgcactgcttatggcctttgtctgctccctgcctcgaaatgtggaaatccctcagctgaaccaactcatgcgggagcttttggaactgagctgctgccacagctgccccttttcttccaccgctgctgccaagtgctttgcaggactcctcaacaagcaccctgcagggcagcagctggatgaattcctacagctagctgtggacaaagtggaggctggcctgggctctgggccctgtcgtagtcaggccttcactcttcttctctgggtaacaaaggccctagtgctcagataccatcctctcagctcctgccttacagcccggctcatgggcctcctgagtgacccagaattaggtccagcagcagctgatggcttctctctgctcatgtctgactgcactgatgtgctgactcgtgctggccatgccgaagtgcggatcatgttccgccagcggttcttcacagataatgtgcctgctttggtccagggcttccatgctgctccccaagatgtgaagccaaactacttgaagggtctttctcatgtacttaacaggctgcccaagcctgtactcttgccagagctgcccacgcttctttccttgctgctggaggccctgtcctgccctgactgtgtggtgcagctctccaccctcagctgccttcagcctcttctactggaagcaccccaagtcatgagtcttcacgtggacaccctcgtcaccaagtttctgaacctcagctctagcccttccatggctgtccggatcgccgcactgcagtgcatgcatgctctcactcgcctgcccacccctgtgctgctgccgtacaaaccacaggtgattcgggccttagccaaacccctggatgacaagaagagactggtgcgcaaggaagcagtgtcagccagaggggagtggtttctgttggggagccctggcagctgagccctcagtcctggcctagactgttctgacaatctaacctgggattactaactgttgagccatcttccccaaagcagggaaaccactggtctctgactgcctttcccacagacacagcacaaatgctaggcctctgttgcatggctgtacaaagaacataagagtccatatttctagtggatttgtaaaataagtgtgtgtgagacacttgcgtttgaagaaagatctagggtcctgggtctcttgcatttatatgtcagaaaaggggcgatatgctgctgaggggtgagtgcatatgagtgtggccctgaggaccagggctggcagatgttgtctacctgctgaagaataaagatttcttttggt

SEQ ID NO: 155169 - DNA, 3555 bp, Homo sapiens
  Payload ID: 10503
  Gene Symbol: MMS19
  Gene Name: MMS19 homolog, cytosolic iron-sulfur assembly component
  Uniprot ID: Q96T76
  ENST ID: ENST00000355839
  CDS Start-End: 226-3189
aatcgcctccggctgcgtgcccagcagccgccttccctctcggtgccaccgccccatttcaggccccgcccctccctggaactgcctaggcagaagccggcaggcacgtgaccccggcgccccgcccccttgcgcttccccggagattggctcgggaggcgcatgcgcggagagcccgtctcgagccaccgcccatatcccctcccacggtctctagttcgcgttatggccgctgccgcggctgtggaggcggcggcgcctatgggtgccctatggggcctcgtgcacgacttcgtcgtgggtcagcaagagggccccgctgaccaggtggctgcagatgtgaaatctggcaactatacagtgttacaagttgtggaagcccttgggtcctctctagagaatccagaaccccgaactcgggcacgagcaatccagcttttgtcacaggtgctactccactgtcacaccttgctcctggagaaggaagtggtacacctgatactgttctatgagaaccggctgaaggaccatcatcttgtgatcccatctgtcctgcagggtttgaaggcacttagcctgtgtgtggccctgcccccagggctggctgtttctgtgcttaaagccatcttccaggaagtgcatgtacagtccctgccacaggtggaccgacacacagtctacaatatcatcaccaattttatgcgaacccgggaagaaggaccctttgtggaggagttgtttgaagtgacatcctgttatttccctatcgattttacccctccacctaatgatccccatggtatccagagagaagacctcatcctgagtcttcgcgctgtgctggcttctacaccacgatttgctgagtttctgctgcccctgttgattgagaaagtggattctgaggttctgagtgccaagttggattctctacagactctgaatgcttgctgtgctgtgtatggacagaaggaactgaaggacttcctccccagcctttgggcttctatccgcagagaggtgttccagacggcaagtgagcgggtggaggcagagggcctggcggccctccactccctgactgcgtgtttgtctcgctctgtgctgagggctgatgctgaggacctccttgactccttccttagcaacattctacaggactgcaggcaccacctgtgtgaaccggacatgaaactggtgtggcctagtgccaagctgttgcaggcagctgcaggtgcatctgcccgggcctgtgactctgtcaccagcaatgtactgcctttactgctggaacagttccacaagcacagtcagagcagccagcggcggacaatccttgaaatgctcctgggtttcttgaagctgcagcagaaatggagctatgaagacaaagatcaaaggcctctgaatggcttcaaggaccagctgtgctcactggtattcatggctctaacagaccccagcacccagcttcagcttgttggcatccgtacactgacagtcttgggtgcccagccagatctcctatcttatgaggacttggagctggcagtgggtcacctgtacagactgagcttcctgaaggaggattcccagagttgcagggtggcagcactggaagcatcaggaaccctggctgctctctaccctgtggccttcagcagccacctcgtacccaagctcgctgaggagctgcgtgtaggggagtcaaatttgactaacggagatgagcccacccaatgctcccggcatctgtgctgtctgcaagccttgtcagctgtatcaacacatcccagcatcgtcaaggagacactgcctctgctgctgcagcatctctggcaagtgaacagagggaatatggttgcacaatccagtgacgttattgctgtctgtcagagcctcagacagatggcagaaaaatgtcagcaggaccctgagagttgctggtatttccaccagacagctataccttgcctgcttgccttggctgtgcaggcctctatgccagagaaggagccctcagttctgagaaaagtactattggaggatgaggtgttggctgccatggtgtctgtcattggcactgctacaacccacctgagccctgagttagctgcccagagtgtgacacacattgtgcccctcttcttggatggcaacgtgtcctttctgcctgaaaacagcttcccgagcagattccagccattccaggatggctcctcagggcagaggcggctgattgcactgcttatggcctttgtctgctccctgcctcgaaatgtggaaatccctcagctgaaccaactcatgcgggagcttttggaactgagctgctgccacagctgccccttttcttccaccgctgctgccaagtgctttgcaggactcctcaacaagcaccctgcagggcagcagctggatgaattcctacagctagctgtggacaaagtggaggctggcctgggctctgggccctgtcgtagtcaggccttcactcttcttctctgggtaacaaaggccctagtgctcagataccatcctctcagctcctgccttacagcccggctcatgggcctcctgagtgacccagaattaggtccagcagcagctgatggcttctctctgctcatgtctgactgcactgatgtgctgactcgtgctggccatgccgaagtgcggatcatgttccgccagcggttcttcacagataatgtgcctgctttggtccagggcttccatgctgctccccaagatgtgaagccaaactacttgaagggtctttctcatgtacttaacaggctgcccaagcctgtactcttgccagagctgcccacgcttctttccttgctgctggaggccctgtcctgccctgactgtgtggtgcagctctccaccctcagctgccttcagcctcttctactggaagcaccccaagtcatgagtcttcacgtggacaccctcgtcaccaagtttctgaacctcagctctagcccttccatggctgtccggatcgccgcactgcagtgcatgcatgctctcactcgcctgcccacccctgtgctgctgccgtacaaaccacaggtgattcgggccttagccaaacccctggatgacaagaagagactggtgcgcaaggaagcagtgtcagccagaggggagtggtttctgttggggagccctggcagctgagccctcagtcctggcctagactgttctgacaatctaacctgggattactaactgttgagccatcttccccaaagcagggaaaccactggtctctgactgcctttcccacagacacagcacaaatgctaggcctctgttgcatggctgtacaaagaacataagagtccatatttctagtggatttgtaaaataagtgtgtgtgagacacttgcgtttgaagaaagatctagggtcctgggtctcttgcatttatatgtcagaaaaggggcgatatgctgctgaggggtgagtgcatatgagtgtggccctgaggaccagggctggcagatgttgtctacctgctgaagaataaagatttcttttggt

SEQ ID NO: 155170 - DNA, 3532 bp, Homo sapiens
  Payload ID: 10503
  Gene Symbol: MMS19
  Gene Name: MMS19 homolog, cytosolic iron-sulfur assembly component
  Uniprot ID: Q96T76
  ENST ID: ENST00000370782
  CDS Start-End: 72-3164
gcatgtgaccgacagcaccgccccctagggctgggcctgattttctcattggcttcccccgtgttcgcgttatggccgctgccgcggctgtggaggcggcggcgcctatgggtgccctatggggcctcgtgcacgacttcgtcgtgggtcagcaagagggccccgctgaccaggtggctgcagatgtgaaatctggcaactatacagtgttacaagttgtggaagcccttgggtcctctctagagaatccagaaccccgaactcgggcacgagcaatccagcttttgtcacaggtgctactccactgtcacaccttgctcctggagaaggaagtggtacacctgatactgttctatgagaaccggctgaaggaccatcatcttgtgatcccatctgtcctgcagggtttgaaggcacttagcctgtgtgtggccctgcccccagggctggctgtttctgtgcttaaagccatcttccaggaagtgcatgtacagtccctgccacaggtggaccgacacacagtctacaatatcatcaccaattttatgcgaacccgggaagaagagctaaagagcctaggagctgacttcacctttggcttcatccaggtgatggatggggaaaaggatccccgtaatcttctggtggccttccgcatcgtccatgacctcatctccagggactatagcctgggaccctttgtggaggagttgtttgaagtgacatcctgttatttccctatcgattttacccctccacctaatgatccccatggtatccagagagaagacctcatcctgagtcttcgcgctgtgctggcttctacaccacgatttgctgagtttctgctgcccctgttgattgagaaagtggattctgaggttctgagtgccaagttggattctctacagactctgaatgcttgctgtgctgtgtatggacagaaggaactgaaggacttcctccccagcctttgggcttctatccgcagagaggtgttccagacggcaagtgagcgggtggaggcagagggcctggcggccctccactccctgactgcgtgtttgtctcgctctgtgctgagggctgatgctgaggacctccttgactccttccttagcaacattctacaggactgcaggcaccacctgtgtgaaccggacatgaaactggtgtggcctagtgccaagctgttgcaggcagctgcaggtgcatctgcccgggcctgtgactctgtcaccagcaatgtactgcctttactgctggaacagttccacaagcacagtcagagcagccagcggcggacaatccttgaaatgctcctgggtttcttgaagctgcagcagaaatggagctatgaagacaaagatcaaaggcctctgaatggcttcaaggaccagctgtgctcactggtattcatggctctaacagaccccagcacccagcttcagcttgttggcatccgtacactgacagtcttgggtgcccagccagatctcctatcttatgaggacttggagctggcagtgggtcacctgtacagactgagcttcctgaaggaggattcccagagttgcagggtggcagcactggaagcatcaggaaccctggctgctctctaccctgtggccttcagcagccacctcgtacccaagctcgctgaggagctgcgtgtaggggagtcaaatttgactaacggagatgagcccacccaatgctcccggcatctgtgctgtctgcaagccttgtcagctgtatcaacacatcccagcatcgtcaaggagacactgcctctgctgctgcagcatctctggcaagtgaacagagggaatatggttgcacaatccagtgacgttattgctgtctgtcagagcctcagacagatggcagaaaaatgtcagcaggaccctgagagttgctggtatttccaccagacagctataccttgcctgcttgccttggctgtgcaggcctctatgccagagaaggagccctcagttctgagaaaagtactattggaggatgaggtgttggctgccatggtgtctgtcattggcactgctacaacccacctgagccctgagttagctgcccagagtgtgacacacattgtgcccctcttcttggatggcaacgtgtcctttctgcctgaaaacagcttcccgagcagattccagccattccaggatggctcctcagggcagaggcggctgattgcactgcttatggcctttgtctgctccctgcctcgaaatgtggaaatccctcagctgaaccaactcatgcgggagcttttggaactgagctgctgccacagctgccccttttcttccaccgctgctgccaagtgctttgcaggactcctcaacaagcaccctgcagggcagcagctggatgaattcctacagctagctgtggacaaagtggaggctggcctgggctctgggccctgtcgtagtcaggccttcactcttcttctctgggtaacaaaggccctagtgctcagataccatcctctcagctcctgccttacagcccggctcatgggcctcctgagtgacccagaattaggtccagcagcagctgatggcttctctctgctcatgtctgactgcactgatgtgctgactcgtgctggccatgccgaagtgcggatcatgttccgccagcggttcttcacagataatgtgcctgctttggtccagggcttccatgctgctccccaagatgtgaagccaaactacttgaagggtctttctcatgtacttaacaggctgcccaagcctgtactcttgccagagctgcccacgcttctttccttgctgctggaggccctgtcctgccctgactgtgtggtgcagctctccaccctcagctgccttcagcctcttctactggaagcaccccaagtcatgagtcttcacgtggacaccctcgtcaccaagtttctgaacctcagctctagcccttccatggctgtccggatcgccgcactgcagtgcatgcatgctctcactcgcctgcccacccctgtgctgctgccgtacaaaccacaggtgattcgggccttagccaaacccctggatgacaagaagagactggtgcgcaaggaagcagtgtcagccagaggggagtggtttctgttggggagccctggcagctgagccctcagtcctggcctagactgttctgacaatctaacctgggattactaactgttgagccatcttccccaaagcagggaaaccactggtctctgactgcctttcccacagacacagcacaaatgctaggcctctgttgcatggctgtacaaagaacataagagtccatatttctagtggatttgtaaaataagtgtgtgtgagacacttgcgtttgaagaaagatctagggtcctgggtctcttgcatttatatgtcagaaaaggggcgatatgctgctgaggggtgagtgcatatgagtgtggccctgaggaccagggctggcagatgttgtctacctgctgaagaataaagatttcttttggtaa

SEQ ID NO: 155171 - DNA, 877 bp, Homo sapiens
  Payload ID: 10503
  Gene Symbol: MMS19
  Gene Name: MMS19 homolog, cytosolic iron-sulfur assembly component
  ENST ID: ENST00000422685
  CDS Start-End: 46-877
tcgagccaccgcccatatcccctcccacggtctctagttcgcgttatggccgctgccgcggctgtggaggcggcggcgcctatgggtgccctatggggcctcgtgcacgacttcgtcgtgggtcagcaagagggccccgctgaccaggtggctgcagatgtgaaatctggcaactatacagtgttacaagttgtggaagcccttgggtcctctctagagaatccagaaccccgaactcgggcacgagcaatccagcttttgtcacaggtgctactccactgtcacaccttgctcctggagaaggaaggagcagagagtttaataggcaagaaggaagggaggaggaagaagctcccctgtacagagacagagcggggctccaaagccaagagagggaactccgcctgccacagataccagctagtggtacacctgatactgttctatgagaaccggctgaaggaccatcatcttgtgatcccatctgtcctgcagggtttgaaggcacttagcctgtgtgtggccctgcccccagggctggctgtttctgtgcttaaagccatcttccaggaagtgcatgtacagtccctgccacaggtggaccgacacacagtctacaatatcatcaccaattttatgcgaacccgggaagaagagctaaagagcctaggagctgacttcacctttggcttcatccaggtgatggatggggaaaaggatccccgtaatcttctggtggccttccgcatcgtccatgacctcatctccagggactatagcctgggaccctttgtggaggagttgtttgaagtgacatcctgttatttccctatcgattttacccctccacctaatgatccccatggtatccagagag

SEQ ID NO: 155172 - DNA, 776 bp, Homo sapiens
  Payload ID: 10503
  Gene Symbol: MMS19
  Gene Name: MMS19 homolog, cytosolic iron-sulfur assembly component
  ENST ID: ENST00000448660
  CDS Start-End: 52-348
tcgagccaccgcccatatcccctcccacggtctctagttcgcgttatggccgctgccgcggctgtggaggcggcggcgcctatgggtgccctatggggcctcgtgcacgacttcgtcgtgggtcagcaagagggccccgctgaccaggtggctgcagatgtgaaatctggcaactatacagtgttacaagttgtggaagcccttgggtcctctctagagaatccagaaccccgaactcgggcacgagcaatccagcttttgtcacaggtgctactccactgtcacaccttgctcctggagaaggaaggtactggtgtcactaataggaatgtcttcctggattgctgagcccagtggtacacctgatactgttctatgagaaccggctgaaggaccatcatcttgtgatcccatctgtcctgcagggtttgaaggcacttagcctgtgtgtggccctgcccccagggctggctgtttctgtgcttaaagccatcttccaggaagtgcatgtacagtccctgccacaggtggaccgacacacagtctacaatatcatcaccaattttatgcgaacccgggaagaagagctaaagagcctaggagctgacttcacctttggcttcatccaggtgatggatggggaaaaggatccccgtaatcttctggtggccttccgcatcgtccatgacctcatctccagggactatagcctgggaccctttgtggaggagttgtttgaagtgacatcctgttatttccctatcgattttacccct

SEQ ID NO: 155173 - DNA, 3401 bp, Homo sapiens
  Payload ID: 10503
  Gene Symbol: MMS19
  Gene Name: MMS19 homolog, cytosolic iron-sulfur assembly component
  Uniprot ID: Q96T76
  ENST ID: ENST00000415383
  CDS Start-End: 5-127
cgttatggccgctgccgcggctgtggaggcggcggcgcctatgggtgccctatggggcctcgtgcacgacttcgtcgtgggtcagcaagagggccccgctgaccaggtggctgcaggtcctctctagagaatccagaaccccgaactcgggcacgagcaatccagcttttgtcacaggtgctactccactgtcacaccttgctcctggagaaggaagtggtacacctgatactgttctatgagaaccggctgaaggaccatcatcttgtgatcccatctgtcctgcagggtttgaaggcacttagcctgtgtgtggccctgcccccagggctggctgtttctgtgcttaaagccatcttccaggaagtgcatgtacaggtggaccgacacacagtctacaatatcatcaccaattttatgcgaacccgggaagaagagctaaagagcctaggagctgacttcacctttggcttcatccaggtgatggatggggaaaaggatccccgtaatcttctggtggccttccgcatcgtccatgacctcatctccagggactatagcctgggaccctttgtggaggagttgtttgaagtgacatcctgttatttccctatcgattttacccctccacctaatgatccccatggtatccagagagaagacctcatcctgagtcttcgcgctgtgctggcttctacaccacgatttgctgagtttctgctgcccctgttgattgagaaagtggattctgaggttctgagtgccaagttggattctctacagactctgaatgcttgctgtgctgtgtatggacagaaggaactgaaggacttcctccccagcctttgggcttctatccgcagagaggtgttccagacggcaagtgagcgggtggaggcagagggcctggcggccctccactccctgactgcgtgtttgtctcgctctgtgctgagggctgatgctgaggacctccttgactccttccttagcaacattctacaggactgcaggcaccacctgtgtgaaccggacatgaaactggtgtggcctagtgccaagctgttgcaggcagctgcaggtgcatctgcccgggcctgtgactctgtcaccagcaatgtactgcctttactgctggaacagttccacaagcacagtcagagcagccagcggcggacaatccttgaaatgctcctgggtttcttgaagctgcagcagaaatggagctatgaagacaaagatcaaaggcctctgaatggcttcaaggaccagctgtgctcactggtattcatggctctaacagaccccagcacccagcttcagcttgttggcatccgtacactgacagtcttgggtgcccagccagatctcctatcttatgaggacttggagctggcagtgggtcacctgtacagactgagcttcctgaaggaggattcccagagttgggtggcagcactggaagcatcaggaaccctggctgctctctaccctgtggccttcagcagccacctcgtacccaagctcgctgaggagctgcgtgtaggggagtcaaatttgactaacggagatgagcccacccaatgctcccggcatctgtgctgtctgcaagccttgtcagctgtatcaacacatcccagcatcgtcaaggagacactgcctctgctgctgcagcatctctggcaagtgaacagagggaatatggttgcacaatccagtgacgttattgctgtctgtcagagcctcagacagatggcagaaaaatgtcagcaggaccctgagagttgctggtatttccaccagacagctataccttgcctgcttgccttggctgtgcaggcctctatgccagagaaggagccctcagttctgagaaaagtactattggaggatgaggtgttggctgccatggtgtctgtcattggcactgctacaacccacctgagccctgagttagctgcccagagtgtgacacacattgtgcccctcttcttggatggcaacgtgtcctttctgcctgaaaacagcttcccgagcagattccagccattccaggatggctcctcagggcagaggcggctgattgcactgcttatggcctttgtctgctccctgcctcgaaatgtggaaatccctcagctgaaccaactcatgcgggagcttttggaactgagctgctgccacagctgccccttttcttccaccgctgctgccaagtgctttgcaggactcctcaacaagcaccctgcagggcagcagctggatgaattcctacagctagctgtggacaaagtggaggctggcctgggctctgggccctgtcgtagtcaggccttcactcttcttctctgggtaacaaaggccctagtgctcagataccatcctctcagctcctgccttacagcccggctcatgggcctcctgagtgacccagaattaggtccagcagcagctgatggcttctctctgctcatgtctgactgcactgatgtgctgactcgtgctggccatgccgaagtgcggatcatgttccgccagcggttcttcacagataatgtgcctgctttggtccagggcttccatgctgctccccaagatgtgaagccaaactacttgaagggtctttctcatgtacttaacaggctgcccaagcctgtactcttgccagagctgcccacgcttctttccttgctgctggaggccctgtcctgccctgactgtgtggtgcagctctccaccctcagctgccttcagcctcttctactggaagcaccccaagtcatgagtcttcacgtggacaccctcgtcaccaagtttctgaacctcagctctagcccttccatggctgtccggatcgccgcactgcagtgcatgcatgctctcactcgcctgcccacccctgtgctgctgccgtacaaaccacaggtgattcgggccttagccaaacccctggatgacaagaagagactggtgcgcaaggaagcagtgtcagccagaggggagtggtttctgttggggagccctggcagctgagccctcagtcctggcctagactgttctgacaatctaacctgggattactaactgttgagccatcttccccaaagcagggaaaccactggtctctgactgcctttcccacagacacagcacaaatgctaggcctctgttgcatggctgtacaaagaacataagagtccatatttctagtggatttgtaaaataagtgtgtgtgagacacttgcgtttgaagaaagatctagggtcctgggtctcttgcatttatatgtcagaaaaggggcgatatgctgctgaggggtgagtgcatatgagtgtggccctgaggaccagggctggcagatgttgtctacctgctgaagaataaagatttcttttggtaa

SEQ ID NO: 155174 - DNA, 609 bp, Homo sapiens
  Payload ID: 10503
  Gene Symbol: MMS19
  Gene Name: MMS19 homolog, cytosolic iron-sulfur assembly component
  ENST ID: ENST00000439048
  CDS Start-End: 16-537
tctctagttcgcgttatggccgctgccgcggctgtggaggcggcggcgcctatgggtgccctatggggcctcgtgcacgacttcgtcgtgggtcagcaagagggccccgctgaccaggtggctgcagatgtgaaatctggcaactatacagtgttacaagttgtggaagcccttgggtcctctctagagaatccagaaccccgaactcgggcacgagcaatccagcttttgtcacaggtgctactccactgtcacaccttgctcctggagaaggaagtggtacacctgatactgttctatgagaaccggctgaaggaccatcatcttgtgatcccatctgtcctgcagggtttgaaggcacttagcctgtgtgtggccctgcccccagggctggctgtttctgtgcttaaagccatcttccaggaagtgcatgtacagtccctgccacaggtggaccgacacacagtctacaatatcatcaccaattttatgcgaacccgggaagaaggtgatggatggggaaaaggatccccgtaatcttctggtggccttccgcatcgtccatgacctcatctccagggactatagcctgggaccctttgtggagga

SEQ ID NO: 155175 - DNA, 882 bp, Homo sapiens
  Payload ID: 10503
  Gene Symbol: MMS19
  Gene Name: MMS19 homolog, cytosolic iron-sulfur assembly component
  ENST ID: ENST00000434392
  CDS Start-End: 1-450
ctacagactctgaatgcttgctgtgctgtgtatggacagaaggaactgaaggacttcctccccagcctttgggcttctatccgcagagaggtgttccagacggcaagtgagcgggtggaggcagagggcctggcggccctccactccctgactgcgtgtttgtctcgctctgtgctgagggctgatgctgaggacctccttgactccttccttagcaacattctacaggactgcaggcaccacctgtgtgaaccggacatgaaactggtgtggcctagtgccaagctgttgcaggcagctgcaggtgcatctgcccgggcctgtgactctgtcaccagcaatgtactgcctttactgctggaacagttccacaagcacagtcagtaccccttgaaacgttacagagcagccagcggcggacaatccttgaaatgctcctgggtttcttgaagctgcagcagaaatggagctatgaagacaaagatcaaaggcctctgaatggcttcaaggaccagctgtgctcactggtattcatggctctaacagaccccagcacccagcttcagcttgttggcatccgtacactgacagtcttgggtgcccagccagatctcctatcttatgaggacttggagctggcagtgggtcacctgtacagactgagcttcctgaaggaggattcccagagttgcagggtggcagcactggaagcatcaggaaccctggctgctctctaccctgtggccttcagcagccacctcgtacccaagctcgctgaggagctgcgtgtaggggagtcaaatttgactaacggagatgagcccacccaatgctcccggcatctgtgctgtctgcaagccttgtcagctgtatcaacacatc

SEQ ID NO: 155176 - DNA, 933 bp, Homo sapiens
  Payload ID: 10503
  Gene Symbol: MMS19
  Gene Name: MMS19 homolog, cytosolic iron-sulfur assembly component
  ENST ID: ENST00000437002
  CDS Start-End: 27-933
ccctcccacggtctctagttcgcgttatggccgctgccgcggctgtggaggcggcggcgcctatgggtgccctatggggcctcgtgcacgacttcgtcgtgggtcagcaagagggccccgctgaccaggtggctgcagatgtgaaatctggcaactatacagtgttacaagttgtggaagcccttgggtcctctctagagaatccagaaccccgaactcgggcacgagcaatccagcttttgtcacaggtgctactccactgtcacaccttgctcctggagaaggaagtggtacacctgatactgttctatgagaaccggctgaaggaccatcatcttgtgatcccatctgtcctgcagggtttgaaggcacttagcctgtgtgtggccctgcccccagggctggctgtttctgtgcttaaagccatcttccaggaagtgcatgtacagtccctgccacaggtggaccgacacacagtctacaatatcatcaccaattttatgcgaacccgggaagaagagctaaagagcctaggagctgacttcacctttggcttcatccaggtgatggatggggaaaaggatccccgtaatcttctggtggccttccgcatcgtccatgacctcatctccagggactatagcctgggaccctttgtggaggagttgtttgaagtgacatcctgttatttccctatcgattttacccctagagaagacctcatcctgagtcttcgcgctgtgctggcttctacaccacgatttgctgagtttctgctgcccctgttgattgagaaagtggattctgaggttctgagtgccaagttggattctctacagactctgaatgcttgctgtgctgtgtatggacagaaggaactgaaggacttcctccccagcctttgggcttctatccgcagagaggtgttccaga

SEQ ID NO: 155177 - DNA, 2164 bp, Homo sapiens
  Payload ID: 10503
  Gene Symbol: MMS19
  Gene Name: MMS19 homolog, cytosolic iron-sulfur assembly component
  ENST ID: ENST00000434538
  CDS Start-End: 1-1796
aatggagctatgaagacaaagatcaaaggcctctgaatggcttcaaggaccagctgtgctcactggtattcatggctctaacagaccccagcacccagcttcagcttgttggcatccgtacactgacagtcttgggtgcccagccagatctcctatcttatgaggacttggagctggcagtgggtcacctgtacagactgagcttcctgaaggaggattcccagagttgcagggtggcagcactggaagcatcaggaaccctggctgctctctaccctgtggccttcagcagccacctcgtacccaagctcgctgaggagctgcgtgtaggggagtcaaatttgactaacggagatgagcccacccaatgctcccggcatctgtgctgtctgcaagccttgtcagctgtatcaacacatcccagcatcgtcaaggagacactgcctctgctgctgcagcatctctggcaagtgaacagagggaatatggttgcacaatccagtgacgttattgctgtctgtcagagcctcagacagatggcagaaaaatgtcagcaggaccctgagagttgctggtatttccaccagacagctataccttgcctgcttgccttggctgtgcaggcctctatgccagagaaggagccctcagttctgagaaaagtactattggaggatgaggtgttggctgccatggtgtctgtcattggcactgctacaacccacctgagccctgagttagctgcccagagtgtgacacacattgtgcccctcttcttggatggcaacgtgtcctttctgcctgaaaacagcttcccgagcagattccagccattccaggatggctcctcagggcagaggcggctgattgcactgcttatggcctttgtctgctccctgcctcgaaatgtggaaatccctcagctgaaccaactcatgcgggagcttttggaactgagctgctgccacagctgccccttttcttccaccgctgctgccaagtgctttgcaggactcctcaacaagcaccctgcagggcagcagctggatgaattcctacagctagctgtggacaaagtggaggctggcctgggctctgggccctgtcgtagtcaggccttcactcttcttctctgggtaacaaaggccctagtgctcagataccatcctctcagctcctgccttacagcccggctcatgggcctcctgagtgacccagaattaggtccagcagcagctgatggcttctctctgctcatgtctgactgcactgatgtgctgactcgtgctggccatgccgaagtgcggatcatgttccgccagcggttcttcacagataatgtgcctgctttggtccagggcttccatgctgctccccaagatgtgaagccaaactacttgaagggtctttctcatgtacttaacaggctgcccaagcctgtactcttgccagagctgcccacggccctgtcctgccctgactgtgtggtgcagctctccaccctcagctgccttcagcctcttctactggaagcaccccaagtcatgagtcttcacgtggacaccctcgtcaccaagtttctgaacctcagctctagcccttccatggctgtccggatcgccgcactgcagtgcatgcatgctctcactcgcctgcccacccctgtgctgctgccgtacaaaccacaggtgattcgggccttagccaaacccctggatgacaagaagagactggtgcgcaaggaagcagtgtcagccagaggggagtggtttctgttggggagccctggcagctgagccctcagtcctggcctagactgttctgacaatctaacctgggattactaactgttgagccatcttccccaaagcagggaaaccactggtctctgactgcctttcccacagacacagcacaaatgctaggcctctgttgcatggctgtacaaagaacataagagtccatatttctagtggatttgtaaaataagtgtgtgtgagacacttgcgtttgaagaaagatctagggtcctgggtctcttgcatttatatgtcagaaaaggggcgatatgctgctgaggggtgagtgcatatgagtgtggccctgaggaccagggctggcagatgttgtctacctgctgaagaataaagatttcttttggtaa

SEQ ID NO: 155178 - DNA, 3797 bp, Homo sapiens
  Payload ID: 10503
  Gene Symbol: MMS19
  Gene Name: MMS19 homolog, cytosolic iron-sulfur assembly component
  Uniprot ID: Q96T76
  ENST ID: ENST00000438925
  CDS Start-End: 337-3429
gattttctcattggcttcccccgtggtgcgtaccgcccctctccccacccagccaggtgcccgccccgcagcccgtctcccggggagccgggctgggaattattcgccctcaatcgcctccggctgcgtgcccagcagccgccttccctctcggtgccaccgccccatttcaggccccgcccctccctggaactgcctaggcagaagccggcaggcacgtgaccccggcgccccgcccccttgcgcttccccggagattggctcgggaggcgcatgcgcggagagcccgtctcgagccaccgcccatatcccctcccacggtctctagttcgcgttatggccgctgccgcggctgtggaggcggcggcgcctatgggtgccctatggggcctcgtgcacgacttcgtcgtgggtcagcaagagggccccgctgaccaggtggctgcagatgtgaaatctggcaactatacagtgttacaagttgtggaagcccttgggtcctctctagagaatccagaaccccgaactcgggcacgagcaatccagcttttgtcacaggtgctactccactgtcacaccttgctcctggagaaggaagtggtacacctgatactgttctatgagaaccggctgaaggaccatcatcttgtgatcccatctgtcctgcagggtttgaaggcacttagcctgtgtgtggccctgcccccagggctggctgtttctgtgcttaaagccatcttccaggaagtgcatgtacagtccctgccacaggtggaccgacacacagtctacaatatcatcaccaattttatgcgaacccgggaagaagagctaaagagcctaggagctgacttcacctttggcttcatccaggtgatggatggggaaaaggatccccgtaatcttctggtggccttccgcatcgtccatgacctcatctccagggactatagcctgggaccctttgtggaggagttgtttgaagtgacatcctgttatttccctatcgattttacccctccacctaatgatccccatggtatccagagagaagacctcatcctgagtcttcgcgctgtgctggcttctacaccacgatttgctgagtttctgctgcccctgttgattgagaaagtggattctgaggttctgagtgccaagttggattctctacagactctgaatgcttgctgtgctgtgtatggacagaaggaactgaaggacttcctccccagcctttgggcttctatccgcagagaggtgttccagacggcaagtgagcgggtggaggcagagggcctggcggccctccactccctgactgcgtgtttgtctcgctctgtgctgagggctgatgctgaggacctccttgactccttccttagcaacattctacaggactgcaggcaccacctgtgtgaaccggacatgaaactggtgtggcctagtgccaagctgttgcaggcagctgcaggtgcatctgcccgggcctgtgactctgtcaccagcaatgtactgcctttactgctggaacagttccacaagcacagtcagagcagccagcggcggacaatccttgaaatgctcctgggtttcttgaagctgcagcagaaatggagctatgaagacaaagatcaaaggcctctgaatggcttcaaggaccagctgtgctcactggtattcatggctctaacagaccccagcacccagcttcagcttgttggcatccgtacactgacagtcttgggtgcccagccagatctcctatcttatgaggacttggagctggcagtgggtcacctgtacagactgagcttcctgaaggaggattcccagagttgcagggtggcagcactggaagcatcaggaaccctggctgctctctaccctgtggccttcagcagccacctcgtacccaagctcgctgaggagctgcgtgtaggggagtcaaatttgactaacggagatgagcccacccaatgctcccggcatctgtgctgtctgcaagccttgtcagctgtatcaacacatcccagcatcgtcaaggagacactgcctctgctgctgcagcatctctggcaagtgaacagagggaatatggttgcacaatccagtgacgttattgctgtctgtcagagcctcagacagatggcagaaaaatgtcagcaggaccctgagagttgctggtatttccaccagacagctataccttgcctgcttgccttggctgtgcaggcctctatgccagagaaggagccctcagttctgagaaaagtactattggaggatgaggtgttggctgccatggtgtctgtcattggcactgctacaacccacctgagccctgagttagctgcccagagtgtgacacacattgtgcccctcttcttggatggcaacgtgtcctttctgcctgaaaacagcttcccgagcagattccagccattccaggatggctcctcagggcagaggcggctgattgcactgcttatggcctttgtctgctccctgcctcgaaatgtggaaatccctcagctgaaccaactcatgcgggagcttttggaactgagctgctgccacagctgccccttttcttccaccgctgctgccaagtgctttgcaggactcctcaacaagcaccctgcagggcagcagctggatgaattcctacagctagctgtggacaaagtggaggctggcctgggctctgggccctgtcgtagtcaggccttcactcttcttctctgggtaacaaaggccctagtgctcagataccatcctctcagctcctgccttacagcccggctcatgggcctcctgagtgacccagaattaggtccagcagcagctgatggcttctctctgctcatgtctgactgcactgatgtgctgactcgtgctggccatgccgaagtgcggatcatgttccgccagcggttcttcacagataatgtgcctgctttggtccagggcttccatgctgctccccaagatgtgaagccaaactacttgaagggtctttctcatgtacttaacaggctgcccaagcctgtactcttgccagagctgcccacgcttctttccttgctgctggaggccctgtcctgccctgactgtgtggtgcagctctccaccctcagctgccttcagcctcttctactggaagcaccccaagtcatgagtcttcacgtggacaccctcgtcaccaagtttctgaacctcagctctagcccttccatggctgtccggatcgccgcactgcagtgcatgcatgctctcactcgcctgcccacccctgtgctgctgccgtacaaaccacaggtgattcgggccttagccaaacccctggatgacaagaagagactggtgcgcaaggaagcagtgtcagccagaggggagtggtttctgttggggagccctggcagctgagccctcagtcctggcctagactgttctgacaatctaacctgggattactaactgttgagccatcttccccaaagcagggaaaccactggtctctgactgcctttcccacagacacagcacaaatgctaggcctctgttgcatggctgtacaaagaacataagagtccatatttctagtggatttgtaaaataagtgtgtgtgagacacttgcgtttgaagaaagatctagggtcctgggtctcttgcatttatatgtcagaaaaggggcgatatgctgctgaggggtgagtgcatatgagtgtggccctgaggaccagggctggcagatgttgtctacctgctgaagaataaagatttcttttggtaa

SEQ ID NO: 155179 - DNA, 916 bp, Homo sapiens
  Payload ID: 10503
  Gene Symbol: MMS19
  Gene Name: MMS19 homolog, cytosolic iron-sulfur assembly component
  Uniprot ID: Q96T76
  ENST ID: ENST00000441194
  CDS Start-End: 49-171
gtctcgagccaccgcccatatcccctcccacggtctctagttcgcgttatggccgctgccgcggctgtggaggcggcggcgcctatgggtgccctatggggcctcgtgcacgacttcgtcgtgggtcagcaagagggccccgctgaccaggtggctgcaggtcctctctagagaatccagaaccccgaactcgggcacgagcaatccagcttttgtcacaggtgctactccactgtcacaccttgctcctggagaaggaagtggtacacctgatactgttctatgagaaccggctgaaggaccatcatcttgtgatcccatctgtcctgcagggtttgaaggcacttagcctgtgtgtggccctgcccccagggctggctgtttctgtgcttaaagccatcttccaggaagtgcatgtacagtccctgccacaggtggaccgacacacagtctacaatatcatcaccaattttatgcgaacccgggaagaagagctaaagagcctaggagctgacttcacctttggcttcatccaggtgatggatggggaaaaggatccccgtaatcttctggtggccttccgcatcgtccatgacctcatctccagggactatagcctgggaccctttgtggaggagttgtttgaagtgacatcctgttatttccctatcgattttacccctccacctaatgatccccatggtatccagagagaagacctcatcctgagtcttcgcgctgtgctggcttctacaccacgatttgctgagtttctgctgcccctgttgattgagaaagtggattctgaggttctgagtgccaagttggattctctacagactctgaatgcttgctgtgctgtgtatggacagaaggaactgaaggacttcctccccagcctttgggcttctatccg

SEQ ID NO: 155180 - DNA, 640 bp, Homo sapiens
  Payload ID: 10503
  Gene Symbol: MMS19
  Gene Name: MMS19 homolog, cytosolic iron-sulfur assembly component
  ENST ID: ENST00000444411
  CDS Start-End: 1-272
atgtgaagccaaactacttgaagggtctttctcatgtacttaacaggctgcccaagcctgtactcttgccagagctgcccacggctgtccggatcgccgcactgcagtgcatgcatgctctcactcgcctgcccacccctgtgctgctgccgtacaaaccacaggtgattcgggccttagccaaacccctggatgacaagaagagactggtgcgcaaggaagcagtgtcagccagaggggagtggtttctgttggggagccctggcagctgagccctcagtcctggcctagactgttctgacaatctaacctgggattactaactgttgagccatcttccccaaagcagggaaaccactggtctctgactgcctttcccacagacacagcacaaatgctaggcctctgttgcatggctgtacaaagaacataagagtccatatttctagtggatttgtaaaataagtgtgtgtgagacacttgcgtttgaagaaagatctagggtcctgggtctcttgcatttatatgtcagaaaaggggcgatatgctgctgaggggtgagtgcatatgagtgtggccctgaggaccagggctggcagatgttgtctacctgctgaagaataaagatttcttttggtaa

SEQ ID NO: 155181 - DNA, 8643 bp, Homo sapiens
  Payload ID: 10504
  Gene Symbol: MMS22L
  Gene Name: MMS22-like, DNA repair protein
  Uniprot ID: Q6ZRQ5
  ENST ID: ENST00000275053
  CDS Start-End: 267-3998
gtttgcggtttagaccccaaagattcctgttggtggtctgggtcacaggaggcaggtttcgggagctggaaatgtgagcgggtacgacaggcaccgcgggtaaccgacgccccgggtccttgctgcagccgggtacgcgggataccggcaccccgccttctccgcccgagtgctgccaggcgtgggcctggaatctcttcacaccttctctttggagcccttaatgatacgacgaaccccaagtgtttcagaacatgaagtaaacaatggagaactgttctgctgcatcgacgttcctgactgacagcttagagctggagctggggacggaatggtgcaaacctccttacttttcttgtgctgttgacaacagaggaggaggaaaacatttttctggagaatcctacctctgcagcggagcccttaagcgattgattttgaatcttgaccctttaccaactaattttgaagaagataccttggaaatatttggcattcagtgggttactgaaacagcattagtgaattcatctagagaactctttcatttattcaggcaacaactgtacaacttggaaaccttgttacagtccagttgtgattttgggaaggtatcaactctacactgcaaagcagacaatattaggcagcagtgtgtactatttctccattatgttaaagttttcatcttcaggtatctgaaagtacagaatgctgagagtcatgttcctgtccatccttatgaggctttggaggctcagcttccctcagtgttgattgatgagcttcatggattactcttgtatattggacacctatctgaacttcccagtgttaatataggagcatttgtaaatcaaaaccagattaagctttttccaccgtcatggcatttattacatctccacttggatatacattggctggtgctagaaattctttacatgctgggtgaaaaattgaaacaagttgtatatggtcatcagtttatgaatctggcaagtgacaatttaaccaacatcagcctatttgaagaacattgtgaaactctcctttgtgatttaataagcctgtcactcaacaggtacgacaaggttaggtcttctgaatcattaatgagtgaccagtgtccatgtttatgcattaaagaattatgggttctacttattcatcttctagaccacagaagtaaatggtttgtctcggaatcattttggaactggttgaataaactacttaaaacactgcttgaaaaatcaagtgaccgaagaagatcctctatgcctgtaatccagtccagggatccattaggttttagttggtggattattactcatgtagcatcattttacaagtttgatcgccatggagtaccagatgaaatgagaaaagtggaatcaaattggaactttgtagaagaactgctgaaaaagtccatcagtgttcagggtgtcattctagaagaacaattacgaatgtatcttcactgttgtttgacactttgtgatttctgggagccaaacattgcaattgttaccattttatgggaatattatagtaagaacctgaatagttccttcagtatttcttggcttccttttaaaggccttgctaataccatgaagtcacccttgtctatgcttgaaatggtgaagacttgctgttgcgataaacaagatcaggaactatataaatccagcagtagttatactatttttctttgtattctggcaaaagttgttaaaaaagcaatgaagagcaatggccctcatccttggaaacaagtcaaaggaagaatatattcaaaattccatcaaaaaagaatggaagaactaactgaagttggtctacagaacttttttagcctttttctactgttagcagctgttgcagaggtagaagatgttgcaagtcatgttttagacctcctgaatttcctcaagcctgcttttgtaacgtctcagagagccctcatttggaagggtcacatggccttcctcttgatgtatgcccagaaaaatctggacattggtgttttggctgagaaattttcatgtgctttccgggagaaagcaaaggaattcttggtgtctaagaatgaggaaatggtacagagacagactatctggacccttctttccatatacattgatggtgttcaagaagtgtttgagaccagctattgcttgtatccttcccatgaaaaactgcttaatgatggatttagtatgcttctgcgagcatgtcgagaatctgaacttaggacagtattgagcttcctacaagctgttctggccagaatcaggagtatgcatcaacaattgtgtcaggaacttcaaagggacaatgtggacctatttgtacagtcttcattatcggctaaagagcgccaccttgctgcagttgccagtgcactgtggagacatttcttttcatttttgaagagtcagagaatgtcacaggtagtgcctttctcacaacttgcggatgcagctgcagactttactttgctagcaatggacatgccaagcacagctccatcagattttcagcctcagccagttatatcaattattcaactttttggttgggatgatatcatctgccctcaagttgtagcaagatatttaagtcatgtcctacaaaatagcacattatgtgaagcactttctcattcaggctatgtatcttttcaagccttaaccgtaagatcatggattcgttgtgttttgcaaatgtatattaaaaacctctctgggcctgatgatttgctcatagataaaaatctggaagaggcagttgaaaaagagtacatgaaacagttggtcaaactgacaagattactatttaatctctcagaagtaaagagtattttctcaaaggcccaagttgaatatttatccatctcagaagaccctaaaaaagcacttgttcgattctttgaggctgttggtgtaacttacgggaacgtccagacactttctgataaatctgccatggtcacaaagtccttggaataccttggtgaagtattaaaatatattaagccttatttgggaaaaaaagttttcagtgcagggctgcagctgacttatggaatgatgggaattcttgtgaaatcatgggcacaaatctttgccacttctaaagcccaaaaattactattccggatcatagattgtttactgctgccacatgcagtattacagcaagagaaggaactgcctgcacctatgttgtcagcaattcagaaaagtcttcctttgtatctccagggcatgtgtatcgtgtgttgtcaatctcaaaatccgaatgcctatttgaatcaattgctagggaatgttattgagcagtatattgggcgatttcttccagcttcaccatatgtttcagatcttggacaacatcctgttttgctggcattgagaaacacagccactattccaccaatatcatctctaaagaaatgcattgtgcaagtcataaggaaatcctaccttgagtataaggggtcctcacctcctcctcgcttagcatccattctggccttcatcctccaactcttcaaggaaactaacacagacatttatgaagttgaactactcctccctggcattttaaaatgcttggtgttagtcagtgaaccacaagttaaaaggctggccacagagaacctgcaatacatggtaaaagcctgccaagtggggtcagaagaagaaccttcctcccagctgacttctgtgtttaggcagtttatccaggattatggtatgaggtactattaccaggtttacagcattttagaaacagtagcaacattggaccagcaggttgtcatccacttgatttctacccttactcagtctctgaaggattcagagcagaaatggggccttggcaggaatatagcacaaagggaagcctatagcaaacttttgtctcaccttggacagatgggacaagatgagatgcagagactggaaaatgataatacttaatatattttgtgattcatcctgtctattaattatcagtatctaaagccacattgttccactctaattcctacttttaattaattgtataatgttctgtttaaaataatttctaggattttttttccttttatatctgtaagtaaaaaatgtataaataaggaactgaaggttaattagcaactgtgtaataggatccttggaactttttacaaaactgcattctaccttgatgaaattttagttaaactaaattaaagaaacattttctgagagtgttttctgtgtgtgagtattaagcagatacttcatccatagactttttgttgtagtatgacttcctgcctccctgccttgtgactgatttgtcatgtttattttttatttttacaataatagttatgttttaaaatgatactttttcaaagtacctggctaccctatactgtgtttttggtgggggaaaggtgttgggaaatgtgactgtgtatttgtttttcttttttatatgtgtgaggcaagttaacaaagaaaacccttacaaagcacacttaactgtgttaggaatgagactgaatctggctaaaggattatacagctgatatccaaaaagaagtgtaaacatgccaacagggtttatatttaggttccaagagttgccaaattttttttttattcatcctttcttttggagttgtcattaaaaaaaaaatcatatcaggaggaggaaataaaggagactttaagaggagagtaaataaaaatattctagaaaagtaacaatagtagtggtctgagaagtcagctgatccatcttcttgctctttagccagagcttcttataacttagcattttatccaagaaacctgtttagtttcctttaacaacattgtttctcaacttttgaactcttaactcatccagattgttttaccagttggagcttgtccttgactccttttcctattgagcattatttggttgaaagagctccagtcctagttttgggaacccacctgggtctcaaactcagctttgctttatgatcttgagctagttacgtaacctttctcagtctagtttcttcatggagaagaaaagaagaatccctttactatttgacagtgttgttgtgagaatcaatgggataatgtacgtgaaaatatttggtggcccaaattctgttgggaaatgtacagacacgattagtttattactcgtgcacaattaaggcaaagaacacctctcaattttatctttctctaatgatatgtcccagatgaatgatcccactttccaatgttttcttacatcatgttttctaactttgaagtactttgtttccttcttgggattatagtctttatcatggttctactcttccttcaagaaaacatttcaacccttctctggctcaaggagtatctttaaaaatgaaatactttgcaatcagtattctgtagttaatagcgttctcttaattataatctgtgaaatccaaaggagtgtctgttattttcataacatataaatggtccttctctcaaatcagcttcatcaaagggaataaatgaaagcttaaggctgtttaatagacttcataacactgaatttcttttcatcatgatagtgacttactaaacaaataatgtatggcttggaaagttccagcagtcactaaggagttttatctatttaaggtgatgcctttaaagaggttatttatgtgtatatgtgtttttgtgtgtgtgtgtgtgtgtgtgtgtgtgtgtgtgtgtgtgtgggttttttttttccaaaggagattgataaagatacctttgagaatcttgctccttagagtatgaaaacgtttaaaggataggaaaagctgctactgaatcatgctttaggacatatatctatagatactaagaataactaaaatttgtacttaagaatggtaacaacaaagtgtgtaacaatatgtgtgtgtattatatgttttgtatttatgtataagtaactttttttaaagcttttttttaaattgaaaaaagaagaaaatttatggctcagttccttttttttaaaatcttcactgatccttcacttattactacaatcttgccctctttcattcccagacttggagtcccttatacctgcttctttaatagccactttccctaaataccctgtaatttctgaggctgctgcttctaccagtgtaatacaagccattgtcttttggtcaaatctgagtttgttctcctttctcatgttctttgtcctctctgtgacaattgtattttcttttatcttcccatcatttccacaatggtactgctccttcctacatatacagttgacccttgagcaacacaagtttgaactgtgcaggtccacttatatgtggatctaaaatacagtatttgtgggatgcaaaatctgagtatatggaggaccaactttttgtagaggcaggttcctcagggttaactgcaggacttgagtaagtgcagattatggtatgcacaggggatcctggaaccagtccccagaccaaaaatgaccactgtatcttgagagcaccttcatggtcttctttcctgtccccagtcgtaagatacgacccttcatctgctttgtctcaacattctgttagtggtgaactgataactccagcttttctctctctttttttttttttttttttttttgttgttgttgttgttgttgttttgaggcagagtcttgctctgtcgcccaggctggagtgcagtggcacgatctcggctcactgcaagctctgcctcccgggttcacgccattctcctgcctcagcctcccaagtagctgggactacaggtgcccgccaccacgcccggctaattttttttgtatttttagtagagacggggtttcaccatgttgggctcgatctcctgacctcatgatccgcccgcctcggcctcccaaagtgctgggattacaggcgtgatgagccacctagtgctaattcatctctaaacctctgtagttggagtctcctgaaatctcagactacctcctgctttcattttctacccagggaatacactattgtcctaagttatttagccttgaaatgtcagaggcattttaggttcttcatgtttctcccactttcagttgattaccattacaggatcttaggcttctttttatctttttgcagtgccttgcatccactggttgtttgttttttctgttgggcactacttatttccttacctctggtttcttctcctacagcttatgttctgaaatgtgtattcctaaaatactgttttcctcttgttacttttctgctcgaggacttccagtaacttaccattgtttataaggtgatgttcaaacccttcagtctggagactttctgccacctatctgactgtacctttatcttcaagcttatctctttccaaacaagaggctcatttagcagctttctctgattgccatgttcatcctacactcagcctcattcagtttacagcatggaaactgtataggacctctttcctatagaaattgaagacacttaaataggaagaaaattaaaatatacatttggatacatgagtattccagtcaaataatatctataaaataccagatagagtataaaagacaactgaaggacaacagagtgatgaaaggactttattaggcatttggatttggttatgatttaaatttcaatttaattagaacgtttccatggcaaggaaggaagcatggaggactgtggaaaagtcattcagtattgagttcatttgcattagaggaatttcatagtttaaaacttgtatatctttacctatccttcgtatgttttcttcttaagcatatttgactttttctacctcagcatctgtataagaaaatatttgtgagtcagatgtttgtgggttttccttacctattattattttcttccatgctttacaacacattttttaaactaccttgttcttaaataattacacggacctgcttctgtgtactttcacagaatctttgacagttaaaaattgtatgttatataaaaatttgacaagcttctacagttaggaaaagcctttagaaatctgccttccccaaaccgtatgttatcatagcactcatgtctccccatgtctaaaaggtaaatagatacagaaacctcaccaaaagttgaatcatctgtactaaaccactgcttttttatccagactttttatataaatcttttattttccaaaaaactgatcttttacctacccctcttagagttaaaaatattgcctgtcaggcaagagtatagtatgccaatataaataatatgctttatttggttagaaacagttggtttgggaagctagcaacatagcatattctttacaaatttaataaggtgtattttgatactgtgataacctgcattgtaaattaccaaatggttggaattgaccagtttatacttattaaaatttttgatgtgccaatggctatccaattcattgcatttgtgaattgtgcttttagaaaaattgtggacattttagttttatatacatatttatgagttatttgtgcatatgataaaattatatataataataaaagtatatatgtaactta

SEQ ID NO: 155182 - DNA, 3949 bp, Homo sapiens
  Payload ID: 10504
  Gene Symbol: MMS22L
  Gene Name: MMS22-like, DNA repair protein
  ENST ID: ENST00000369251
  CDS Start-End: 77-3688
gaatctcttcacaccttctctttggagcccttaatgatacgacgaaccccaagtgtttcagaacatgaagtaaacaatggagaactgttctgctgcatcgacgttcctgactgacagcttagagctggagctggggacggaatggtgcaaacctccttacttttcttgtgctgttgacaacagaggaggaggaaaacatttttctggagaatcctacctctgcagcggagcccttaagcgattgattttgaatcttgaccctttaccaactaattttgaagaagataccttggaaatatttggcattcagtgggttactgaaacagcattagtgaattcatctagagaactctttcatttattcaggcaacaactgtacaacttggaaaccttgttacagtccagttgtgattttgggaaggtatcaactctacactgcaaagcagacaatattaggcagcagtgtgtactatttctccattatgttaaagttttcatcttcaggtatctgaaagtacagaatgctgagagtcatgttcctgtccatccttatgaggctttggaggctcagcttccctcagtgttgattgatgagcttcatggattactcttgtatattggacacctatctgaacttcccagtgttaatataggagcatttgtaaatcaaaaccagattaagctttttccaccgtcatggcatttattacatctccacttggatatacattggctggtgctagaaattctttacatgctgggtgaaaaattgaaacaagttgtatatggtcatcagtttatgaatctggcaagtgacaatttaaccaacatcagcctatttgaagaacattgtgaaactctcctttgtgatttaataagcctgtcactcaacaggtacgacaaggttaggtcttctgaatcattaatgagtgaccagtgtccatgtttatgcattaaagaattatgggttctacttattcatcttctagaccacagaagtaaatggtttgtctcggaatcattttggaactggttgaataaactacttaaaacactgcttgaaaaatcaagtgaccgaagaagatcctctatgcctgtaatccagtccagggatccattaggttttagttggtggattattactcatgtagcatcattttacaagtttgatcgccatggagtaccagatgaaatgagaaaagtggaatcaaattggaactttgtagaagaactgctgaaaaagtccatcagtgttcagaatagttccttcagtatttcttggcttccttttaaaggccttgctaataccatgaagtcacccttgtctatgcttgaaatggtgaagacttgctgttgcgataaacaagatcaggaactatataaatccagcagtagttatactatttttctttgtattctggcaaaagttgttaaaaaagcaatgaagagcaatggccctcatccttggaaacaagtcaaaggaagaatatattcaaaattccatcaaaaaagaatggaagaactaactgaagttggtctacagaacttttttagcctttttctactgttagcagctgttgcagaggtagaagatgttgcaagtcatgttttagacctcctgaatttcctcaagcctgcttttgtaacgtctcagagagccctcatttggaagggtcacatggccttcctcttgatgtatgcccagaaaaatctggacattggtgttttggctgagaaattttcatgtgctttccgggagaaagcaaaggaattcttggtgtctaagaatgaggaaatggtacagagacagactatctggacccttctttccatatacattgatggtgttcaagaagtgtttgagaccagctattgcttgtatccttcccatgaaaaactgcttaatgatggatttagtatgcttctgcgagcatgtcgagaatctgaacttaggacagtattgagcttcctacaagctgttctggccagaatcaggagtatgcatcaacaattgtgtcaggaacttcaaagggacaatgtggacctatttgtacagtcttcattatcggctaaagagcgccaccttgctgcagttgccagtgcactgtggagacatttcttttcatttttgaagagtcagagaatgtcacaggtagtgcctttctcacaacttgcggatgcagctgcagactttactttgctagcaatggacatgccaagcacagctccatcagattttcagcctcagccagttatatcaattattcaactttttggttgggatgatatcatctgccctcaagttgtagcaagatatttaagtcatgtcctacaaaatagcacattatgtgaagcactttctcattcaggctatgtatcttttcaagccttaaccgtaagatcatggattcgttgtgttttgcaaatgtatattaaaaacctctctgggcctgatgatttgctcatagataaaaatctggaagaggcagttgaaaaagagtacatgaaacagttggtcaaactgacaagattactatttaatctctcagaagtaaagagtattttctcaaaggcccaagttgaatatttatccatctcagaagaccctaaaaaagcacttgttcgattctttgaggctgttggtgtaacttacgggaacgtccagacactttctgataaatctgccatggtcacaaagtccttggaataccttggtgaagtattaaaatatattaagccttatttgggaaaaaaagttttcagtgcagggctgcagctgacttatggaatgatgggaattcttgtgaaatcatgggcacaaatctttgccacttctaaagcccaaaaattactattccggatcatagattgtttactgctgccacatgcagtattacagcaagagaaggaactgcctgcacctatgttgtcagcaattcagaaaagtcttcctttgtatctccagggcatgtgtatcgtgtgttgtcaatctcaaaatccgaatgcctatttgaatcaattgctagggaatgttattgagcagtatattgggcgatttcttccagcttcaccatatgtttcagatcttggacaacatcctgttttgctggcattgagaaacacagccactattccaccaatatcatctctaaagaaatgcattgtgcaagtcataaggaaatcctaccttgagtataaggggtcctcacctcctcctcgcttagcatccattctggccttcatcctccaactcttcaaggaaactaacacagacatttatgaagttgaactactcctccctggcattttaaaatgcttggtgttagtcagtgaaccacaagttaaaaggctggccacagagaacctgcaatacatggtaaaagcctgccaagtggggtcagaagaagaaccttcctcccagctgacttctgtgtttaggcagtttatccaggattatggtatgaggtactattaccaggtttacagcattttagaaacagtagcaacattggaccagcaggttgtcatccacttgatttctacccttactcagtctctgaaggattcagagcagaaatggggccttggcaggaatatagcacaaagggaagcctatagcaaacttttgtctcaccttggacagatgggacaagatgagatgcagagactggaaaatgataatacttaatatattttgtgattcatcctgtctattaattatcagtatctaaagccacattgttccactctaattcctacttttaattaattgtataatgttctgtttaaaataatttctaggattttttttccttttatatctgtaagtaaaaaatgtataaataaggaactgaaggttaattagcaactgtgtaataggatccttggaactttttacaaaactgcattctaccttgatgaaattttagttaaactaaattaaagaaac

SEQ ID NO: 155183 - DNA, 436 bp, Homo sapiens
  Payload ID: 10504
  Gene Symbol: MMS22L
  Gene Name: MMS22-like, DNA repair protein
  ENST ID: ENST00000482634
  CDS Start-End: 1-267
aaatggtttgtctcggaatcattttggaactggttgaataaactacttaaaacactgcttgaaaaatcaagtgaccgaagaagatcctctatgcctgtaatccagtccagggatccattaggttttagttggtggattattactcatgtagcatcattttacaagtttgatcgccatggagtaccagatgaaatgagaaaagtggaatcaaattggaactttgtagaagaactgctgaaaaagtccatcagtgttcagagctgttaatgtagtgcttcatggcctagaggtcagacttgacctccttttaaaatagttttaaacatgctgttcatcacatttttaaacatattgtatggaagccctgtaaagttttgtaatatgttatcatttttgtaagagtttatggagaattataataaataatattttggaa

SEQ ID NO: 155184 - DNA, 721 bp, Homo sapiens
  Payload ID: 10504
  Gene Symbol: MMS22L
  Gene Name: MMS22-like, DNA repair protein
  ENST ID: ENST00000496119
  CDS Start-End: 192-614
ggagcgcgggcgcgcggtggcgggaatttcgcctgtttgcggtttagaccccaaagattcctgttggtggtctgggtcacaggaggcaggtttcgggagctggaaatgtgagcgggaatctcttcacaccttctctttggagcccttaatgatacgacgaaccccaagtgtttcagaacatgaagtaaacaatggagaactgttctgctgcatcgacgttcctgactgacagcttagagctggagctggggacggaatggtgcaaacctccttacttttcttgtgctgttgacaacagaggaggaggaaaacatttttctggagaatcctacctctgcagcggagcccttaagcgattgattttgaatcttgaccctttaccaactaattttgaagaagataccttggaaatatttggcattcagtgggttactgaaacagcattagtgaattcatctagagaactctttcatttattcaggcaacaactgtacaacttggaaaccttgttacagtccagttgtgattttgctttttccaccgtcatggcatttattacatctccacttggatatacattggctggtgctagaaattctttacatgctgggtgaaaaattgaaacaagttgtatatggtcatcagtttatgaatctggcaagtgacaatttaaccaacatcagcctatttgaagaacattgtgaaactctcctttgtgatt

SEQ ID NO: 155185 - DNA, 3083 bp, Homo sapiens
  Payload ID: 10504
  Gene Symbol: MMS22L
  Gene Name: MMS22-like, DNA repair protein
  ENST ID: ENST00000509383
  CDS Start-End: 221-832
ggaatttcgcctgtttgcggtttagaccccaaagattcctgttggtggtctgggtcacaggaggcaggtttcgggagctggaaatgtgagcgggtacgacaggcaccgcgggtaaccgacgccccgggtccttgctgcagccgggaatctcttcacaccttctctttggagcccttaatgatacgacgaaccccaagtgtttcagaacatgaagtaaacaatggagaactgttctgctgcatcgacgttcctgactgacagcttagagctggagctggggacggaatggtgcaaacctccttacttttcttgtgctgttgacaacagaggaggaggaaaacatttttctggagaatcctacctctgcagcggagcccttaagcgattgattttgaatcttgaccctttaccaactaattttgaagaagataccttggaaatatttggcattcagtgggttactgaaacagcattagtgaattcatctagagaactctttcatttattcaggcaacaactgtacaacttggaaaccttgttacagtccagttgtgattttgggaaggtatcaactctacactgcaaagcagacaatattaggcagcagtgtgtactatttctccattatgttaaagttttcatcttcaggtatctgaaagtacagaatgctgagagtcatgttcctgtccatccttatgaggctttggaggctcagcttccctcagtgttgattgatgagcttcatggattactcttgtatattggacacctatctgaacttcccagtgttaatataggagcatttgtaaatcaaaaccagattaagctgtagtagaatcagaggttggttggaaggtacctttactatacaagtctattcagcagccccaaggtgggtttgtcttaaaccaacagatgaaaatatttcctgctttcaaagatcttcagtgaaagaatcctctaatgaacaagacagaggttttccctgagcttttgaatagtgctttttccaccgtcatggcatttattacatctccacttggatatacattggctggtgctagaaattctttacatgctgggtgaaaaattgaaacaagttgtatatggtcatcagtttatgaatctggcaagtgacaatttaaccaacatcagcctatttgaagaacattgtgaaactctcctttgtgatttaataagcctgtcactcaacaggtacgacaaggttaggtcttctgaatcattaatgagtgaccagtgtccatgtttatgcattaaagaattatgggttctacttattcatcttctagaccacagaagtaaatggtttgtctcggaatcattttggaactggttgaataaactacttaaaacactgcttgaaaaatcaagtgaccgaagaagatcctctatgcctgtaatccagtccagggatccattaggttttagttggtggattattactcatgtagcatcattttacaagtttgatcgccatggagtaccagatgaaatgagaaaagtggaatcaaattggaactttgtagaagaactgctgaaaaagtccatcagtgttcagggtgtcattctagaagaacaattacgaatgtatcttcactgttgtttgacactttgtgatttctgggagccaaacattgcaattgttaccattttatgggaatattatagtaagaacctgaatagttccttcagtatttcttggcttccttttaaaggccttgctaataccatgaagtcacccttgtctatgcttgaaatggtgaagacttgctgttgcgataaacaagatcaggaactatataaatccagcagtagttatactatttttctttgtattctggcaaaagttgttaaaaaagcaatgaagagcaatggccctcatccttggaaacaagtcaaaggaaggtatatgcagtatcttctgtcatgagtgtgcactgatatctttggataggtgttactatttgtattttgttatgtttacttgggattagagtcttaattagttataatgttactaggtaatccattatatgcatttgattaaaagtgatagaaacaaacatcttcaagttgtacgttggtaggtaatagtttcaacatataaaacttttgtgttctttgagcccagcggttcacaagcactggtttttttggtttgttttgttttttaaatgagaactgaccacagtatagtagaaccagataactaatgttctcatttgggaactatgctgttttcatttctgataaaataaactttggtcacattagtccattgttttctctgtctcttttgagagttttgcttgttcaatgagtatacttttaaattgtctttcttttttctacttcctttgcctatattagctcttttcttagccttctttgtgcagtacaccaccatctaccacttgctcagattatttgttgagacctctcagggaagagaatactaggtagggacttctcaagaatcacttaatgaaattcctgtttgagtcccacagtgagtaattcttataagggtatggtgatatggtttggatatttcatttgtcatatactgttttaaatgccagcttctttattaaatctacaagaatcacatggcttaaacagtttttttttattttgttctatttgacagtttgtttttgaatcttaagcaattttatggaagacataatactcagaactttatggctaaaagaagtcattggagtttattcaataacaagtctattagacacatactatatgtcaagcactatagtggggatagtagtagacaatacaaagataattaaacagatttttacttttaagagtttgtcagcttttaagtatttataaacatttaactctcatgagcattactcatttctgtcctgaataagccagttatagaagttgcaaaacttaaggccaggtgtggtggctcacacctgtaatcccagcattttgggaggctgaggtgggcgtatcacttgagatcaggagtttgagaccagcctggacaacatggtgaaattctgtctctactaaaaaaaaaaaaaaaa

SEQ ID NO: 155186 - DNA, 966 bp, Homo sapiens
  Payload ID: 10504
  Gene Symbol: MMS22L
  Gene Name: MMS22-like, DNA repair protein
  ENST ID: ENST00000510018
  CDS Start-End: 1-966
tttggcattcagtgggttactgaaacagcattagtgaattcatctagagaactctttcatttattcaggcaacaactgtacaacttggaaaccttgttacagtccagttgtgattttgggaaggtatcaactctacactgcaaagcagacaatattaggcagcagtgtgtactatttctccattatgttaaagttttcatcttcaggtatctgaaagtacagaatgctgagagtcatgttcctgtccatccttatgaggctttggaggctcagcttccctcagtgttgattgatgagcttcatggattactcttgtatattggacacctatctgaacttcccagtgttaatataggagcatttgtaaatcaaaaccagattaagctttttccaccgtcatggcatttattacatctccacttggatatacattggctggtgctagaaattctttacatgctgggtgaaaaattgaaacaagttgtatatggtcatcagtttatgaatctggcaagtgacaatttaaccaacatcagcctatttgaagaacattgtgaaactctcctttgtgatttaataagcctgtcactcaacaggtacgacaagtcattttggaactggttgaataaactacttaaaacactgcttgaaaaatcaagtgaccgaagaagatcctctatgcctgtaatccagtccagggatccattaggttttagttggtggattattactcatgtagcatcattttacaagtttgatcgccatggagtaccagatgaaatgagaaaagtggaatcaaattggaactttgtagaagaactgctgaaaaagtccatcagtgttcagggtgtcattctagaagaacaattacgaatgtatcttcactgttgtttgacactttgtgatttctgggagccaaacattgcaattgttaccattttatgggaatattatagtaagaacctg

SEQ ID NO: 155187 - DNA, 2635 bp, Homo sapiens
  Payload ID: 10505
  Gene Symbol: MNAT1
  Gene Name: MNAT CDK-activating kinase assembly factor 1
  Uniprot ID: P51948
  ENST ID: ENST00000261245
  CDS Start-End: 102-1031
agcgcctgttggtaggaacctgcttggtcgcgtctgagggggcttgtaggtggctctggctgaaacaggcgcctgcgagagtctgtaggagggaaaccgccatggacgatcagggttgccctcggtgtaagaccaccaaatatcggaacccctccttgaagctgatggtgaatgtgtgcggacacactctctgtgaaagttgtgtagatttactgtttgtgagaggagctggaaactgccctgagtgtggtactccactcagaaagagcaacttcagggtacaactctttgaagatcccactgttgacaaggaggttgagatcaggaaaaaagtgctaaagatatacaataaaagggaagaagattttcctagtctaagagaatacaatgatttcttggaagaagtggaagaaattgttttcaacttgaccaacaatgtggatttggacaacaccaaaaagaaaatggagatataccaaaaggaaaacaaagatgttattcagaaaaataaattaaagctgactcgagaacaggaagaactggaagaagctttagaagtggaacgacaggaaaatgaacaaagaagattatttatacaaaaagaagaacaactgcagcagattctaaaaaggaagaataagcaggcttttttagatgagctggagagttctgatctccctgttgctctgcttttggctcagcataaagatagatctacccaattagaaatgcaacttgagaaacccaaacctgtaaaaccagtgacgttttccacaggcatcaaaatgggtcaacatatttcactggcacctattcacaagcttgaagaagctctgtatgaataccagccactgcagatagagacatatggaccacatgttcctgagcttgagatgctaggaagacttgggtatttaaaccatgtcagagctgcctcaccacaggaccttgctggaggctatacttcttctcttgcttgtcacagagcactacaggatgcattcagtgggcttttctggcagcccagttaaccatttataagatttggaccttggagctgaaccagggagctagcaaaagtaaagcagacttataaaattatagctatgtgcagctgcacaacacagtccttccactagcagctgtgttaaagtatttataaggagaaaatttcagaactaagttgagtaatataggggatatatatttgtgaaaaataatttttacttatatttttcagaggatttgacacgataagcctcatctgatggaagagaggaataaataattcacctatatgtgtttgaggttgtgacagacttataaaatctttttaaaaaataaagctataatttatattaagttctgtggtttttctcttattacagtgttttacttgaacacattttaaataccattttgattacaacatttactgttaatatccaagtctattatttcttctcataaaatgttcccctttttcctaatgtcttgttaatactagtccagacaagtggatatatttcctttgaccaagttatggcaagaaaaacctgacccatgataatgtcattccctcaatactaaggactcaatgcctgttttaagcagtggaaaatgaggcaaaccttgatcaaggtgttatagttcccagctgtgagccacactcaggataaaacaaaacccagcattaacctgctttagtgacacattcaaagaagttaataaaatttaatacttaaatgatacctttcacctccaatgtaagctcattttatgatgaatcctttggagactggagaaggtacattttaagtacagttccctatgtataaattgtatactgatacagtttttttgttgaaacttcaaaggcttttattaccagggttttgcttaaagagtttagatatgaataggatgatattgcagcatctcaaccttgtatgagtctgttacatagagcattggatatgggatatagtttcttaaggaaattaagggatttcctatcaaatctctattacaacagatgttagttttatgggtagaaacttaggtgaaacaagacttgtggttacattaggatggactatccatctgtaacaactccatcttattttactaagcagttattaattaattttagcaatacatcttcatctttattgtacttctatctttgttaaatgagaaaaccaaggcatcaaataattgagtagacaaagatcatattcacaagttagtaaaaagccagaattagaatgcaggttttttttttcaaagtccagttccatctacattctaccagactgcatatcctattcctgtatctattaggtattcccgaactgaggattagtgtttttaagtacagtctataaatctgttcaaagaatagttagaacattgaatgtagagttaaggctttgcagcagccaattgcaaaaataaggaatccagtcttttgaaaagaaacactactgcttgttctcataccttttataaatgtattttaaaaagaatgaactaattaataaaacatatcaaaggcttttaaggcttgttttgagcctgccttattgtggaaattgcatgcacctggtttggcaaataaattccaaaaccttta

SEQ ID NO: 155188 - DNA, 1220 bp, Homo sapiens
  Payload ID: 10505
  Gene Symbol: MNAT1
  Gene Name: MNAT CDK-activating kinase assembly factor 1
  Uniprot ID: P51948
  ENST ID: ENST00000539616
  CDS Start-End: 88-891
ggaacctgcttggtcgcgtctgagggggcttgtaggtggctctggctgaaacaggcgcctgcgagagtctgtaggagggaaaccgccatggacgatcagggttgccctcggtgtaagaccaccaaatatcggaacccctccttgaagctgatggtgaatgtgtgcggacacactctctgtgaaagttgtgtagatttactgtttgtgagaggagctggaaactgccctgagtgtggtactccactcagaaagagcaacttcagggtacaactctttgaagatcccactgttgacaaggaggttgagatcaggaaaaaagtgctaaagatatacaataaaagggaagaagattttcctagtctaagagaatacaatgatttcttggaagaagtggaagaaattgttttcaacttgaccaacaatgtggatttggacaacaccaaaaagaaaatggagatataccaaaaggaaaacaaagatgttattcagaaaaataaattaaagctgactcgagaacaggaagaactggaagaagctttagaagtggaacgacaggaaaatgaacaaagaagattatttatacaaaaagaagaacaactgcagcagattctaaaaaggaagaataagcaggcttttttagatgagctgggtcaacatatttcactggcacctattcacaagcttgaagaagctctgtatgaataccagccactgcagatagagacatatggaccacatgttcctgagcttgagatgctaggaagacttgggtatttaaaccatgtcagagctgcctcaccacaggaccttgctggaggctatacttcttctcttgcttgtcacagagcactacaggatgcattcagtgggcttttctggcagcccagttaaccatttataagatttggaccttggagctgaaccagggagctagcaaaagtaaagcagacttataaaattatagctatgtgcagctgcacaacacagtccttccactagcagctgtgttaaagtatttataaggagaaaatttcagaactaagttgagtaatataggggatatatatttgtgaaaaataatttttacttatatttttcagaggatttgacacgataagcctcatctgatggaagagaggaataaataattcacctatatgtgtttgaggttgtgacagacttataaaatctttttaaaaaataaagctataatttatatt

SEQ ID NO: 155189 - DNA, 680 bp, Homo sapiens
  Payload ID: 10505
  Gene Symbol: MNAT1
  Gene Name: MNAT CDK-activating kinase assembly factor 1
  ENST ID: ENST00000557134
  CDS Start-End: 1-510
actcgagaacaggaagaactggaagaagctttagaagtggaacgacaggaaaatgaacaaagaagattatttatacaaaaagaagaacaactgcagcagattctaaaaaggaagaataagcaggcttttttagatgagctggagagttctgatctccctgttgctctgcttttggctcagcataaagatagatctacccaattagaaatgcaacttgagaaacccaaacctgtaaaaccagtgacgttttccacaggcatcaaaatgggtcaacatatttcactggcacctattcacaagcttgaagaagctctgtatgaataccagccactgcagatagagacatatggaccacatgttcctgagcttgagatgctaggaagacttgggtatttaaaccatgtcagagctgcctcaccacaggaccttgctggaggctatacttcttctcttgcttgtcacagagcactacaggatgcattcagtgggcttttctggcagcccagttaaccatttataagatttggaccttggagctgaaccagggagctagcaaaaaggatttgacacgataagcctcatctgatggaagagaggaataaataattcacctatatgtgtttgaggttgtgacagacttataaaatctttttaaaaaataaagctataatttatattaa

SEQ ID NO: 155190 - DNA, 616 bp, Homo sapiens
  Payload ID: 10505
  Gene Symbol: MNAT1
  Gene Name: MNAT CDK-activating kinase assembly factor 1
  ENST ID: ENST00000554002
  CDS Start-End: 1-522
gttttcaacttgaccaacaatgtggatttggacaacaccaaaaagaaaatggagatataccaaaaggaaaacaaagatgttattcagaaaaataaattaaagctgactcgagaacaggaagaactggaagaagctttagaagtggaacgacaggaaaatgaacaaagaagattatttatacaaaaagaagaacaactgcagcagattctaaaaaggaagaataagcaggcttttttagatgagctggagagttctgatctccctgttgctctgcttttggctcagcataaagatagatctacccaattagaaatgcaacttgagaaacccaaacctgtaaaaccagtgacgttttccacaggcatcaaaatgggtcaacatatttcactggcacctattcacaagcttgaagaagctctgtatgaataccagccactgcagatagagacatatggaccacatgttcctgagcttgagatgctaggaagacttggaggatttgacacgataagcctcatctgatggaagagaggaataaataattcacctatatgtgtttgaggttgtgacagacttataaaatctttttaaaaaataaagctataatttatattaa

SEQ ID NO: 155191 - DNA, 3785 bp, Homo sapiens
  Payload ID: 10506
  Gene Symbol: MOB4
  Gene Name: MOB family member 4, phocein
  Uniprot ID: Q9Y3A3
  ENST ID: ENST00000233892
  CDS Start-End: 151-732
gtcgatttcacgcaggttctatagaatttgccaagactgctggcctgttttctaccctgattccttaggtggcttctgggacagaattacggttctctaagtatttgcttgcaggatttctataattggcctgatgaatcctttgatgaaatggacagtacactagctgttcaacagtatattcaacagaacataagagcagattgctccaatattgacaaaattcttgaaccacctgaaggccaagatgaaggtgtgtggaagtatgaacatttaaggcagttctgccttgagctaaatggacttgctgtcaaacttcagagtgaatgccatccagatacttgcactcaaatgacagcaactgaacaatggatttttctttgtgcagctcataaaactccaaaagagtgtcctgctatagactatactagacacacacttgatggtgctgcatgtcttctgaatagcaataaatattttcccagcagggttagcataaaggaatcatctgtagcgaaactaggatcagtatgccgtaggatttacagaatattttcacatgcttattttcatcatcggcagatatttgatgaatatgaaaatgaaacatttttgtgtcatcggtttactaagtttgtgatgaaatacaatttgatgtccaaggataacctgattgtaccaattttagaagaggaagtacagaattcagtttctggggaaagtgaagcatgaagggaatcataggaaaaatgtactgatcatataattaacattatgtactgtatatatcattttagacacatcaatcatgtatccatattatagcttctttgtttagtataggtttttgtatgctgggtttgccttttaaaatgggaaatactttttaagttattcataagctgtatattcaccagtgtggcactcatggtttttaaataagattagtattatctgtttataatgcctgttaataaaagaatttacagtttggtaaaattgctgctaaacaatcattggatcacaatcctcatcagacaaacccatctgtaaaaaaaatgagggagagcttgaggtttcacacaagccatttactaaagaggtagaaatgttttctattggttttaccttgagtttagatatcctaaaaaattctgtagtacgtagttttgtcttacctgttaactttccccaattgagataaaagtgttttaaaattctgtttatagtttttgatatgcatatataattatgtgtatatctaaatacaaatgcaaatgaagcattagtaatacttaaataattttactgtgctacataaagtataacatacttggaaaggatttaccgttctgcaacaacggactggtacatacaggatgatcacaatggtaaggcacataaattattttcccactggaaacctgccctgtccaccccttctcatttcccttaaccttatcttcaaactactttagctgagaagcttttcaccagactgagttagtggtggcttatacctatttatatttgtattaattgcttacagattatacctcatattagcaattacattacactacaagaaaatgtatttgcataggctcttgcttatctttgttttgcaaaattgttctacttagaaaacagtccttaaaatagtttgactcttcctgttagtaatatattaatctttcatttaaccagctaggcagcattaaatagaattgaagaaataccatagtatttattttacaccccctctcccacgaagtttatgtttggattacatgcacgtgtgagattatttgcaataattcataggttccaagggtgttgatgaatagtcatacatttttttggactttgttataattcattgtggtaagaatgattgaaatgcagatttaacaatcttataatctattgaatgccatttttgataaagcactggaggtcttattgccaaactgattgtaatgaggcagtaagggtgaaaacattgtacatgttgtgaagaaagtatttaaatccaacttttgaacagatttaacaaacatgaggaacttttttatttagaaggataattttgaagatgaaaatgtattcatcttaattgttttttcaaatttaagggaataatttataccatcttttcagacaagaatgtacagcaaaaataaggggaacagtagtatactgagagtgtgtgtatgtatagtgtatgcctttccaagcttgccagtctttttggctttgaacactgcccatcagctacagtcattactgttccccaacccacaactatcttttaagaagtcttagttcacagtgaaaggaatgatgactttgaaattatggatttatattaatggcactataaaccaatggtaatggtaatttttaaacttgctaaatattgagaaactaaactactaagttaataaattatatatagcagtgtagctgttctctctagatggtgtctcacaatggatttctgttgcttgactattttcttagtgaatatttatactaaggtagtgactgagatttggtgatctggctgagtattttgaaacacattttgaataatatggcttagtgttaacggggacttaaatatgatttttttttcttactcatttcaccttccctgtactgtatgtttggaattgatcataaaacatctccaaaagaaaataatcagtttgtagtcttgcttttgtattcatgttgataatcttactaattgtgaagttgattcactactatactaggtaagacctaagtgaaacagttcctgtttttccttaatactgttttcagaattttgaaaatgtacttatatatacataaatactactaaaaaattaatgagcctggcaaaccattgatttataaaagtaagtgttctaagaggggaacaagacagttctgtgtgataaggaagttaggctccactttttgtttgaattaccctatgtatatccgaaggtaaacttaggcttttctttccaaaagatcgtatagtcaattcattctttttctcctatcacatctgggaaagtagctaacttttaactatttatgttcccataagtaacccttcttttgtgtgtatacatttccttttctctgacttgagatgtcaaatttggatttctagaacagtttctcagttaaattcttgatgacttaacaacttttactatcagaatacaattagaaatccttggtcaggcacaggggctcacgcctgtaatcccagcactttgggaagccaaggcagacagatcacctgaggtcaggagttcgagaccagcctgaccaacatggagaaaccctgtctctactaaaaatacaaaaattagccgggcgtggtgctactcgtgaggctgaggcaggagaatcgcttgaacccgggaggtggaggttgcggtgagctgagatcgtgccattgcactccagcctgggtaacgagcaaaactccgtctcaaaaactccgtctcaaaaaaaaaaaatccttgattacattgttagtaaggactgtgttacgattataaacacatttattggttgatgtcaaattcactgtaatagtagaactaagttttttatgtgagtactttgccctactgtctatatgatgacatcttttttgagcagctaaattttaaattgtatatactttattttgtgaatccttgttgaatgtgctaaaggtttctttgtgtagttcttccatgctatgcgaatattttagtaaaagtagttgattttta

SEQ ID NO: 155192 - DNA, 3986 bp, Homo sapiens
  Payload ID: 10506
  Gene Symbol: MOB4
  Gene Name: MOB family member 4, phocein
  Uniprot ID: Q9Y3A3
  ENST ID: ENST00000323303
  CDS Start-End: 256-933
aaagaggctcgtggcgcccgccttccggtgcctcagtccctgccagtagccacccgacgccgtccggctgttcctcgttcgccctctccctccgcctagcccgcttctacccggacggctcccggcgcaggctgcagctgttccgtcagctgccgctcctcctcccagacgcagagcgccgctctgccccgccccccgcgcaggctgccgtccctacatccgggtaccgactccagccgcctagacgctggcactatggtcatggcggaggggacggcagtgctgaggcggaacaggccgggcaccaaggcgcaggatttctataattggcctgatgaatcctttgatgaaatggacagtacactagctgttcaacagtatattcaacagaacataagagcagattgctccaatattgacaaaattcttgaaccacctgaaggccaagatgaaggtgtgtggaagtatgaacatttaaggcagttctgccttgagctaaatggacttgctgtcaaacttcagagtgaatgccatccagatacttgcactcaaatgacagcaactgaacaatggatttttctttgtgcagctcataaaactccaaaagagtgtcctgctatagactatactagacacacacttgatggtgctgcatgtcttctgaatagcaataaatattttcccagcagggttagcataaaggaatcatctgtagcgaaactaggatcagtatgccgtaggatttacagaatattttcacatgcttattttcatcatcggcagatatttgatgaatatgaaaatgaaacatttttgtgtcatcggtttactaagtttgtgatgaaatacaatttgatgtccaaggataacctgattgtaccaattttagaagaggaagtacagaattcagtttctggggaaagtgaagcatgaagggaatcataggaaaaatgtactgatcatataattaacattatgtactgtatatatcattttagacacatcaatcatgtatccatattatagcttctttgtttagtataggtttttgtatgctgggtttgccttttaaaatgggaaatactttttaagttattcataagctgtatattcaccagtgtggcactcatggtttttaaataagattagtattatctgtttataatgcctgttaataaaagaatttacagtttggtaaaattgctgctaaacaatcattggatcacaatcctcatcagacaaacccatctgtaaaaaaaatgagggagagcttgaggtttcacacaagccatttactaaagaggtagaaatgttttctattggttttaccttgagtttagatatcctaaaaaattctgtagtacgtagttttgtcttacctgttaactttccccaattgagataaaagtgttttaaaattctgtttatagtttttgatatgcatatataattatgtgtatatctaaatacaaatgcaaatgaagcattagtaatacttaaataattttactgtgctacataaagtataacatacttggaaaggatttaccgttctgcaacaacggactggtacatacaggatgatcacaatggtaaggcacataaattattttcccactggaaacctgccctgtccaccccttctcatttcccttaaccttatcttcaaactactttagctgagaagcttttcaccagactgagttagtggtggcttatacctatttatatttgtattaattgcttacagattatacctcatattagcaattacattacactacaagaaaatgtatttgcataggctcttgcttatctttgttttgcaaaattgttctacttagaaaacagtccttaaaatagtttgactcttcctgttagtaatatattaatctttcatttaaccagctaggcagcattaaatagaattgaagaaataccatagtatttattttacaccccctctcccacgaagtttatgtttggattacatgcacgtgtgagattatttgcaataattcataggttccaagggtgttgatgaatagtcatacatttttttggactttgttataattcattgtggtaagaatgattgaaatgcagatttaacaatcttataatctattgaatgccatttttgataaagcactggaggtcttattgccaaactgattgtaatgaggcagtaagggtgaaaacattgtacatgttgtgaagaaagtatttaaatccaacttttgaacagatttaacaaacatgaggaacttttttatttagaaggataattttgaagatgaaaatgtattcatcttaattgttttttcaaatttaagggaataatttataccatcttttcagacaagaatgtacagcaaaaataaggggaacagtagtatactgagagtgtgtgtatgtatagtgtatgcctttccaagcttgccagtctttttggctttgaacactgcccatcagctacagtcattactgttccccaacccacaactatcttttaagaagtcttagttcacagtgaaaggaatgatgactttgaaattatggatttatattaatggcactataaaccaatggtaatggtaatttttaaacttgctaaatattgagaaactaaactactaagttaataaattatatatagcagtgtagctgttctctctagatggtgtctcacaatggatttctgttgcttgactattttcttagtgaatatttatactaaggtagtgactgagatttggtgatctggctgagtattttgaaacacattttgaataatatggcttagtgttaacggggacttaaatatgatttttttttcttactcatttcaccttccctgtactgtatgtttggaattgatcataaaacatctccaaaagaaaataatcagtttgtagtcttgcttttgtattcatgttgataatcttactaattgtgaagttgattcactactatactaggtaagacctaagtgaaacagttcctgtttttccttaatactgttttcagaattttgaaaatgtacttatatatacataaatactactaaaaaattaatgagcctggcaaaccattgatttataaaagtaagtgttctaagaggggaacaagacagttctgtgtgataaggaagttaggctccactttttgtttgaattaccctatgtatatccgaaggtaaacttaggcttttctttccaaaagatcgtatagtcaattcattctttttctcctatcacatctgggaaagtagctaacttttaactatttatgttcccataagtaacccttcttttgtgtgtatacatttccttttctctgacttgagatgtcaaatttggatttctagaacagtttctcagttaaattcttgatgacttaacaacttttactatcagaatacaattagaaatccttggtcaggcacaggggctcacgcctgtaatcccagcactttgggaagccaaggcagacagatcacctgaggtcaggagttcgagaccagcctgaccaacatggagaaaccctgtctctactaaaaatacaaaaattagccgggcgtggtgctactcgtgaggctgaggcaggagaatcgcttgaacccgggaggtggaggttgcggtgagctgagatcgtgccattgcactccagcctgggtaacgagcaaaactccgtctcaaaaactccgtctcaaaaaaaaaaaatccttgattacattgttagtaaggactgtgttacgattataaacacatttattggttgatgtcaaattcactgtaatagtagaactaagttttttatgtgagtactttgccctactgtctatatgatgacatcttttttgagcagctaaattttaaattgtatatactttattttgtgaatccttgttgaatgtgctaaaggtttctttgtgtagttcttccatgctatgcgaatattttagtaaaagtagttgattttta

SEQ ID NO: 155193 - DNA, 1130 bp, Homo sapiens
  Payload ID: 10506
  Gene Symbol: MOB4
  Gene Name: MOB family member 4, phocein
  ENST ID: ENST00000409355
  CDS Start-End: 4-159
actatggtcatggcggaggggacggcagtgctgaggcggaacaggccgggcaccaaggcgcagtatattcaacagaacataagagcagattgctccaatattgacaaaattcttgaaccacctgaaggccaagatgaaggcagttctgccttgagctaaatggacttgctgtcaaacttcagagtgaatgccatccagatacttgcactcaaatgacagcaactgaacaatggatttttctttgtgcagctcataaaactccaaaagagtgtcctgctatagactatactagacacacacttgatggtgctgcatgtcttctgaatagcaataaatattttcccagcagggttagcataaaggaatcatctgtagcgaaactaggatcagtatgccgtaggatttacagaatattttcacatgcttattttcatcatcggcagatatttgatgaatatgaaaatgaaacatttttgtgtcatcggtttactaagtttgtgatgaaatacaatttgatgtccaaggataacctgattgtaccaattttagaagaggaagtacagaattcagtttctggggaaagtgaagcatgaagggaatcataggaaaaatgtactgatcatataattaacattatgtactgtatatatcattttagacacatcaatcatgtatccatattatagcttctttgtttagtataggtttttgtatgctgggtttgccttttaaaatgggaaatactttttaagttattcataagctgtatattcaccagtgtggcactcatggtttttaaataagattagtattatctgtttataatgcctgttaataaaagaatttacagtttggtaaaattgctgctaaacaatcattggatcacaatcctcatcagacaaacccatctgtaaaaaaaatgagggagagcttgaggtttcacacaagccatttactaaagaggtagaaatgttttctattggttttaccttgagtttagatatcctaaaaaattctgtagtacgtagttttgtcttacctgttaactttccccaattgagataaaagtgttttaaaattctgtttatagtttttgatatgcatatataattatgtgtatatctaaatac

SEQ ID NO: 155194 - DNA, 829 bp, Homo sapiens
  Payload ID: 10506
  Gene Symbol: MOB4
  Gene Name: MOB family member 4, phocein
  ENST ID: ENST00000409916
  CDS Start-End: 279-659
cgcaggttctatagaatttgccaagactgctggcctgttttctaccctgattccttaggtggcttctgggacagaattacggttctctaagtatttgcttgcagtatattcaacagaacataagagcagattgctccaatattgacaaaattcttgaaccacctgaaggccaagatgaaggtgtgtggaagtatgaacatttaaggcagttctgccttgagctaaatggacttgctgtcaaacttcagagtgaatgccatccagatacttgcactcaaatgacagcaactgaacaatggatttttctttgtgcagctcataaaactccaaaagagtgtcctgctatagactatactagacacacacttgatggtgctgcatgtcttctgaatagcaataaatattttcccagcagggttagcataaaggaatcatctgtagcgaaactaggatcagtatgccgtaggatttacagaatattttcacatgcttattttcatcatcggcagatatttgatgaatatgaaaatgaaacatttttgtgtcatcggtttactaagtttgtgatgaaatacaatttgatgtccaaggataacctgattgtaccaattttagaagaggaagtacagaattcagtttctggggaaagtgaagcatgaagggaatcataggaaaaatgtactgatcatataattaacattatgtactgtatatatcattttagacacatcaatcatgtatccatattatagcttctttgtttagtataggtttttgtatgctgggtttgccttttaaaatgggaaatactttttaagttattcataag

SEQ ID NO: 155195 - DNA, 1447 bp, Homo sapiens
  Payload ID: 10506
  Gene Symbol: MOB4
  Gene Name: MOB family member 4, phocein
  Uniprot ID: Q9Y3A3
  ENST ID: ENST00000409360
  CDS Start-End: 233-814
acttttcttgtcgggcaactaggtgccgagcagtgctgcgcccggaagctggccgccactgcggggaggttgggccgaggcggcaggcgggcgggctggggcactggtgcccggcctgctcttccggagctgcagcccctcaatttggctgaggcggtggcggccgccgtgaggcctgcggagctccgacccaggggatttctataattggcctgatgaatcctttgatgaaatggacagtacactagctgttcaacagtatattcaacagaacataagagcagattgctccaatattgacaaaattcttgaaccacctgaaggccaagatgaaggtgtgtggaagtatgaacatttaaggcagttctgccttgagctaaatggacttgctgtcaaacttcagagtgaatgccatccagatacttgcactcaaatgacagcaactgaacaatggatttttctttgtgcagctcataaaactccaaaagagtgtcctgctatagactatactagacacacacttgatggtgctgcatgtcttctgaatagcaataaatattttcccagcagggttagcataaaggaatcatctgtagcgaaactaggatcagtatgccgtaggatttacagaatattttcacatgcttattttcatcatcggcagatatttgatgaatatgaaaatgaaacatttttgtgtcatcggtttactaagtttgtgatgaaatacaatttgatgtccaaggataacctgattgtaccaattttagaagaggaagtacagaattcagtttctggggaaagtgaagcatgaagggaatcataggaaaaatgtactgatcatataattaacattatgtactgtatatatcattttagacacatcaatcatgtatccatattatagcttctttgtttagtataggtttttgtatgctgggtttgccttttaaaatgggaaatactttttaagttattcataagctgtatattcaccagtgtggcactcatggtttttaaataagattagtattatctgtttataatgcctgttaataaaagaatttacagtttggtaaaattgctgctaaacaatcattggatcacaatcctcatcagacaaacccatctgtaaaaaaaatgagggagagcttgaggtttcacacaagccatttactaaagaggtagaaatgttttctattggttttaccttgagtttagatatcctaaaaaattctgtagtacgtagttttgtcttacctgttaactttccccaattgagataaaagtgttttaaaattctgtttatagtttttgatatgcatatataattatgtgtatatctaaatacaaatgcaaatgaagcattagtaatacttaaataattttactgtgctacataaagtataacatacttggaaaggatttaccgttctgcaacaacgga

SEQ ID NO: 155196 - DNA, 1198 bp, Homo sapiens
  Payload ID: 10506
  Gene Symbol: MOB4
  Gene Name: MOB family member 4, phocein
  ENST ID: ENST00000417097
  CDS Start-End: 14-151
agacgctggcactatggtcatggcggaggggacggcagtgctgaggcggaacaggccgggcaccaaggcgcaggatttctataattggcctgatgaatcctttgatgaaatggacagtacactagctgttcaacaggcagttctgccttgagctaaatggacttgctgtcaaacttcagagtgaatgccatccagatacttgcactcaaatgacagcaactgaacaatggatttttctttgtgcagctcataaaactccaaaagagtgtcctgctatagactatactagacacacacttgatggtgctgcatgtcttctgaatagcaataaatattttcccagcagggttagcataaaggaatcatctgtagcgaaactaggatcagtatgccgtaggatttacagaatattttcacatgcttattttcatcatcggcagatatttgatgaatatgaaaatgaaacatttttgtgtcatcggtttactaagtttgtgatgaaatacaatttgatgtccaaggataacctgattgtaccaattttagaagaggaagtacagaattcagtttctggggaaagtgaagcatgaagggaatcataggaaaaatgtactgatcatataattaacattatgtactgtatatatcattttagacacatcaatcatgtatccatattatagcttctttgtttagtataggtttttgtatgctgggtttgccttttaaaatgggaaatactttttaagttattcataagctgtatattcaccagtgtggcactcatggtttttaaataagattagtattatctgtttataatgcctgttaataaaagaatttacagtttggtaaaattgctgctaaacaatcattggatcacaatcctcatcagacaaacccatctgtaaaaaaaatgagggagagcttgaggtttcacacaagccatttactaaagaggtagaaatgttttctattggttttaccttgagtttagatatcctaaaaaattctgtagtacgtagttttgtcttacctgttaactttccccaattgagataaaagtgttttaaaattctgtttatagtttttgatatgcatatataattatgtgtatatctaaatacaaatgcaaatgaagcattagtaatacttaaataattttactgtgctacataaagtataacatacttggaaa

SEQ ID NO: 155197 - DNA, 1021 bp, Homo sapiens
  Payload ID: 10506
  Gene Symbol: MOB4
  Gene Name: MOB family member 4, phocein
  Uniprot ID: Q9Y3A3
  ENST ID: ENST00000448447
  CDS Start-End: 41-655
acatccgggtaccgactccagccgcctagacgctggcactatggtcatggcggaggggacggcagtgctgaggcggaacaggccgggcaccaaggcgcagtatattcaacagaacataagagcagattgctccaatattgacaaaattcttgaaccacctgaaggccaagatgaaggtgtgtggaagtatgaacatttaaggcagttctgccttgagctaaatggacttgctgtcaaacttcagagtgaatgccatccagatacttgcactcaaatgacagcaactgaacaatggatttttctttgtgcagctcataaaactccaaaagagtgtcctgctatagactatactagacacacacttgatggtgctgcatgtcttctgaatagcaataaatattttcccagcagggttagcataaaggaatcatctgtagcgaaactaggatcagtatgccgtaggatttacagaatattttcacatgcttattttcatcatcggcagatatttgatgaatatgaaaatgaaacatttttgtgtcatcggtttactaagtttgtgatgaaatacaatttgatgtccaaggataacctgattgtaccaattttagaagaggaagtacagaattcagtttctggggaaagtgaagcatgaagggaatcataggaaaaatgtactgatcatataattaacattatgtactgtatatatcattttagacacatcaatcatgtatccatattatagcttctttgtttagtataggtttttgtatgctgggtttgccttttaaaatgggaaatactttttaagttattcataagctgtatattcaccagtgtggcactcatggtttttaaataagattagtattatctgtttataatgcctgttaataaaagaatttacagtttggtaaaattgctgctaaacaatcattggatcacaatcctcatcagacaaacccatctgtaaaaaaaatgagggagagcttgaggtttcacacaagccatttactaa

SEQ ID NO: 155198 - DNA, 4885 bp, Homo sapiens
  Payload ID: 10507
  Gene Symbol: MOB1A
  Gene Name: MOB kinase activator 1A
  Uniprot ID: Q9H8S9
  ENST ID: ENST00000396049
  CDS Start-End: 195-845
gcgaggtggggtaggcgggcaaggcgggcgccgaggtttgcaaaggctcgcagcggccagaaacccggctccgagcggcggcggcccggcttccgctgcccgtgagctaaggacggtccgctccctctagccagctccgaatcctgatccaggcgggggccaggggcccctcgcctcccctctgaggaccgaagatgagcttcctcttcagcagccgctcttctaaaacattcaaaccaaagaagaatatccctgaaggatctcatcagtatgaactcttaaaacatgcagaagcaactctaggaagtgggaatctgagacaagctgttatgttgcctgagggagaggatctcaatgaatggattgctgtgaacactgtggatttctttaaccagatcaacatgttatatggaactattacagaattctgcactgaagcaagctgtccagtcatgtctgcaggtccgagatatgaatatcactgggcagatggtactaatattaaaaagccaatcaaatgttctgcaccaaaatacattgactatttgatgacttgggttcaagatcagcttgatgatgaaactctttttccttctaagattggtgtcccatttcccaaaaactttatgtctgtggcaaagactattctaaagcgtctgttcagggtttatgcccatatttatcaccagcactttgattctgtgatgcagctgcaagaggaggcccacctcaacacctcctttaagcactttattttctttgttcaggagtttaatctgattgataggcgtgagctggcacctcttcaagaattaatagagaaacttggatcaaaagacagataaatgtttcttctagaacacagttacccccttgcttcatctattgctagaactatctcattgctatctgttatagactagtgatacaaactttaagaaaacaggataaaaagatacccattgcctgtgtctactgataaaattatcccaaaggtaggttggtgtgatagtttccgagtaagaccttaaggacacagccaaatcttaagtactgtgtgaccactcttgttgttatcacatagtcatacttggttgtaatatgtgatggttaacctgtagcttataaatttacttattattcttttactcatttactcagtcatttctttacaagaaaatgattgaatctgttttaggtgacagcacaatggacattaagaatttccatcaataatttatgaataagtttccagaacaaatttcctaataacacaatcagattggttttattcttttattttacgaataaaaaatgtatttttcagtatccttgagatttagaacatctgtgtcacttcagataacattttagtttcaagtttgtatggtagtgtttttatagataagatacgtctattttttcaaaattcatgattgcagtttaaatcatcatatgacgtgtgggtgggagcaaccaaagttatttttacagggactttattttttgatctttatttgagattgttttcatatctatctaaattattaggagtgtgtgtatcagaagtaattttttaatgtcttctaaggatggtcttccaggcttttaaactgaaaagcttaattcagatagtagcttttggctgagaaaaggaatccaaaatattaataaatttagatctcaaaaccactatttttattatttcattatttttcagaggccttaaaattctggataagagaatggaggaaaatactcagagtacttgattattttatttccttttattaaaaaattacttctatgtttttattgtctcttgagccttagttaagagtagtgtagaaatgcatgaacttcatcctaataaggataaaacttaaggaaaaccacaataaaccatgaaggtgtacacatcttataacacagataaagttttggtgtgctacctattcttgagagagtgagtgagtgtatgtgtttaaaggaaacaaaatgggagaaataagttttaaaaaaatcctcattttgttaatattcaaaagatggactgagcttccacttgggttttatcttgttttaattgtttttgtatcaaaacttgaaattcctctatttctattgggatataaaagccttccccttcagtgaagaaaacatttattttttatttgattcctaggatttagtaaactctagctgtctatttaaaatgtactgaggcacaacaagtattatactggaagacttgccaaactggcaaagctttaagttcatcagcattctatgtggttcagagctgtgatttttgcaaagtattttaccaacctcctcgatggctttgataaaggttagatttgatgtttttttttagatttatttttcttactccactaaactataaagaaaataattacttagaaactccattttaaataatcatttcctagaaattcttaaatatatacagaattttaaagaaaacatttcatctgatttagttagcatccacatatcattgaggaattaaagtgtgggacagtcattattaaaaaaaagagagaaaagccctctattagacattccacaatccatgttttaagcttatccaaaggtccaaatgtcagccattctgtatgttcatgttgatcatttgcgaacaagaaagcaggtttctaggtatcacttaggatgtgaactgcctctcaactttaaaccctgttagctttacttttttaagtccacaagtgatgaaactagtttctcagctaggcttgtactttcctcattatttctagtatttcaaatattctcaaacaaaagagttaccacttttctccatttattttcagttatggaaatgttccctctcttcaccactaagctccaaagcaaatgaaagacgatcacatgtcaggacagtagtaaaggcagcttataaatgggacataaatcagagatgtgttggtattttgagactcaagactgtccttttttaaaataaaaataaaaacattaccaggttcccaagccaatctggcttaaccaacagtgcactgaaatattagtgtttacctccaaggctagggagccaaggggaggaggagaattggaggaaggggagataatgggaagaggatggcgccttcctgagttggctagagggccaacctttgataacagtttgacgaaatcaatcttttttttttttttttttgagacagagtctcactctgtcacccaggctggagtacagtggtgggatctcggctcactgcaagctctgcctcccaggttcatgccattctcctgccccagcctctcctgagtagctggaactacaggtgcccgccaccacgcccagctaattttttctatttttagtcatgcctggctaattttttgtatttttagtagagatggggtttcaccgtgttagccaggatggtctccatctccttacctcgcaatccgcccgcctcagcctcccaaagtgttgggattacaggcatgagccaccgtgcccggcctatagaaatcaatctttttgactcttctcacttttatctccccatgcccaaggtttgcctgttccataacactcactcccttcccccttgctaatcagaagccatctcctctcagtgtctgatctctgctcttcatacatgattacagtcatggggtagagagtgcttgctaaattatgcagttaatcctatggtgctttaattttcaggccttcaaaaaacacttgtacagtgatgtgcagatttttaaacagttgaacttccttgtactacagtttttgtattgacagccaaatttgtctttcattcttcagattgtgaataaagtgatttttacagggcttccagcaaagtttttcctttcatctaaggcttgtagaaccctagcttatatagctgcttacatgagaaatgcaaaatctgtattcaccatgactttagtaacaaaggtaaagttttttagtagtgccaaggcaagaggaacaatcttggtggtagtactaagttttgtcaatattgtggtttcctgattgtattgttggctttctctctgagcattgaggtatactagaagtagagcttctcaaacataatatcattacctcataagcattaacaaatcaggcccaaagagcgtaagtcctagaaatttgttttaaagcagccctagtcatggtgctggtgctaccgccttgttttaggagcctgcctcctgtcagtatgaaaccctcacctgaaaaatgccagcctggacaccaaacactgagccccttcaacaggcacattatttccccctgagatccataagggaatttagtttctactattgtagagttctgaaaagaggtaaaatagtagtcctttggtcatcctatttttgctttcaattttgatatttcagactgtaaaaggccttgggggatgatagtacatgtggtagcagtaatttttttgaagcaactgcactgacattcatttgagttttctctcattatcagattctgttccaaacaagtattctgtagatccaaatggattaccagtgtgctacagacttcttattatagaacagcattctattctacatcaaaaatagtttgtgtaagttagttttggttaccatctaaaatatttttaaatgttctttacataaaaatttatgttgtgttttaaaatccttaggggctttatctatttttctaagtcagttaactgtacttctaaaaaaagtattttgtatctacttttgtaacttcgtcagaataaaatatattgaaagcaagaaatgactgattaaagtatgtatatcaacacacatttctatttaaatatagaaacttgagagttttgca

SEQ ID NO: 155199 - DNA, 6963 bp, Homo sapiens
  Payload ID: 10508
  Gene Symbol: MOB1B
  Gene Name: MOB kinase activator 1B
  Uniprot ID: Q7L9L4
  ENST ID: ENST00000309395
  CDS Start-End: 202-852
gagcgctacccacttccgccccctccccctgccattggaactagctgagccgaactagttgcggccaccgagcagccggctctcggcacctcctcctccgcctccctgtctcctgttccattcgcctttcctcttctttcctggcccacgccgctccgaggcctcgcgaccgccgagcctgcagcctgccccgcggccaacatgagcttcttgtttggtagtcgctcttctaaaacttttaaaccaaagaagaacattccagagggttctcaccagtatgagctcttaaaacacgcagaagccacacttggcagtggcaaccttcggatggctgtcatgcttcctgaaggggaagatctcaatgaatgggttgcagttaacactgtggatttcttcaatcagatcaacatgctttatggaactatcacagacttctgtacagaagagagttgtccagtgatgtcagctggcccaaaatatgagtatcattgggcagatggaacgaacataaagaaacctattaagtgctctgcaccaaagtatattgattacttgatgacttgggttcaggaccagttggatgatgagacgttatttccatcaaaaattggtgtcccgttcccaaagaatttcatgtctgtggcaaaaactatactcaaacgcctctttagggtttatgctcacatttatcatcagcattttgaccctgtgatccagcttcaggaggaagcacatctaaatacatctttcaagcactttattttttttgtccaggaattcaaccttattgatagaagagaacttgcaccactccaagaactgattgaaaaactcacctcaaaagacagataaaaggatgcagagctgtgcaaattgttcctcaaatgaagcagtgtggagtgtattggggattttgttatattttgtttttatctggattgtttttgtcctaggtttgggggcgggggcttgtttgggttcctttttctttattctgattatgtgaaaccatattctattgctaggggaagccaagaaccattctctatacacttgataagggtaaatttatcttagtgtttttaaacttggttttggttacttgaggagttttttaataatattgtgtgctgcaagaaagtgcttgttgattgaactgccgatggattggtttctgtgtggtataaattgtggcccatttatgaagtccccaaaagagttatgtttttaagtgccttggcaggctcacttctgaggtgcaaaacatagatatagaactgaacagggcttgaaacaatattaggattactacccagggcacttactggtgcatgttgtaacatatctatgataaaagccatagtttacctaaaatggtgatttccagcctttactgctttgaagaaacagaatttgtaaaggtatgcatgtagaacataaaaaatatttcttaattattttttatattgatggtaatatattacgttcaacaatgcttaaagctctacaagcaggtcttttcccacctcttgatatctgtgatactgaaacttgaggatgttgaaatgtattacattttggcttctttctacatgttaactgcactgtagatgtaaaaattcaggttatatataggattgccatcttcagaggtgatgctgaactgtgaggtttcctagtaattgccaaatgagccgtaagtctgcagaattcccttctactttgaagagaaggggataggaatgtatatttggctgggggcatggagatgttcgtatgtatgaggagttagggatggggagtcaagttctagaaagttttgtctgaaaacctttgaatagaatggcatgaagattttaatcaattacttataaacaaagtcttagagacttccttttaggaatcaacttccatgagaagttaaaaataaattattaattttaggtacagacattaaacatggaatttaaggactgttgggggaaattgatcacttcttagcatttccattcagtgaatggagctgatgtttgcctgtcattttaagatgataccataccttctttggttattataggtccagtttgaagcattctgacttctggtttttccaccctgaaaggaaatgtttttctttgcagcagtattagataatgaaaaatgctaattcagtagttattaacttctaaattttattcgccatgactttctagtgaattattaccataaataacaatttcagaaacttagtttttagaataaatattaatttttccacttcagttttattctagaaaataccctttttagaaatccagttttagttttgtcattttcgataaatctttcttcagttagaaatatatatccttccttcagttgaaacatatacctttttcacatctaggaagaaatgcttgctctgaaatagtatagattaaaaacactcagtagaaaagaatctaaaattaaatgaatttgttttgccattaaagtagagcagtgatacaatttaatgccattacaattatgttgactagaaactgcctttttctccacttcatttctagcaattatttaccaagtaccaacagtagaagtaacaggaaagcctggcagagttaaatatcttggacatttattggtaaagcttatttataaactgcagtcagagctagttaatttccttaaatctttttgtattcagatagataatatgaatcattatgggttgattcagaaataaaatttgtgaggtgattttgaatcttgtccatataggaaaatgaagcacagaattactcagtcttccatattgtatttgacttcatatcaatctagtaaaaaaggagttgcaatagccaagtatagagagaatagtgaaaaattaatcttgccctttcaagccttatacagtagtacactgtacttgtttttagtagtaagacctactttcccactatatgtagatagtttgttttcactgtgccagaatctcaggtgcctgcttagagtatttctttaatcacagtcactgggaagtaaggagatgtatatatgtgtatatatggtaacaaagcatagcagttctctaggggagaggcctggcattgcacatggtgttacatggctacaagtaaggaaaaaatcagaaagtgaaagaactgatgtaataaaaggttgatttggttggttcccatgaaagttagtaagatgcccttttaaatataaggatcagtgctttgttctgcagcagagtttgctgataaatgtctgttggattctttttggatttctttaattaatttgtaagtaaccaagataattattttcccccttgctctctatattaatacgtagctataaagcaacagttggttttcttatcctttgataaaagcatcccataaaatataaagtagtaagttaacatagtattattgtcacacacaatgctttttttggttaaatgttgatacgaagcaatgttttggaattactttaattgatggagtagtggtggtagagagaaattaataacaaaaagagtgaaaatattttaattagcagtagatggtgctactggctttcatttgctgacttgattattccctttctcttaaaaaccatggcattagactgcactaaattaacaagcatgttagttgctggtagaggttttggaggttaatttaccttaaattggaagacttttaattgcagtctctttctaccttccctctgttagtcatttgtaaattctaaatggtcaccataaaatgtattaggtaggagaagatacgttttatgtataatatatctcagactgagttactgcctgtcttatcaggatggataaaacactacagtctcttatcaggaaatagagatgatgtggatatttatatattacatatataaccaccagactccattttatatattagcattttccttgcttatgggaaaatagcaaaacaacatttcatttatacttttgtttacccctctctgagacaggttttgataaccactgaaatggtagaatatgtgagatacaaatattgagttgtagaactttctttttaaggtgaataagtcatgccttaacatccaaataagagttcatcttcagagtggttcttttgggagcactgtttattccagctatactgcaaaagtataatgtttttggaactgttctagagcataccatgaaaagcagtttgttattatgcaggaaaatcagtttcatcattttagttacactaaacacttttggcagcttaatatgacctttttaaattttttttattttttttatttttatttctttaagatggagtcttgctctgttgcccgggctggagtacaatggcatgatctcagctcactgcaacctccacctcctgggttcaagcatttctcctgcctcagcctcccaagtagctgggattacaggcagcaccacacctggctaattttcatatttttagtagagatggggtttcaacatattggccaggctggtctcaaactcctgacctcaagtgatccgccctccccagcctcccaaagtgctgggattacaggtgtgagccaccacagccagccagtatgacctatcttaatcatcagctcaactgtaatttaaatttggctgttctctggagctaaaccattagggaagttcaaaggaatgtgccatgatttccgaatttgcacaagagaatgttttaagcattggtagcataattgaataaaagaatagtttcctgatgtcactattttgaagtggaaattatcacttggatgtggaggttttactttttaaaaacattcagcttaattaccttaccttaattaccttagttagatatactaatggaaaaaaaccaagtcctttctctagaacttgttttctatttttgttccttttcatgaaaacttctcaatttaattttaactactgtaggatagtattgattgaatggatactatggaaaagtggatccaatatttaagatagaagtagtttaaggagacaacagcctttactgccatttttttttaaatgttttcactcagatgaacaatttgactttaataaaagactggagatttttgtacaaagaaataggaataagtttcatatactaattatgctgagttttaagcctacatatcacaaaatatttagaattgtataaccttttcatatatttataacttttaatgtctttttaaaagatgtgggaccaaaaatatatttataatttggaaatgtgactgcataccaataagaaaacttaccttattttgaaatttatctgggatattaaagaatctaccaattcttaaaaacacagatttatactttaagcttattttaaaattaaagaatatataccaattcttagaaacactttaaggactactcttaaataacttaaatatcagagttttgttgtaatattaaaatttaccgtggaaatcactgttgttcagctatcaccttaattgtgtatgatatgataaatgtttagcagtaaagctatcttaagatttaatggaaaagtttaatttgaagatgtaacaaaaattctgaccacagttgattctgaatttttaaggctttcctaataggctgatcacagagaataatccattttgaaggtataaaactgcactgtatgtctgtcacttgtagctgaactgattcacattttgacaaaagagagaaaatacaaaaatgagttttgcaaatgtaataactttttctgcatatagaactaaataattgaaaaatatgggctatagttctcaaaggtagatagtaaaatcactggctttttccagctgtatgtttttccactgtgcgtgtacacacacactggaaaataattaggctgattttgcaggtcttcattgttagagattctgaagtatttactgtcaattcataggtttcagtttatttaggaaattagtgtttgacagctttttttaaattatttcactgaagctgagattattagtgatacaaagttaaaatttcaatatttaatttctctatatattattaatattaaattgttttttacttataaattcatgttctcatctgatttaatattaaatttgtataggtgggcgtttcttaccattttgcacaagtttttgtttttctgaaatacttaattgtgcaggttgtaaaaaagattagtgcattttcattttaaggatgctttgctccttaaattgttcgacagaaatgactttttagggaaagtagtttttttggagctactaacttgtatttattattgtacatgcataaccagggtggtgagggcactaatcttgtaggaaacacttacttgatgttttatttgaacttttcctataggtttaacttttactgcatagaattaacactaggaacagtgtcatgaaatctgggttgaaggagaatacagtatatatgagaacacttaaagttcaaatagaaatcatttctgaagacaaaagcagaggaatattgtcagtgccaagtaatggaagaataagggcggcatttacactgtgcaagtattgagaagagtgcataaagacagggaactactctcatggagacagtttctctcttataatcaagtaactagaaggggaaaaatcatctaagttatgaaatccaacataggcgctatattacaaactgtgccggattatgcaaattgtagttgttactgatcaaagtttaattgcttcatttttgtttaaaaagggatactgatgtcagaaaatctgtaatatgttttattcaaaagatgtaaataatgtatacagacttgtatgtgatgggatgggaaatatttaaattctaggtgtttttttttttttaaagaagaaactcaatgtttataagaaaaaaatgaataaatagttacgtttggccatgaa

SEQ ID NO: 155200 - DNA, 1107 bp, Homo sapiens
  Payload ID: 10508
  Gene Symbol: MOB1B
  Gene Name: MOB kinase activator 1B
  Uniprot ID: Q7L9L4
  ENST ID: ENST00000396051
  CDS Start-End: 257-922
agctgagccgaactagttgcggccaccgagcagccggctctcggcacctcctcctccgcctccctgtctcctgttccattcgcctttcctcttctttcctggcccacgccgctccgaggcctcgcgaccgccgagcctgcagcctgccccgcggccaacatgagcttcttgttgagttctcagcctgaagttgactggaactttcagttaacaagtatttatcgaatacctgatctgtagtgttggacttagacctatggaaggagctactgatgtgaatgaaagtggtagtcgctcttctaaaacttttaaaccaaagaagaacattccagagggttctcaccagtatgagctcttaaaacacgcagaagccacacttggcagtggcaaccttcggatggctgtcatgcttcctgaaggggaagatctcaatgaatgggttgcagttaacactgtggatttcttcaatcagatcaacatgctttatggaactatcacagacttctgtacagaagagagttgtccagtgatgtcagctggcccaaaatatgagtatcattgggcagatggaacgaacataaagaaacctattaagtgctctgcaccaaagtatattgattacttgatgacttgggttcaggaccagttggatgatgagacgttatttccatcaaaaattggtgtcccgttcccaaagaatttcatgtctgtggcaaaaactatactcaaacgcctctttagggtttatgctcacatttatcatcagcattttgaccctgtgatccagcttcaggaggaagcacatctaaatacatctttcaagcactttattttttttgtccaggaattcaaccttattgatagaagagaacttgcaccactccaagaactgattgaaaaactcacctcaaaagacagataaaaggatgcagagctgtgcaaattgttcctcaaatgaagcagtgtggagtgtattggggattttgttatattttgtttttatctggattgtttttgtcctaggtttgggggcgggggcttgtttgggttcctttttctttattctgattatgtgaaaccatattctattgctaggggaagccaaga

SEQ ID NO: 155201 - DNA, 760 bp, Homo sapiens
  Payload ID: 10508
  Gene Symbol: MOB1B
  Gene Name: MOB kinase activator 1B
  ENST ID: ENST00000502869
  CDS Start-End: 369-760
gattcaagacgagcgctacccacttccgccccctccccctgccattggaactagctgagccgaactagttgcggccaccgagcagccggctctcggcacctcctcctccgcctccctgtctcctgttccattcgcctttcctcttctttcctggcccacgccgctccgaggcctcgcgaccgccgagcctgcagcctgccccgcggccaacatgagcttcttgttagagaaggttcatattgtcggattatgaaagactcaaaataaagaactggaggcaaagaagagttctcagcctgaagttgactggaactttcagttaacaagtatttatcgaatacctgatctgtagtgttggacttagacctatggaaggagctactgatgtgaatgaaagtggtagtcgctcttctaaaacttttaaaccaaagaagaacattccagagggttctcaccagtatgagctcttaaaacacgcagaagccacacttggcagtggcaaccttcggatggctgtcatgcttcctgaaggggaagatctcaatgaatgggttgcagttaacactgtggatttcttcaatcagatcaacatgctttatggaactatcacagacttctgtacagaagagagttgtccagtgatgtcagctggcccaaaatatgagtatcattgggcagatggaacgaacataaagaaacctattaagtgctctgcaccaaagtatattgattacttgatgacttgggttcaggaccagtt

SEQ ID NO: 155202 - DNA, 1207 bp, Homo sapiens
  Payload ID: 10509
  Gene Symbol: MOB2
  Gene Name: MOB kinase activator 2
  Uniprot ID: Q70IA6
  ENST ID: ENST00000329957
  CDS Start-End: 191-997
aattcagacgctccctcgtttcaccagccttggccagcccttgcctctggaaagggggcagctgtttgtctctgccaggcgtcccattggccagggagtgaggctggagggcccggcagcaggcatttgcgagtgctggccagccggcaccccgccccgcttctcctccccaccttcccgtcgcccactcatgctgggagaccactgcagtctccctgaagaccaagcccggcccggccagtccctgcaaagtggactctgctgcaaaatggtgcttcaggctgtcagcaaagtgctcaggaagtccaaagccaagcctaatggcaagaagcccgctgcggaggagaggaaggcctacctggagcctgagcacaccaaggccaggatcaccgacttccagttcaaggagctggtggtgctgccccgcgagattgaccttaacgagtggctggccagcaacaccacgacgtttttccaccacatcaacctgcagtatagcaccatctccgagttctgcacaggagagacgtgtcagacgatggccgtgtgcaacacacagtactactggtatgacgagcgggggaagaaggtcaagtgcacggccccacagtacgttgacttcgtcatgagctccgtgcagaagctggtgacggatgaggacgtgttccccacaaaatacggcagagaattccccagctcctttgagtccctggtgaggaagatctgcagacacctgttccacgtgctggcacacatctactgggcccacttcaaggagacgctggccctggagctgcacggacacttgaacacgctctacgtccacttcatcctctttgctcgggagttcaacctgctggaccccaaagagaccgccatcatggacgacctcaccgaggtgctatgcagcggggccggcggggtccacagtgggggcagtggggatggggccggcagcgggggcccgggagcacagaaccacgtgaaggagagatgagccccccgggccggacaggggcacacgtgtgcaaagagacggtggtgtgtgttctctcctgcatctgcgtgtgcacacatgtgctgggcacgcgtgtggtgaggtctgagagggccccgggctgcactggtgtgggctgcacaggcacagacgcagacggccccggccgtgtcctgtggccccctgtcggatggatgcgtgccgtttgta

SEQ ID NO: 155203 - DNA, 1425 bp, Homo sapiens
  Payload ID: 10509
  Gene Symbol: MOB2
  Gene Name: MOB kinase activator 2
  ENST ID: ENST00000614710
  CDS Start-End: 1-711
ggttggaggacttggaagtccaaagccaagcctaatggcaagaagcccgctgcggaggagaggaaggcctacctggagcctgagcacaccaaggccaggatcaccgacttccagttcaaggagctggtggtgctgccccgcgagattgaccttaacgagtggctggccagcaacaccacgacgtttttccaccacatcaacctgcagtatagcaccatctccgagttctgcacaggagagacgtgtcagacgatggccgtgtgcaacacacagtactactggtatgacgagcgggggaagaaggtcaagtgcacggccccacagtacgttgacttcgtcatgagctccgtgcagaagctggtgacggatgaggacgtgttccccacaaaatacggcagagaattccccagctcctttgagtccctggtgaggaagatctgcagacacctgttccacgtgctggcacacatctactgggcccacttcaaggagacgctggccctggagctgcacggacacttgaacacgctctacgtccacttcatcctctttgctcgggagttcaacctgctggaccccaaagagaccgccatcatggacgacctcaccgaggtgctatgcagcggggccggcggggtccacagtgggggcagtggggatggggccggcagcgggggcccgggagcacagaaccacgtgaaggagagatgagccccccgggccggacaggggcacacgtgtgcaaagagacggtggtgtgtgttctctcctgcatctgcgtgtgcacacatgtgctgggcacgcgtgtggtgaggtctgagagggccccgggctgcactggtgtgggctgcacaggcacagacgcagacggccccggccgtgtcctgtggccccctgtcggatggatgcgtgccgtttgtagagaagagcctttgggcccattcactcgttcagcagacacgcatgggactgatgctttgagttttcttctgtggggttttcctttctctggtctccgtgcagcccctgccctccctcgggtgctgctggcctcaaaggaggaactcgtggggggagggtgtgatttgcagacctgggtctctgctctgctctgggggtggggcttgctttcacagagaccctccttccctctcacccctcctctcccggcctcgccaggagtcttggctgttggcagctcagaggtgggggaggcctgtggtgtgaggtgccctgcacctgctcctgctcctgtcaccccttcctgctgcctcctccatgcccaaggaacacccatggtgcagtcctcaggcaaggccaggacggggctgaggccctgcgtggagatgctgcaccagcggaaggctgagacccgcttaccttagttcatctgttcactcgtaataaaaagaattctctcaggtc

SEQ ID NO: 155204 - DNA, 3391 bp, Homo sapiens
  Payload ID: 10510
  Gene Symbol: MOB3A
  Gene Name: MOB kinase activator 3A
  Uniprot ID: Q96BX8
  ENST ID: ENST00000357066
  CDS Start-End: 381-1034
gcggccgtgtccctccgcggcggctgcgaggcggtgcggcggctgaggcggccgaggcggccagttgggtaccgggaggggcgaaggcgggcggcagaggcgatcagaagtttccaagggtcacttgtgtctcgtccgtgggaagaccgggggagcccagaaggccttggtgtggaattctgagagctgattcctgccttgtcttctccactgttcctggaggaatccgagaagagcagagcggagggagccccagacacggtccgcgggagagctgtggggcttggtgagtgtttcgtggcctctcgggttggtcagcacccccagccagctggcccaggacccctctacagaagtccaggagagcaggcgtcaccaagatgtccaaccccttcctgaagcaagtcttcaacaaggacaagacattccgccccaagcgcaagtttgagccaggcacccagcgcttcgagctgcacaagaaggcgcaggcgtcgctgaacgccgggctggacctgcggctggccgtgcagttgcccccgggcgaggacctgaacgactgggtggctgttcacgtggtggacttctttaaccgcgtcaacctcatctacggcaccatcagcgacggctgcacggagcagtcctgccccgtcatgtcggggggccccaagtatgagtaccgctggcaggatgagcataagttccggaagcccacggcactctccgcgcccaggtacatggacctgctgatggactggatcgaggcgcagatcaacaacgaggacctcttccccaccaacgttggcactccgtttcccaagaacttcctgcagacggtgcggaagatcctgtcgcggctgttccgcgtgttcgtgcacgtctacatccaccactttgaccgcatcgcgcagatgggctccgaggcccacgtgaacacctgctacaagcacttctactatttcgtcaaggagttcggcctcatcgacaccaaggagctggagccactgaaagaaatgaccgcccggatgtgccactgagagccccgcgggtctcccggtgcccgaaccgccgctggggcctcggagacttggaggaggacgctctggaaccatcatcccgcttctctccggcctgagcatctcagggagaccaggggccgagccgctgagcaggtgttggtcctcaggagctccaaccccggacggcagatgccttcctcagtctcgagcctcagtctcccgtctgggactaaaacgtgaactctgtaattctatgtgttactagcaaccggaaaagcccactgtgtttttaaaccacttccactttccaggaggctggatggcttccagggtcactccttgccctgggtggctcccaggctcctggaacttctgcctccacctcgctggggagcccccagggctgctgtggccacagccctgcctgggcctgtctctcaagggcacccagcttgctcggcctcctacatgtctcccgttggggaggcaagaggctgaggggcttccgagcccctgagagcggacatctcctcccgcaggcctttactccgcactccccactggcagccgctggtgtctcttcacacagaggcacaacctggacccaggcagcctctttcctccctccccaatctcttccatttttctacagatttttttttttttggtcatactagagacaggggtctcgctgaactcctggcctccagtgatcctccatcctcggcctcccaaagtgctggaatcacaggggtgagccaccgcacccagccctctctcttcctcaatgcactctgcttcttccgttcttccgaaacattcagctgactgtatccagggcttcctggactcctgggaccccacgtcctgcaccccggcttctgactcatttcctaagggcccctttgtgtatcataaagggtttgatttttatagtcacatttacaaccatcttgagatttttattttttttgaacggagtctcccactgtcgcccagactggagtccagtggcacaatctcggctcactgcatcctccacctcctgggttcaagtgattctcctgcttcagcctcccaagtagctgggattacaggtgtgcgccaccacgcccaggaaattattgtagttttagtagagacaagatttcaccatgttggccaggctggtctcaaactcctgacttcaggtgatccgcctaccttggcctccaaaagtgctgggattacaggcatgagctactgcacccggcctaaccaggctggagtgcagtggtgggatctcggctcactgcaagctccgcctcccagattcacgccattctcctgcctcagcctccccagcagctgggactacaggcacccaccgtcacacccggctaatttttttgtattttagtagagacagggtttcaccgtgttagccaggatggtcttgatctcctgaccttgtgatccaccagcctcagcctcccaaagtgctgggattacaggcgtgagccactgtgcccggccaagaatttttttatcgataacatagtgagctctctgcctcttcggaacgatgtccactttgcttatgatcaacccaagcaggactcttctctccctggacgcctctcccctggtctggaatcttccagttctgccagaattggcctttcccagatgctgcaaacttccagttgaacccctttttctgtgtggcccctggggctgcgagaccaaaatccatgagttctgtgtaccctagacctttggaaggtgagagcagggccctgagaaaaggcagccacctcctctccctggctgaacccctgccaccctactcctcaccagaattgtcagtggcctttcaccacagtggtccttcctgcctgagccctgcactgtcccagaccacacagaagtctggtcacctctgggcgcctgggatggtcaccgaagagaagcacgctgtccccgtctctcctggcttctgccagaaaatcgaacaagtgcaattaacacactgttactgccgaagcctgaaactcccaggacttgtccttgatccttccagaaaccaccaggtccggcacttggagccccccggagagggacctcccagccgagccctcaaagaactccatgaaatcaggaactgcttgatgaaatgtatctccttgtacctggaagatgaagcccaaacacccacacctctgtctcccccagggctcgggatgtctccagcagcccggccacgcagcttcccaggtgggctcggggaggtgggagcagggaccatctctgtcccctccaccctcactccatccacctcggagaccaccctcccccagccagatacggaataaaactacagacgcagacgtcgg

SEQ ID NO: 155205 - DNA, 556 bp, Homo sapiens
  Payload ID: 10510
  Gene Symbol: MOB3A
  Gene Name: MOB kinase activator 3A
  ENST ID: ENST00000591236
  CDS Start-End: 370-556
gtgcgccttcgccgcccgggccccttaaagcccgcgggaccgagtctgggagacccctgcacgccgcttctgcgcggagccccgggccctttaaggaaatttccaagggtcacttgtgtctcgtccgtgggaagaccgggggagcccagaaggccttggtgtggaattctgagagctgattcctgccttgtcttctccactgttcctggaggaatccgagaagagcagagcggagggagccccagacacggtccgcgggagagctgtggggcttggtgagtgtttcgtggcctctcgggttggtcagcacccccagccagctggcccaggacccctctacagaagtccaggagagcaggcgtcaccaagatgtccaaccccttcctgaagcaagtcttcaacaaggacaagacattccgccccaagcgcaagtttgagccaggcacccagcgcttcgagctgcacaagaaggcgcaggcgtcgctgaacgccgggctggacctgcggctggccgtgcagttgcccccgggcgaggacctgaacgactgggtggctg

SEQ ID NO: 155206 - DNA, 451 bp, Homo sapiens
  Payload ID: 10510
  Gene Symbol: MOB3A
  Gene Name: MOB kinase activator 3A
  ENST ID: ENST00000588048
  CDS Start-End: 402-451
agttgggtaccgggaggggcgaaggcgggcggcagaggcgatcaggagtcactgagaggggaggggaaattggaaaatgcagtcacagagcagaaaatcagtgctccaagccgcagctcatcctggggaagtttccaagggtcacttgtgtctcgtccgtgggaagaccgggggagcccagaaggccttggtgtggaattctgagagctgattcctgccttgtcttctccactgttcctggaggaatccgagaagagcagagcggagggagccccagacacggtccgcgggagagctgtggggcttggtgagtgtttcgtggcctctcgggttggtcagcacccccagccagctggcccaggacccctctacagaagtccaggagagcaggcgtcaccaagatgtccaaccccttcctgaagcaagtcttcaacaaggacaagacattccg

SEQ ID NO: 155207 - DNA, 564 bp, Homo sapiens
  Payload ID: 10510
  Gene Symbol: MOB3A
  Gene Name: MOB kinase activator 3A
  ENST ID: ENST00000591326
  CDS Start-End: 376-564
gtcaccatgccagctctgccgggctgcagatgctggtttcagaagcgcctggcagctgcggagctctggggatgcggacttggctgggctaagatggatcggaagtttccaagggtcacttgtgtctcgtccgtgggaagaccgggggagcccagaaggccttggtgtggaattctgagagctgattcctgccttgtcttctccactgttcctggaggaatccgagaagagcagagcggagggagccccagacacggtccgcgggagagctgtggggcttggtgagtgtttcgtggcctctcgggttggtcagcacccccagccagctggcccaggacccctctacagaagtccaggagagcaggcgtcaccaagatgtccaaccccttcctgaagcaagtcttcaacaaggacaagacattccgccccaagcgcaagtttgagccaggcacccagcgcttcgagctgcacaagaaggcgcaggcgtcgctgaacgccgggctggacctgcggctggccgtgcagttgcccccgggcgaggacctgaacgactgggtggctgtt

SEQ ID NO: 155208 - DNA, 1071 bp, Homo sapiens
  Payload ID: 10510
  Gene Symbol: MOB3A
  Gene Name: MOB kinase activator 3A
  Uniprot ID: Q96BX8
  ENST ID: ENST00000592280
  CDS Start-End: 160-813
tgtcgcctccagcaggtcatgattcccctgtgtatttcaggtccgcgggagagctgtggggcttggtgagtgtttcgtggcctctcgggttggtcagcacccccagccagctggcccaggacccctctacagaagtccaggagagcaggcgtcaccaagatgtccaaccccttcctgaagcaagtcttcaacaaggacaagacattccgccccaagcgcaagtttgagccaggcacccagcgcttcgagctgcacaagaaggcgcaggcgtcgctgaacgccgggctggacctgcggctggccgtgcagttgcccccgggcgaggacctgaacgactgggtggctgttcacgtggtggacttctttaaccgcgtcaacctcatctacggcaccatcagcgacggctgcacggagcagtcctgccccgtcatgtcggggggccccaagtatgagtaccgctggcaggatgagcataagttccggaagcccacggcactctccgcgcccaggtacatggacctgctgatggactggatcgaggcgcagatcaacaacgaggacctcttccccaccaacgttggcactccgtttcccaagaacttcctgcagacggtgcggaagatcctgtcgcggctgttccgcgtgttcgtgcacgtctacatccaccactttgaccgcatcgcgcagatgggctccgaggcccacgtgaacacctgctacaagcacttctactatttcgtcaaggagttcggcctcatcgacaccaaggagctggagccactgaaagaaatgaccgcccggatgtgccactgagagccccgcgggtctcccggtgcccgaaccgccgctggggcctcggagacttggaggaggacgctctggaaccatcatcccgcttctctccggcctgagcatctcagggagaccaggggccgagccgctgagcaggtgttggtcctcaggagctccaaccccggacggcagatgccttcctcagtctcgagcctcagtctcccgtctgggactaaaacgtgaactctgtaattctatgtgttactagcaaccggaaaa

SEQ ID NO: 155209 - DNA, 730 bp, Homo sapiens
  Payload ID: 10510
  Gene Symbol: MOB3A
  Gene Name: MOB kinase activator 3A
  ENST ID: ENST00000589902
  CDS Start-End: 567-730
gcatgcgccaatggcccgtgcctgtgccaatggccggtgcccgctcctcggccggctcccgctgaggccccgccccgtgtcgcagccacggtgcaggctccgcccacaggccgcggccccggttgctaggcaacggagacctccgcccggcccggctcagggcatcccagggctgctgcccggaacttggctccgtgcgccttcgccgcccgggccccttaaagcccgcgggaccgagtctgggagacccctgcacgccgcttctgcgcggagccccgggccctttaaggaaaaagtttccaagggtcacttgtgtctcgtccgtgggaagaccgggggagcccagaaggccttggtgtggaattctgagagctgattcctgccttgtcttctccactgttcctggaggaatccgagaagagcagagcggagggagccccagacacggtccgcgggagagctgtggggcttggtgagtgtttcgtggcctctcgggttggtcagcacccccagccagctggcccaggacccctctacagaagtccaggagagcaggcgtcaccaagatgtccaaccccttcctgaagcaagtcttcaacaaggacaagacattccgccccaagcgcaagtttgagccaggcacccagcgcttcgagctgcacaagaaggcgcaggcgtcgctgaacgccgggctggacctgcggctggccgtgcagttgcccccgggcga

SEQ ID NO: 155210 - DNA, 567 bp, Homo sapiens
  Payload ID: 10510
  Gene Symbol: MOB3A
  Gene Name: MOB kinase activator 3A
  ENST ID: ENST00000591638
  CDS Start-End: 338-567
aaaaaaaaaaaaaaaaaaagtgttgcagcaggggaatttgtcatttcacctttcatttctctagaagtttccaagggtcacttgtgtctcgtccgtgggaagaccgggggagcccagaaggccttggtgtggaattctgagagctgattcctgccttgtcttctccactgttcctggaggaatccgagaagagcagagcggagggagccccagacacggtccgcgggagagctgtggggcttggtgagtgtttcgtggcctctcgggttggtcagcacccccagccagctggcccaggacccctctacagaagtccaggagagcaggcgtcaccaagatgtccaaccccttcctgaagcaagtcttcaacaaggacaagacattccgccccaagcgcaagtttgagccaggcacccagcgcttcgagctgcacaagaaggcgcaggcgtcgctgaacgccgggctggacctgcggctggccgtgcagttgcccccgggcgaggacctgaacgactgggtggctgttcacgtggtggacttctttaaccgcgtcaacctcatctacgg

SEQ ID NO: 155211 - DNA, 564 bp, Homo sapiens
  Payload ID: 10510
  Gene Symbol: MOB3A
  Gene Name: MOB kinase activator 3A
  ENST ID: ENST00000586676
  CDS Start-End: 450-564
agcatcttccagccaagtatgagggctgggctgccaggccgggagccagtgttgtgcactgacctagaacatatggaactgacttctccactcagggcttgtctctcaggcgcctcccgtgctctggggcagcggtccccgaggcagtggcaggatgtggaaacctccggaaggaaaagtttccaagggtcacttgtgtctcgtccgtgggaagaccgggggagcccagaaggccttggtgtggaattctgagagctgattcctgccttgtcttctccactgttcctggaggaatccgagaagagcagagcggagggagccccagacacggtccgcgggagagctgtggggcttggtgagtgtttcgtggcctctcgggttggtcagcacccccagccagctggcccaggacccctctacagaagtccaggagagcaggcgtcaccaagatgtccaaccccttcctgaagcaagtcttcaacaaggacaagacattccgccccaagcgcaagtttgagccaggcacccagcgcttcgagctgcacaagaaggcgcaggcgtcgc

SEQ ID NO: 155212 - DNA, 6454 bp, Homo sapiens
  Payload ID: 10511
  Gene Symbol: MOB3B
  Gene Name: MOB kinase activator 3B
  Uniprot ID: Q86TA1
  ENST ID: ENST00000262244
  CDS Start-End: 426-1076
gtgcatgagggggctgctccggagcgacggcggctgcagctggagccaggcgctcgcccgtccgccggttggctcgccgggacctcgcgcaccggcggcagagtcccttgcgtggattggcaagcgacgccccacctgccccgagctcaccattttctttcgcgctggctgcagctgacccggcgaagggagccgaccgggccctgggctggaggtaaaaccccacggaaagaacatgaggttcccttggaaatcattcaagaggaagatggaaggggctgtttagaagagcttaaaagctacaggctgtaagactggggcctgagtgctggcagtggaaaacactgttgggctgtgatctctccctgaaaagttccaggtgccttttcgcttcctgcaaaagaaaggaagcgaaagagaagaccatgtccatagccctgaagcaggtattcaacaaggacaagaccttccgacccaagaggaaatttgaacctggcacacagaggtttgagctgcacaaacgggctcaggcatccctcaactcgggtgtggacctgaaggcggctgtgcagttgcccagtggggaggaccagaatgactgggtggcagtacatgtggtggacttcttcaatcggatcaacctcatctatggcaccatctgtgagttctgcaccgagcggacctgtcctgtgatgtcagggggccccaaatatgagtatcggtggcaggatgatctcaagtataagaagccaacagcgctgccagctccccagtacatgaaccttcttatggattggattgaggttcagatcaacaacgaggaaatatttccaacatgcgtgggtgttcccttcccaaagaacttccttcagatctgcaagaagatcctgtgccgccttttccgggtctttgtccacgtctatatccaccacttcgaccgggtcattgtgatgggtgcagaggcccatgtcaacacctgctacaaacacttctattactttgtcacagagatgaacctcatagaccgcaaggagctagagcctttgaaagaaatgacgagcaggatgtgtcactaatgctccacctcaccctttggaagaaaggaaagctgtttcctcctggtgccctgagcgggcaggaggtggaccaccctggctgaaatgacacacctactcccaggaacagcagaggtggaggcaagcagtgactcctgagagacattccccactcactttgtgtgctcttaaccttctgagtgctgctagcccagacctgtggacgaggcagaccacaacgtgaaagaaggaccagccccttgaccgttctggctggggaattgtccacgaggaagcctctgcacttccacacatggcacagttctgcctgtgacctgccgcctaagctttactggaattcaggttttgagactgagatgcgtgttcgtatttttccacttatctgtcttgtcagctggccgacttctctgtgattggttttttaagtgccgggtgaattttggacctctggatgtgcagcaagtttttatgcaataagccttcctttcaggtctctaaaagctcctgctctgatctgtggtttaacactgtgcagggctgtggagctctgagacacctgaacccctacccatcccctgcacctccctactctccctgccgaggcgtccatagcatttccctaataaatagttttatcagggacactccatggggtggcttgtctctgccccaaacagggtcttcacgttctaactgcagggaagagactggttactagcgtaaagctgacaagttaccagttcacctgatcagaatgtattttttataaccaccatcattccttgtctcttcagtggaagatattctttcctgtttcccagaagagagaaataaaagtcctaaataactaagaatgatcagcgggagcgttgggcatgattactgcagtgtttgttctttattaaagacagggagtcgtggctgtctctacataatactaacatttcagtgaaaaaagtacaattggttatttggtacgtgtagatttaacacccagacggctgacttgtaaccctccccactagccttctgagcatttaaacccagccgtcattctctccccactccacgctccccactcctctgccacgttatgttacggcacaaaattaatttctgcccctgtgattgggccacggttgccaaggtaacagtggagctggagctaacttccttctttcatcctttccaatttttctattccagaagacagtcagaataatgcattctgtactacatcctgccttttgaaacctaaatgagttttcgttgatgaaatgttgccttctctgattcattcacaaaactgtggtggttctgaccacctgtgacgaggggggtcataatacttccagtgatccttttaatttagcaaaatatttgtcggtggagggaagtagataagaatgtattagtgtattttaaagtaataatgattaaagaataactaaatgactctgattttgttttatcaatcataatgtgttaaagccctctgtggctgccacaaaagactagaatcatgaaatctttgtccaagctaagaaagggctgtctctgtgggtacagtggcattctctgttgacctaaccaagcagcctgaaccttgctttgtgtctcgtaaaggtcatctcacggaatccaattgctgctacctcaccatgttgctgtgccctggtcaacaataaacatacttttgtcccccttcctaagtaactttgagaggacaagataggcaaagttttttccctacatctcttttggccaaaagaatatctgaccatcacagagatccagagaacagaaacaagagcccctaagtcccagcctctgcaatacacagttaccagatgggaatgcagcacagtggcacagagaggtaactacggagcccatgccctggaggaactctgtagctgtgcatcatggaacgccacaggatttttacattaaaaagttgaatatgttcctgcatttcagcagtgcataatcgagcaggaggctggaatctggagacctttgttattcattctttttaaggttattttttattaactgtgcatatgaaatttccactcaatttaaaaatccaaatctttttaagcttcttggaagaatttcctcctgcttatattgttaattgcactaatgaactcttctagggtaaattctggcaaactaccctttttttttttttaatcacagaatattcctgttcccacagaactttggcacattctgaagaaaatctctgcagtcaatttttatctcctctgcttgactgcatctaactgttcatctctgttataaatggagcttcagccctctgggtcagagactgacaaccctccttcttcttcctaacctgtcctactctccttctttttctgctttcattttaattttgggaaattttaaagtaaaagtttcaaagttgaaagattatagtgagtacccttatgtcctttagtgcatcagttgttaatgttttgccttgttttcttttcttccttttttttttttaagagaaggggtctctccctattttacccaagctggccttgaaccccttgcctcaagtgagcttcaaccttagcctcctgagtagccaggactatggcatgtaccaccgcacctgcctcacattttctttctcactgtaaatacacattcttattcttgaaccttctgaaaataagttgcagacatcatgaaaatgtaaaatacttcatcatattctttcttttaataagagcattgtcctataaatctgcaatattttcacgcccatgaaactgaacactgatactgcataaatctaatatatgatccatattcaaaattctccagttgtccccaaaatatcctttatagctgtttatttttaaatccaggatccaatcaagaattatacgttatatgtagttgtcattctcttttgtttcctttaattgattagagttgcccttttgtgtgtgtctgagtggtgggtggtggggtggtgtttgtgtatgatgtgcagtgtgtgtgtgtgtggtgtgtctttcatgacactgacattattaaagagttcaggcaagtttgtggaatgtcccacaatctagacttttttactgattgtttcctcattacgagatacaggttacattttttttcccaagactgctacatgtgtgatgttgtttccttactactgcctcacctcaggaagcacataatgtctacttgtctcttttctgatattaggactgatcaggtgttgtctgcctgatccaatcattatcaagttccataattcattattaagctctgaaattcaggacacatacatttatagagtgtgaggctgtgcatacgtacattcatcccttaatgttctcaaggaggcccaggatccccaaaatattataagcattgcagtcagatgatatagcactagcaaagcattcatccctttccatataacaggagggaggggaagaaggaagtttccatgtgcaggcaatacgtgagagcatgggcaagtgaggatttgtatgctccctgtagccagaggtgaaatattcaacgcttttattttttctcccgtcttcaatgacctcccatttggacccatagtttatttatagagagcacacactccctaattgtcagatggtttttttgggaaaactcttagatagtacagtgagttgtgaccctccaaaggatcacaagtacataaacagatacaaagtatttatgtggtattaaaatttcatggtgatggtgcaagggagagatgattaggaagaaaatgtcttacacggctgtaattgagaaatactgatctagagtcatttcctgcttcttaaattgttcgttttctcttccctgggtattttctcatttccaaagacccagagtctcagagccaggttaagtggaagaaactttgagaggtttcttaatcaattccttctatctctcaaaccatgccagtaacttccttggtgaaaaaatctatactcctctcacagttcttcgggcatggaaattctatagcattctttggtataaccaacccactgaaccctccacaacatcttgaattccattcaactcgagctgaagtattctttttgagtttcagtatatcttttctagtgtcccacttttagaaaggtccaaagatgatatataataagtgaaaatacaattaatcagagctttatttgcatatccattaaatatctgaaggctattaccagttgtgcttcagcctcctttcccttgcaattctcccagggtggcatcctctacggagtcttgttgctccattgttgaccactgatgtaactcaacgtgaaaccttcccaaagctctccacatcactctctgttatggctgtgaccagcagtgaacatgaaaagaacttatttcatgccttctccaaactatattgtttctttgctaagtccagacctgctttttctacatttataggttttctattttaatcgccatgcaaaattctttatcatactcaatcattttggtttatcttcctgacttcttacctttaacatccctgttaaagattacactgttgttgtttcaaaaaaaaaaaaaaaaaaaccttaattggcaaaacattaagggacttgaatagaattacacttatctttttgtgctgatttatgtcaatccatcattctggttattgatggaagcaaattgcttcctatgttctctaaaccttatgtcccttccatactccatgagtaccacactgggagaaaacaaaagcaaaaagattgtgggaaaagtatagccattatctttgaggaaatgtgtaccaaggcacaatcattaaaaggagttggaggcatcatttggttgacactgttgtcattcttgttctgatcattttggaccttgaagaaattggtgattctctcctagaattagacaaacaaagtgtgtttggaaataatgattgttttcctgccttaaaaaatatattaacagaaagcttttataacaggctgtttccctctggacaggtattaattctgagtaagaattttcagtgactacataaggatttgtgtaacttatgaaggaagagtccatttctaatcaaataattcgcctgttttactagcttatagtgatctgatttcagaattttcctgtatcttttttacatacatcagaaaaagaaatgtttactatatttttggttccatttatgattgtattaagcatttgactataaggaaaactaacaattaaatcaattagaaaagcaacataaaattaaatgatatttaggaaatcagttatatgtgagcttgggtattcaaatgtcacaaataaaaagcatataaccatta

SEQ ID NO: 155213 - DNA, 2800 bp, Homo sapiens
  Payload ID: 10512
  Gene Symbol: MOB3C
  Gene Name: MOB kinase activator 3C
  ENST ID: ENST00000271139
  CDS Start-End: 58-864
agtgtgagggattttggaagcacttgccccaagcagagtttaaaatggagatggcaaatgaagcgcagaaatctctttgctctggaaactggggtcccaccctggggacttctttgggtgagaagtcgaagagtcgggatggatgagatgacctttcacatctggtatcctcaggtccgagcccctggacagcagccccaggcccagctggccatggccctgtgcctgaagcaggtgttcgccaaggacaagacgttccggccgcggaagcgctttgagccgggcacacagcgctttgagctgtacaagaaggcacaggcctctctcaagtcgggcctggacctgcgcagtgtggtgaggctaccacccggggagaacatcgacgactggatcgccgtgcacgtggtggacttcttcaaccgcatcaacctcatctacggcactatggcggagcgctgcagtgagaccagctgcccggtcatggccggcgggccccgctacgagtaccgctggcaggacgagcgccagtaccggcggcccgccaagctctctgcgccgcgctatatggcattgctcatggactggatcgaaggcctcatcaacgacgaagaggtctttcccacgcgtgttggagttcccttccctaagaacttccagcaggtctgcaccaagatcctgacccgcctcttccgagtctttgtccatgtctacatccaccacttcgatagcatcctcagcatgggggcagaggcgcacgtcaacacctgctacaagcacttctactacttcatccgcgagttcagtctggtggaccagcgggagctggagccactgagggagatgacagagcggatctgccactgagcccaggtctggacttttttggccatcagatggacgatctgaacatagggtggctggcagaggggacccccaggagcctgaaggaatctgaaggcactggaatcactccacacacccaaagcctctggacttctggttctcaggagtctgcctacctgtcgccctgaccgcttgtggatggagaaggggagagcatctaggcaggcaaacagaagggaagtggagttaaacctctggcatgaagtctgggagtagggtaggctagggggtttcttctatgacacttgacccttccatgctggttcccaagcctattggaggaatgtgggtgtggccgaggtgatggcaagaaaggtgcaagaaagtgagcagtctgcctgtgagtgagcacagatgccggggtgtgtgtgtgtgtgtgtgattttcactgtggggtgtgtctgtgagagctagctgccttacccctccttggcacatagtaggccttccataaatgttggatggatggataaatagattgggaccatcagaccatgggaccatcagaccatgaccactgtaggagtgatgacagctcagcgtccccactcagtgtatctgaccatgtgtgtaagtgcacaaaaatgtggttgtagatgttgctctacattcaaaccttccaggctacactcttccatcagcatgagtcctggagagctgggggaacgtaggaagaggagccttgccttgagttcctaaaccgacccactgcagacacaggctctgattctcttacccagagatgcccatgagctgacattttactcatccctctgcctccaagaaggcctgtattatacgtgtcctcctgggggttggagatgatccctcaagtacacaaaggtcccctggcccttcatctgggaatcatatactccactctagctcccagaatctacagacctggctcctcggatctgaagcccagcacaaaataatctccccgtccaaggagcttgtggaacttgaattgggaactttggagtcttgtctcccatcccagcacattgaggatgtagttggtgaatggactcttccaggcatggagatcctccatcctaaaagtacctgcctccttcccagccatccctgacacattccagccagttggatctcacagcacagctatccacagggagactgggatgttcacgcagcactccattactcagtacctccatacccagccctatacgcagacccacaggtggggaaactgaggcaggaacagggttctgccctcccagagcctccactctgggatgccagaatggaaagccagagggaacctgagaatcatccagtcttactgtctcaatgtacatacggggaaactgaagccaggagaagaagagggagaaactgtccagggcctcacagggaggcattcatggagctggagaaaccagggatcctgaccgcagggcccatcaattgctacatagagatacacatggaaagagggtttaacagaccctctctaggacacaactgtttctgctttgagcaataatttctaacctgaggccaacatgtcccactgccccttgggttggctggggttgtttcctgagccaagcatccaatatcatgccccactcaatggcctagaagctgcctgtactttggggaaacagatggagctcttgggcccagccagctgggcctgggacttctgcctctgccgcctccagagtggcctggcagctttgccagaggctgtggagcgagggtagtaggagcttttcccagagtgctgtgacttgcatgatggattctaggctgtggcaagggctgatttctgggatagggggagggttggaaaatttatttttatgaaacagagggaagactttattgttgttatttttggtaaaataaaaggcaaactaaagca

SEQ ID NO: 155214 - DNA, 2822 bp, Homo sapiens
  Payload ID: 10512
  Gene Symbol: MOB3C
  Gene Name: MOB kinase activator 3C
  Uniprot ID: Q70IA8
  ENST ID: ENST00000319928
  CDS Start-End: 232-882
ccgtggccgcggcgtggcggggccggggcggagctggcgtcgcccggggcaggagggcagccgcggccggcaggacaggcagacggacaggctgacaggagagagaacaggcactgcgggacctgcaggagaaaggcgatcctgtggctgggaatgtgaccccacggccagaagaggacccggtatcctcaggtccgagcccctggacagcagccccaggcccagctggccatggccctgtgcctgaagcaggtgttcgccaaggacaagacgttccggccgcggaagcgctttgagccgggcacacagcgctttgagctgtacaagaaggcacaggcctctctcaagtcgggcctggacctgcgcagtgtggtgaggctaccacccggggagaacatcgacgactggatcgccgtgcacgtggtggacttcttcaaccgcatcaacctcatctacggcactatggcggagcgctgcagtgagaccagctgcccggtcatggccggcgggccccgctacgagtaccgctggcaggacgagcgccagtaccggcggcccgccaagctctctgcgccgcgctatatggcattgctcatggactggatcgaaggcctcatcaacgacgaagaggtctttcccacgcgtgttggagttcccttccctaagaacttccagcaggtctgcaccaagatcctgacccgcctcttccgagtctttgtccatgtctacatccaccacttcgatagcatcctcagcatgggggcagaggcgcacgtcaacacctgctacaagcacttctactacttcatccgcgagttcagtctggtggaccagcgggagctggagccactgagggagatgacagagcggatctgccactgagcccaggtctggacttttttggccatcagatggacgatctgaacatagggtggctggcagaggggacccccaggagcctgaaggaatctgaaggcactggaatcactccacacacccaaagcctctggacttctggttctcaggagtctgcctacctgtcgccctgaccgcttgtggatggagaaggggagagcatctaggcaggcaaacagaagggaagtggagttaaacctctggcatgaagtctgggagtagggtaggctagggggtttcttctatgacacttgacccttccatgctggttcccaagcctattggaggaatgtgggtgtggccgaggtgatggcaagaaaggtgcaagaaagtgagcagtctgcctgtgagtgagcacagatgccggggtgtgtgtgtgtgtgtgtgattttcactgtggggtgtgtctgtgagagctagctgccttacccctccttggcacatagtaggccttccataaatgttggatggatggataaatagattgggaccatcagaccatgggaccatcagaccatgaccactgtaggagtgatgacagctcagcgtccccactcagtgtatctgaccatgtgtgtaagtgcacaaaaatgtggttgtagatgttgctctacattcaaaccttccaggctacactcttccatcagcatgagtcctggagagctgggggaacgtaggaagaggagccttgccttgagttcctaaaccgacccactgcagacacaggctctgattctcttacccagagatgcccatgagctgacattttactcatccctctgcctccaagaaggcctgtattatacgtgtcctcctgggggttggagatgatccctcaagtacacaaaggtcccctggcccttcatctgggaatcatatactccactctagctcccagaatctacagacctggctcctcggatctgaagcccagcacaaaataatctccccgtccaaggagcttgtggaacttgaattgggaactttggagtcttgtctcccatcccagcacattgaggatgtagttggtgaatggactcttccaggcatggagatcctccatcctaaaagtacctgcctccttcccagccatccctgacacattccagccagttggatctcacagcacagctatccacagggagactgggatgttcacgcagcactccattactcagtacctccatacccagccctatacgcagacccacaggtggggaaactgaggcaggaacagggttctgccctcccagagcctccactctgggatgccagaatggaaagccagagggaacctgagaatcatccagtcttactgtctcaatgtacatacggggaaactgaagccaggagaagaagagggagaaactgtccagggcctcacagggaggcattcatggagctggagaaaccagggatcctgaccgcagggcccatcaattgctacatagagatacacatggaaagagggtttaacagaccctctctaggacacaactgtttctgctttgagcaataatttctaacctgaggccaacatgtcccactgccccttgggttggctggggttgtttcctgagccaagcatccaatatcatgccccactcaatggcctagaagctgcctgtactttggggaaacagatggagctcttgggcccagccagctgggcctgggacttctgcctctgccgcctccagagtggcctggcagctttgccagaggctgtggagcgagggtagtaggagcttttcccagagtgctgtgacttgcatgatggattctaggctgtggcaagggctgatttctgggatagggggagggttggaaaatttatttttatgaaacagagggaagactttattgttgttatttttggtaaaataaaaggcaaactaaagcagcca

SEQ ID NO: 155215 - DNA, 5725 bp, Homo sapiens
  Payload ID: 10512
  Gene Symbol: MOB3C
  Gene Name: MOB kinase activator 3C
  Uniprot ID: Q70IA8
  ENST ID: ENST00000371940
  CDS Start-End: 3145-3795
tgtcaggcgggctcctctgggtcctacgaccttcctggccctgggagctggtttgaggttgcagggaagccgggggtgggcgtgggtggctgcgcgccgcgaggagagcgtggagtcttcgcctctactttttctcttcgacctctgtcctagagagagtcccaggatggattctgggttcaaactggggccatcctctggcccagatcctgggccaggcccaaggagtggtagatgtagcctagcagggggctaaatatcagaaacaggtagggtcagcctgctgtcttcatttgagaagcccagatccgcacccagggaacgagcaaggcactgccactccaggagtgaaaggatagccatcactgggaaatgggggctaggacggggaacggcagtggttcagggagagacagaggttctgtgacagatagaaactcagtgagggcatgggggtggggagtgaagggagttaaccctgtggctagaagagcacctgccctgcacccaccccctgagcttacattttcctggaaagagacccaggccttgaagttccacaggagtaaggtggaactctagctcactggtcaggacaccccagttgctgtgcggagtcagtgtgttggggacaggaagcaggttgggctgtttggtggagaagatgcttccactgtccctccactcccctcctcttctctgtctccaccagaccattgatgagccagtgcaggaaaatggtcttttactcttggtcatgagctgagccccaccttatcccagttcccagttctgcttgtaacttgctatgtggacacaggctcctcaagtcctctttttaggcctcagtttcctcatctgggcctcagtttccccatctgtacaagtgagttgggccagctgatctatcagggctattttaactctaagattctagtctaagctttccttaaagcctgaacactgactttgtgccaggccttgtcctaagctgggggtgggttggggatggagtggagactgcaatgaccaaaagcagcctctacccaaggagaaggagatctgagttcaggagaggaggctgtgggaggaggtagcagccaatctgaggatgtgtggtcaggcaggtggagggataagaaaacatgcagaggcaaaagagtgggggcgtgttcaggaatcaggaagaagcccagggtggttggtgtggggaggtgggaagtggggcaggaaaggtaggacaaggtgctgaatgccagggtgggggcctatttctaactgtcataaagggggccatgcaatgtggggagcccaggagccccgcctaattgcagtgtgagggattttggaagcacttgccccaagcagagtttaaaatggagatggcaaatgaagcgcagaaatctctttgctctggaaactggggtcccaccctggggacttctttgggtgagaagtcgaagagtcgggatggatgagatgacctttcacatctgtgagtttttttcaagagaacaagttcctgctgaatggcctgtttctactctccaagctgctctcattttaccagactgcccccatcctggcctgcctttgtgggttcaaggaaggacctttgtctcaaacagctccccagctagtttgacttcttgccagaagtaatacccctccccgaaatatgtgccatccctttgcttttacccaggtgtcacctggttcccaccctcccttccccaatcctgtcccagggttaccagagatgtgagaaaggacagtgctccagcgtcagaggtcaagcccaggctttggccataagcaagcctcagggtagggctaaaggctagagtcagggctcacacttgccagagcccaggtcagaggtcagccaggaaccagaatgcaattcttagcttatactcagccttagtgctcagtctaggggcaggggcagtgtgcttagtgggtggctaaattctagttttggtaggtacatgggtctgcatttcccagtagctcacacactcacagttgagatgagatgactcaggtcttagaaacctagctatagcagagtgacccaggacctggatgggctaaatccatggtgatacaggggtcacccagtaagccagtggtagagctgggactagaacccaggactcctgcctctgagcctagggccctgatcactgtctcccaaaatttgttctgaatctgggatccttaaattctaggaggcaaagtaaatttgcctgagctctagatgggccctcctgggtgcatctgactatactcttctacctcccagtgccaggcacatagtagttgctagaggaatgtctactgagtgtcaggtgcaacgggaggagccagtggcttgttcagatttggggctggaggaggctggcttgaggggaaggatctccagctgttgtcagaggaagcgacgccctcattggcctgccgccctccccctcctccagtgcttgcagccacactcagaagccgcccagctggcagcgggagggccctttcctctttcagggtgaaaaaaaaggaaaggacatttttggtagaaaagttccctgctgctccctgggaatccccggtggccggatggactacgggatatcccagaggaagccgaaagccacccccgacccccctccaccctgcccccagcacaatgctgcgaggctctcccacgttgcaccagctggccaagggggctcccagaggtcatctcgtccaagcccctgtctgctggtgggcctgcagggagcctctgcgacctctctcgtgaccaacagcaagtctgaggggcacctgtttagagcccaggcccagctctgcaatgaaagcagaaaagagacaaagcaagatgggaggactgtgggggcttagcaagggggactaacatagcctggaaagagggcggggcactggacctaggggctgaggacttagattccaggcagaggatgcagaggttgagcaaaggctgagaggtgacagggaaatgatgaattgggaagtcagagcccagatgataaggccttgaccgccagctcccctatgcccttgtccctggcagggtatcctcaggtccgagcccctggacagcagccccaggcccagctggccatggccctgtgcctgaagcaggtgttcgccaaggacaagacgttccggccgcggaagcgctttgagccgggcacacagcgctttgagctgtacaagaaggcacaggcctctctcaagtcgggcctggacctgcgcagtgtggtgaggctaccacccggggagaacatcgacgactggatcgccgtgcacgtggtggacttcttcaaccgcatcaacctcatctacggcactatggcggagcgctgcagtgagaccagctgcccggtcatggccggcgggccccgctacgagtaccgctggcaggacgagcgccagtaccggcggcccgccaagctctctgcgccgcgctatatggcattgctcatggactggatcgaaggcctcatcaacgacgaagaggtctttcccacgcgtgttggagttcccttccctaagaacttccagcaggtctgcaccaagatcctgacccgcctcttccgagtctttgtccatgtctacatccaccacttcgatagcatcctcagcatgggggcagaggcgcacgtcaacacctgctacaagcacttctactacttcatccgcgagttcagtctggtggaccagcgggagctggagccactgagggagatgacagagcggatctgccactgagcccaggtctggacttttttggccatcagatggacgatctgaacatagggtggctggcagaggggacccccaggagcctgaaggaatctgaaggcactggaatcactccacacacccaaagcctctggacttctggttctcaggagtctgcctacctgtcgccctgaccgcttgtggatggagaaggggagagcatctaggcaggcaaacagaagggaagtggagttaaacctctggcatgaagtctgggagtagggtaggctagggggtttcttctatgacacttgacccttccatgctggttcccaagcctattggaggaatgtgggtgtggccgaggtgatggcaagaaaggtgcaagaaagtgagcagtctgcctgtgagtgagcacagatgccggggtgtgtgtgtgtgtgtgtgattttcactgtggggtgtgtctgtgagagctagctgccttacccctccttggcacatagtaggccttccataaatgttggatggatggataaatagattgggaccatcagaccatgggaccatcagaccatgaccactgtaggagtgatgacagctcagcgtccccactcagtgtatctgaccatgtgtgtaagtgcacaaaaatgtggttgtagatgttgctctacattcaaaccttccaggctacactcttccatcagcatgagtcctggagagctgggggaacgtaggaagaggagccttgccttgagttcctaaaccgacccactgcagacacaggctctgattctcttacccagagatgcccatgagctgacattttactcatccctctgcctccaagaaggcctgtattatacgtgtcctcctgggggttggagatgatccctcaagtacacaaaggtcccctggcccttcatctgggaatcatatactccactctagctcccagaatctacagacctggctcctcggatctgaagcccagcacaaaataatctccccgtccaaggagcttgtggaacttgaattgggaactttggagtcttgtctcccatcccagcacattgaggatgtagttggtgaatggactcttccaggcatggagatcctccatcctaaaagtacctgcctccttcccagccatccctgacacattccagccagttggatctcacagcacagctatccacagggagactgggatgttcacgcagcactccattactcagtacctccatacccagccctatacgcagacccacaggtggggaaactgaggcaggaacagggttctgccctcccagagcctccactctgggatgccagaatggaaagccagagggaacctgagaatcatccagtcttactgtctcaatgtacatacggggaaactgaagccaggagaagaagagggagaaactgtccagggcctcacagggaggcattcatggagctggagaaaccagggatcctgaccgcagggcccatcaattgctacatagagatacacatggaaagagggtttaacagaccctctctaggacacaactgtttctgctttgagcaataatttctaacctgaggccaacatgtcccactgccccttgggttggctggggttgtttcctgagccaagcatccaatatcatgccccactcaatggcctagaagctgcctgtactttggggaaacagatggagctcttgggcccagccagctgggcctgggacttctgcctctgccgcctccagagtggcctggcagctttgccagaggctgtggagcgagggtagtaggagcttttcccagagtgctgtgacttgcatgatggattctaggctgtggcaagggctgatttctgggatagggggagggttggaaaatttatttttatgaaacagagggaagactttattgttgttatttttggtaaaataaaaggcaaact

SEQ ID NO: 155216 - DNA, 2441 bp, Homo sapiens
  Payload ID: 10513
  Gene Symbol: MOAP1
  Gene Name: modulator of apoptosis 1
  Uniprot ID: Q96BY2
  ENST ID: ENST00000298894
  CDS Start-End: 395-1450
ccctcatgacgtcagatcgcccccgcccgccgcgcagcttccccgagcgagaccaaaacaggtggaatccgggctggagccggagctccggcggcgcgggtggcggcacgtccctccagacagtaccacaggcacctggagtaccggcatcggtcgctgtggcccccgagtgtccgtcagagcctaggggagcctgccctcccgcgcctcgtcggggcccggccaggcaccttggccgccggcgcacggacgcgggcacgagcactagatcacggctgctggacctcggcacgttgacaagatttctctggggtaccgcggaggattactttgaatttcggtggtcgcctgtggtctggcatatttagaacttaagtctattatttcgggcaccatgactttgaggcttttagaagactggtgcagggggatggacatgaaccctcggaaagcgctattgattgccggcatctcccagagctgcagtgtggcagaaatcgaggaggctctgcaggctggtttagctcccttgggggagtacagactgcttggaaggatgttcaggagggatgagaacaggaaagtagccttagtagggcttactgcggagactagtcacgccctggtccctaaggagataccgggaaaagggggtatctggagagtgatctttaagccccctgacccagataatacatttttaagcagattaaatgaatttttagcgggagagggcatgacagtgggtgagttgagcagagctcttggacatgaaaatggctccttagacccagagcagggcatgatcccggaaatgtgggcccctatgttggcacaggcattagaggctcttcagcctgccctgcaatgcttgaagtataaaaagctgagagtgttctcgggcagggagtctccagaaccaggagaagaagaatttggacgctggatgtttcatactactcagatgataaaggcgtggcaggtgccagatgtagagaagagaaggcgattgctagagagccttcgaggcccagcacttgatgttattcgtgtcctcaagataaacaatcctttaattactgtcgatgaatgtctgcaggctcttgaggaggtatttggggttacagataatcctagggagttgcaggtcaaatatctaaccacttaccagaaggatgaggaaaagttgtcggcttatgtactaaggctggagcctttgttacagaagctggtacagagaggagcaattgagagagatgctgtgaatcaggcccgcctagaccaagtcattgctggggcagtccacaaaacaattcgcagagagcttaatctgccagaggatggcccagcccctggtttcttgcagttattggtactaataaaggattatgaggcagctgaggaggaggaggcccttctccaggcaatattggaaggtaatttcacctgagtctcagggaaccacgaagggatatggcaatgagtagagcatgaaggtagaacagtctatatactcttgtgacacatacaatccctaccttgtgctgccaagtaactcatttttgtgcaattctcagtataagccctttgtcgtttctgtgcctatttaaagtctcctaaaggtgtaattgactaggaaggatgtagttctacactgccatttacctatttaaattcatccttgtgaatatctttgttgttgttgttgagacagagtctcgctctgtcacccaggctggagtgcagtggcgtgatcttggctcactgcatcctccgccttccaggtttaagctattctcctgcctcagttgcccgagtagctgggactacaggcatgtgccaccacgcccagctaagttttgcattatcagtagagacggggtttcaccatgttggccaggctagtttcgaactcctgacctcaagtgatccacctgcttcggcctctgaaagtgctgggattacaggcgtgagacactgcgcccagcctcatccctgtgaatttcttattgtacacaagttctttcactatctgtgtgcagtgctctgaggggacagacaaggcttgggtgtatatgccaaccagatctcattgaagtatcagcttgtttggtactaggtgcaagtgtagcatgtcacatgtgaccatgttggatcattgacaatttttaggtatgtactgacctacatttatgatgaagatcctgagcggaggttaagatattaagttattttccatatgaatcagaattatattgattctgtgcaatcaaaacaaaaggcagaatagaatgctgagattggttaagtttgcaatgaccatcttgaaccacagatttctgctatgtgtcatcaaaacatctagttctgagtaacattttcacgattgttataaaattataggtgtgaacttctaaaataaaggaatgctaataaaatga

SEQ ID NO: 155217 - DNA, 2529 bp, Homo sapiens
  Payload ID: 10513
  Gene Symbol: MOAP1
  Gene Name: modulator of apoptosis 1
  Uniprot ID: Q96BY2
  ENST ID: ENST00000556883
  CDS Start-End: 486-1541
atgacgtcagatcgcccccgcccgccgcgcagcttccccgagcgagaccaaaacaggtggaatccgggctggagccggagctccggcggcgcgggtggcggcacgtccctccaggtgggtggctctctgggtctggcgactcagcgctcctcagccttgccccctggtgcccgctcgcgactgtcatcgccccatcacttctcgttgcagacagtaccacaggcacctggagtaccggcatcggtcgctgtggcccccgagtgtccgtcagagcctaggggagcctgccctcccgcgcctcgtcggggcccggccaggcaccttggccgccggcgcacggacgcgggcacgagcactagatcacggctgctggacctcggcacgttgacaagatttctctggggtaccgcggaggattactttgaatttcggtggtcgcctgtggtctggcatatttagaacttaagtctattatttcgggcaccatgactttgaggcttttagaagactggtgcagggggatggacatgaaccctcggaaagcgctattgattgccggcatctcccagagctgcagtgtggcagaaatcgaggaggctctgcaggctggtttagctcccttgggggagtacagactgcttggaaggatgttcaggagggatgagaacaggaaagtagccttagtagggcttactgcggagactagtcacgccctggtccctaaggagataccgggaaaagggggtatctggagagtgatctttaagccccctgacccagataatacatttttaagcagattaaatgaatttttagcgggagagggcatgacagtgggtgagttgagcagagctcttggacatgaaaatggctccttagacccagagcagggcatgatcccggaaatgtgggcccctatgttggcacaggcattagaggctcttcagcctgccctgcaatgcttgaagtataaaaagctgagagtgttctcgggcagggagtctccagaaccaggagaagaagaatttggacgctggatgtttcatactactcagatgataaaggcgtggcaggtgccagatgtagagaagagaaggcgattgctagagagccttcgaggcccagcacttgatgttattcgtgtcctcaagataaacaatcctttaattactgtcgatgaatgtctgcaggctcttgaggaggtatttggggttacagataatcctagggagttgcaggtcaaatatctaaccacttaccagaaggatgaggaaaagttgtcggcttatgtactaaggctggagcctttgttacagaagctggtacagagaggagcaattgagagagatgctgtgaatcaggcccgcctagaccaagtcattgctggggcagtccacaaaacaattcgcagagagcttaatctgccagaggatggcccagcccctggtttcttgcagttattggtactaataaaggattatgaggcagctgaggaggaggaggcccttctccaggcaatattggaaggtaatttcacctgagtctcagggaaccacgaagggatatggcaatgagtagagcatgaaggtagaacagtctatatactcttgtgacacatacaatccctaccttgtgctgccaagtaactcatttttgtgcaattctcagtataagccctttgtcgtttctgtgcctatttaaagtctcctaaaggtgtaattgactaggaaggatgtagttctacactgccatttacctatttaaattcatccttgtgaatatctttgttgttgttgttgagacagagtctcgctctgtcacccaggctggagtgcagtggcgtgatcttggctcactgcatcctccgccttccaggtttaagctattctcctgcctcagttgcccgagtagctgggactacaggcatgtgccaccacgcccagctaagttttgcattatcagtagagacggggtttcaccatgttggccaggctagtttcgaactcctgacctcaagtgatccacctgcttcggcctctgaaagtgctgggattacaggcgtgagacactgcgcccagcctcatccctgtgaatttcttattgtacacaagttctttcactatctgtgtgcagtgctctgaggggacagacaaggcttgggtgtatatgccaaccagatctcattgaagtatcagcttgtttggtactaggtgcaagtgtagcatgtcacatgtgaccatgttggatcattgacaatttttaggtatgtactgacctacatttatgatgaagatcctgagcggaggttaagatattaagttattttccatatgaatcagaattatattgattctgtgcaatcaaaacaaaaggcagaatagaatgctgagattggttaagtttgcaatgaccatcttgaaccacagatttctgctatgtgtcatcaaaacatctagttctgagtaacattttcacgattgttataaaattataggtgtgaacttctaaaataaaggaatgctaataaaa

SEQ ID NO: 155218 - DNA, 2441 bp, Homo sapiens; identical to SEQ ID NO: 155216
  Payload ID: 10513
  Gene Symbol: MOAP1
  Gene Name: modulator of apoptosis 1
  Uniprot ID: Q96BY2
  ENST ID: ENST00000616515
  CDS Start-End: 395-1450

SEQ ID NO: 155219 - DNA, 2529 bp, Homo sapiens; identical to SEQ ID NO: 155217
  Payload ID: 10513
  Gene Symbol: MOAP1
  Gene Name: modulator of apoptosis 1
  Uniprot ID: Q96BY2
  ENST ID: ENST00000627896
  CDS Start-End: 486-1541

SEQ ID NO: 155220 - DNA, 3944 bp, Homo sapiens
  Payload ID: 10514
  Gene Symbol: MSN
  Gene Name: moesin
  Uniprot ID: P26038
  ENST ID: ENST00000360270
  CDS Start-End: 173-1906
gggtttgtgaagtcgtggcccgttagcaggaagcctaacagtcgccccgacgctagtgagggacccaatctgagtccccggccagccgaatccaagccgtgtgtactgcgtgctcagcactgcccgacagtcctagctaaacttcgccaactccgctgcctttgccgccaccatgcccaaaacgatcagtgtgcgtgtgaccaccatggatgcagagctggagtttgccatccagcccaacaccaccgggaagcagctatttgaccaggtggtgaaaactattggcttgagggaagtttggttctttggtctgcagtaccaggacactaaaggtttctccacctggctgaaactcaataagaaggtgactgcccaggatgtgcggaaggaaagccccctgctctttaagttccgtgccaagttctaccctgaggatgtgtccgaggaattgattcaggacatcactcagcgcctgttctttctgcaagtgaaagagggcattctcaatgatgatatttactgcccgcctgagaccgctgtgctgctggcctcgtatgctgtccagtctaagtatggcgacttcaataaggaagtgcataagtctggctacctggccggagacaagttgctcccgcagagagtcctggaacagcacaaactcaacaaggaccagtgggaggagcggatccaggtgtggcatgaggaacaccgtggcatgctcagggaggatgctgtcctggaatatctgaagattgctcaagatctggagatgtatggtgtgaactacttcagcatcaagaacaagaaaggctcagagctgtggctgggggtggatgccctgggtctcaacatctatgagcagaatgacagactaactcccaagataggcttcccctggagtgaaatcaggaacatctctttcaatgataagaaatttgtcatcaagcccattgacaaaaaagccccggacttcgtcttctatgctccccggctgcggattaacaagcggatcttggccttgtgcatggggaaccatgaactatacatgcgccgtcgcaagcctgataccattgaggtgcagcagatgaaggcacaggcccgggaggagaagcaccagaagcagatggagcgtgctatgctggaaaatgagaagaagaagcgtgaaatggcagagaaggagaaagagaagattgaacgggagaaggaggagctgatggagaggctgaagcagatcgaggaacagactaagaaggctcagcaagaactggaagaacagacccgtagggctctggaacttgagcaggaacggaagcgtgcccagagcgaggctgaaaagctggccaaggagcgtcaagaagctgaagaggccaaggaggccttgctgcaggcctcccgggaccagaaaaagactcaggaacagctggccttggaaatggcagagctgacagctcgaatctcccagctggagatggcccgacagaagaaggagagtgaggctgtggagtggcagcagaaggcccagatggtacaggaagacttggagaagacccgtgctgagctgaagactgccatgagtacacctcatgtggcagagcctgctgagaatgagcaggatgagcaggatgagaatggggcagaggctagtgctgacctacgggctgatgctatggccaaggaccgcagtgaggaggaacgtaccactgaggcagagaagaatgagcgtgtgcagaagcacctgaaggccctcacttcggagctggccaatgccagagatgagtccaagaagactgccaatgacatgatccatgctgagaacatgcgactgggccgagacaaatacaagaccctgcgccagatccggcagggcaacaccaagcagcgcattgacgaatttgagtctatgtaatgggcacccagcctctagggacccctcctccctttttccttgtccccacactcctacacctaactcacctaactcatactgtgctggagccactaactagagcagccctggagtcatgccaagcatttaatgtagccatgggaccaaacctagccccttagcccccacccacttccctgggcaaatgaatggctcactatggtgccaatggaacctcctttctcttctctgttccattgaatctgtatggctagaatatcctacttctccagcctagaggtactttccacttgattttgcaaatgcccttacacttactgttgtcctatgggagtcaagtgtggagtaggttggaagctagctcccctcctctcccctaccactgtcttcttcagggtcctgagatttacacggttggagtgttatgcggtctagggaatgagacaggacctaggatatcttctccaggatgtcaactgacctaaaatttgccctcccatcccgtttagagttatttaggctttgtaacgattgggggataaaaagatgttcagtcatttttgtttctacctcccagatcggatctgttgcaaactcagcctcaataagccttgtcgttgactttagggactcaatttctccccagggtggatgggggaaatggtgccttcaagaccttcaccaaacatactagaagggcattggccattctattgtggcaaggctgagtagaagatcctaccccaattccttgtaggagtataggccggtctaaagtgagctctatgggcagatctaccccttacttattattccagatctgcagtcacttcgtgggatctgcccctccctgcttcaatacccaaatcctctccagctataacagtagggatgagtacccaaaagctcagccagccccatcaggactcttgtgaaaagagaggatatgttcacacctagcgtcagtattttccctgctaggggttttaggtctcttcccctctcagagctacttgggccatagctcctgctccacagccatcccagccttggcatctagagcttgatgccagtaggctcaactagggagtgagtgcaaaaagctgagtatggtgagagaagcctgtgccctgatccaagtttactcaaccctctcaggtgaccaaaatccccttctcatcactcccctccaaagaggtgactgggccctgcctctgtttgacaaacctctaacccaggtcttgacaccagctgttctgtcccttggagctgtaaaccagagagctgctggggattctggcctagtcccttccacacccccaccccttgctctcaacccaggagcatccacctccttctctgtctcatgtgtgctcttcttctttctacagtattatgtactctactgatatctaaatattgatttctgccttccttgctaatgcaccattagaagatattagtcttggggcaggatgattttggcctcattactttaccacccccacacctggaaagcatatactatattacaaaatgacattttgccaaaattattaatataagaagctttcagtattagtgatgtcatctgtcactataggtcatacaatccattcttaaagtacttgttatttgtttttattattactgtttgtcttctccccagggttcagtcctcaaggggccatcctgtcccaccatgcagtgcccctagcttagagcctccctcaattccccctggccaccaccccccactctgtgcctgaccttgaggagtcttgtgtgcattgctgtgaattagctcacttggtgatatgtcctatattggctaaattgaaacctggaattgtggggcaatctattaatagctgccttaaagtcagtaacttacccttagggaggctgggggaaaaggttagattttgtattcaggggttttttgtgtactttttgggttttttaaaaattgtttttggaggggtttatgctcaatccatgttctatttcagtgccaataaaatttaggaagacttca

SEQ ID NO: 155221 - DNA, 568 bp, Homo sapiens
  Payload ID: 10514
  Gene Symbol: MSN
  Gene Name: moesin
  ENST ID: ENST00000609672
  CDS Start-End: 258-568
actcatctggccacagcaggaagaagaggcgcccggaaaaccttagctcttggctatctcttccctgagcacaccctggccctggggcctgagatctctccatgcaggggcagccatgagctccgggggcagcagcaaggctggccacaccacccatcagccacctccagccccgccgctcaaccagccatcagtcccttaactgccagtgttcgtggaccatgcaaaacaaccaaatcagtgtgcgtgtgaccaccatggatgcagagctggagtttgccatccagcccaacaccaccgggaagcagctatttgaccaggtggtgaaaactattggcttgagggaagtttggttctttggtctgcagtaccaggacactaaaggtttctccacctggctgaaactcaataagaaggtgactgcccaggatgtgcggaaggaaagccccctgctctttaagttccgtgccaagttctaccctgaggatgtgtccgaggaattgattcaggacatcactcagcgcctgttctttctgcaagtgaaagagggcattctcaatgatgatat

SEQ ID NO: 155222 - DNA, 3846 bp, Homo sapiens
  Payload ID: 10515
  Gene Symbol: MKX
  Gene Name: mohawk homeobox
  Uniprot ID: Q8IYA7
  ENST ID: ENST00000375790
  CDS Start-End: 434-1492
gactcggcgggcccggggctccccggcagcggctcctctgctaggggttaacagcagcccccgcggccgggcgggcgcggacgcttcctctccacccgcccgggaacgtggataccgcgcccgcaggatgttcgccggctgggaccggcagtcaggaaacatgagaaggcctcgctattcctgttcccgggcggcgcgcgccgggctgggtaaataaagccgagacgacggcggtggcggtggtgagcgcgctggagcccgcgtggagaacatgcggcggggatgggagtgcgcctagtctcgaggcgggagagccagccgccctgcagccggccgtcggccccgcagccacagccgagccccgctgcggagctcccggcggcccagccccgaggctctgcggccgcgccgcgcgtccctaccaaccgacaccatgaacaccatcgtcttcaacaagctcagcggtgcggtgctgtttgaggacggaggcgcctcggagcgggagcggggtggccggccctacagcggtgtcctggacagtcctcacgcccgccccgaggtgggcattcccgacggcccgcccctcaaggacaacctcggcctgagacaccggaggaccggcgcccggcagaatggcgggaaggtgaggcacaagcggcaggccctgcaagacatggcgcgacccctcaagcagtggctttacaagcaccgtgacaacccgtaccccaccaagaccgagaagatactcttggccctcggctcgcagatgacgctagtgcaggtgtcaaattggtttgctaatgcaagacgtcggcttaagaataccgttcgacagccagatttaagctgggctttgagaataaagttatacaacaagtatgttcaaggcaatgctgaacggcttagcgtaagcagtgatgactcatgttctgaagatggagaaaatcctccaagaacccacatgaacgaagggggctataataccccagttcaccatcctgtgattaaaagtgagaattcggtcatcaaagcgggagtgaggccagagtcacgggccagtgaggactacgtggcaccccccaaatacaagagcagcttgttgaaccgttaccttaatgactctttgagacatgtcatggccacgaacactaccatgatgggaaaaacaaggcaaagaaaccactcgggatcttttagctccaatgaatttgaggaagaattagtgtctccatcgtcatcagaaactgaaggcaactttgtctatcgcacagacactctggaaaacggatccaataagggtgaaagcgcagctaacagaaaaggaccaagcaaggatgacacgtattggaaggagatcaacgcagctatggccttaacaaatcttgcacagggaaaggacaaactgcagggaactaccagctgcatcatccagaagtcgtcccatatagcagaagtaaagactgtcaaagtgccgctggtgcagcagttttaagagcttgttgcttttcagatccaatggatgttctttccggtgttttcatcaaccctcatcctaagagccgaagcagggatgaaaatgactctctcccaaacctcttcttatttttaattatcccaaatatatcatttagttgcttctataaaagacatataaattataaaaaactcattttaatcaaaaatattaacttattttatgttactcaaactatgcataaaacatctgcattaccattacagtaagtgccttgcttcccgacaataagctccaacgtgggcatagttgaacaagctatgcctcaaaatgccaacgccatatgcttattagcctgtgtgcatcattccagacgggcctaatcattccaggactgaaaccagaatcgctgaaagcccttgaaatacattcaataattcatatgttaaaacttggatatctgttcagcccaaatgaaatcttccttttaaaaaacgtctacattattgaaaattgttcaatgtgcttttcagagtgacggtgagaattttatgcatgtatcttgcctgcatatttgatatgttacaaacttccaaaattcaaggtgcagcgatccacagaacgttgtacatttaagaagtgattccttcaagctaatttaaaatttcattgaacacatggtgaccaggaaaactttttttcaagcactgttggaaagcaccacaaagccctttagaattaatctggatttgtttctcaagttctgctgaagtttaaaaaaaaactttattatacaaataactcaaaattttcctgtgtaaaactaaacctgtagttttaaaacataatcctgtttgcattagagctcactgtctttttgtgatggaaactgtgttcgtatggaatgactaaaaatcttttatttggtttgtttcaaattacaattgctgatggacaatttgtattgcagcgagaacaacagaatgaaagaaatgtatctctgtgcggctatacatatacatacataaaattgatttttaaatttaaaacatatggaaaacaaaacattgaacagtttgaattttgccaagttggacattaaagtaaaaatgaagtgaaatcatgcattgaaagaaaacattttgtttctaaattagtctaccattgagtgagaataatcaatatcaagaaagaagactatctttctcaactaaacaataatattccaatcagcttgggaagacctgaaacttgaataagcagtggaaatgccaaatataacagagggtatgtgctacagagaagtaaaaagggtttgactttttatgatgggattttttttttctgggtatgtaatctattttttttttaaactggaaagcatttttgtcagtgtgaatgagggtcaatagtgcagccagtggtgacatttttctttattttgcaaaatgcttttaaaaccaaaggctgctctagttgatggacagtatcagtcttgatctaaattgtaggacactttttcatgtaacataacatttggggattgggtttatttagtgtaatgaagataatttgatataaaaatattttgtgtatatatatatatttttactttgttttctaaattgctgtttgcagtaacagtaagcgcaaagcaaaatatataagttatgactgtatgatcagatgaagtatgagttcttttggtttgcatccttaaatagttagagatctctgataaaaactttggaatctttgcaaaacaatacaaaaatgccaaaatgtgagcatgtcaatgaaaactaaagacaaatacttcactctttttcatactattataagttattctggtattaaatatgttaataaaagtgtttttgttttgacatatttcagttaaatgaatgaatgctggttgtattttatttgaatgagtcatgattcatgtttgccatctttttaaaaaaatcagcaaatttcttctatgttataaattatagatgacaaggcaatataggacaactattcacatgattttttttaataccaaaggttggaagattttataattaacatgtcaagaagactttatagtaagcacatccttggtaatatctccaattgcaatgactttttaatttattttttcttttgctgctttaacattttctggatattaaaatccccccagtcctttaaaagaatcttgaacaatgctgagccggcagctgaaaatctaactcataatttatgttgtagagaaatagaattacctctattctttgttttgccatatgtaatcattttaataaaattaataactgccaggagttcttgacagatttaaaataaaagttaatttctagacctcg

SEQ ID NO: 155223 - DNA, 3638 bp, Homo sapiens
  Payload ID: 10515
  Gene Symbol: MKX
  Gene Name: mohawk homeobox
  Uniprot ID: Q8IYA7
  ENST ID: ENST00000419761
  CDS Start-End: 226-1284
aaataaagccgagacgacggcggtggcggtggtgagcgcgctggagcccgcgtggagaacatgcggcggggatgggagtgcgcctagtctcgaggcgggagagccagccgccctgcagccggccgtcggccccgcagccacagaagccgagccccgctgcggagctcccggcggcccagccccgaggctctgcggccgcgccgcgcgtccctaccaaccgacaccatgaacaccatcgtcttcaacaagctcagcggtgcggtgctgtttgaggacggaggcgcctcggagcgggagcggggtggccggccctacagcggtgtcctggacagtcctcacgcccgccccgaggtgggcattcccgacggcccgcccctcaaggacaacctcggcctgagacaccggaggaccggcgcccggcagaatggcgggaaggtgaggcacaagcggcaggccctgcaagacatggcgcgacccctcaagcagtggctttacaagcaccgtgacaacccgtaccccaccaagaccgagaagatactcttggccctcggctcgcagatgacgctagtgcaggtgtcaaattggtttgctaatgcaagacgtcggcttaagaataccgttcgacagccagatttaagctgggctttgagaataaagttatacaacaagtatgttcaaggcaatgctgaacggcttagcgtaagcagtgatgactcatgttctgaagatggagaaaatcctccaagaacccacatgaacgaagggggctataataccccagttcaccatcctgtgattaaaagtgagaattcggtcatcaaagcgggagtgaggccagagtcacgggccagtgaggactacgtggcaccccccaaatacaagagcagcttgttgaaccgttaccttaatgactctttgagacatgtcatggccacgaacactaccatgatgggaaaaacaaggcaaagaaaccactcgggatcttttagctccaatgaatttgaggaagaattagtgtctccatcgtcatcagaaactgaaggcaactttgtctatcgcacagacactctggaaaacggatccaataagggtgaaagcgcagctaacagaaaaggaccaagcaaggatgacacgtattggaaggagatcaacgcagctatggccttaacaaatcttgcacagggaaaggacaaactgcagggaactaccagctgcatcatccagaagtcgtcccatatagcagaagtaaagactgtcaaagtgccgctggtgcagcagttttaagagcttgttgcttttcagatccaatggatgttctttccggtgttttcatcaaccctcatcctaagagccgaagcagggatgaaaatgactctctcccaaacctcttcttatttttaattatcccaaatatatcatttagttgcttctataaaagacatataaattataaaaaactcattttaatcaaaaatattaacttattttatgttactcaaactatgcataaaacatctgcattaccattacagtaagtgccttgcttcccgacaataagctccaacgtgggcatagttgaacaagctatgcctcaaaatgccaacgccatatgcttattagcctgtgtgcatcattccagacgggcctaatcattccaggactgaaaccagaatcgctgaaagcccttgaaatacattcaataattcatatgttaaaacttggatatctgttcagcccaaatgaaatcttccttttaaaaaacgtctacattattgaaaattgttcaatgtgcttttcagagtgacggtgagaattttatgcatgtatcttgcctgcatatttgatatgttacaaacttccaaaattcaaggtgcagcgatccacagaacgttgtacatttaagaagtgattccttcaagctaatttaaaatttcattgaacacatggtgaccaggaaaactttttttcaagcactgttggaaagcaccacaaagccctttagaattaatctggatttgtttctcaagttctgctgaagtttaaaaaaaaactttattatacaaataactcaaaattttcctgtgtaaaactaaacctgtagttttaaaacataatcctgtttgcattagagctcactgtctttttgtgatggaaactgtgttcgtatggaatgactaaaaatcttttatttggtttgtttcaaattacaattgctgatggacaatttgtattgcagcgagaacaacagaatgaaagaaatgtatctctgtgcggctatacatatacatacataaaattgatttttaaatttaaaacatatggaaaacaaaacattgaacagtttgaattttgccaagttggacattaaagtaaaaatgaagtgaaatcatgcattgaaagaaaacattttgtttctaaattagtctaccattgagtgagaataatcaatatcaagaaagaagactatctttctcaactaaacaataatattccaatcagcttgggaagacctgaaacttgaataagcagtggaaatgccaaatataacagagggtatgtgctacagagaagtaaaaagggtttgactttttatgatgggattttttttttctgggtatgtaatctattttttttttaaactggaaagcatttttgtcagtgtgaatgagggtcaatagtgcagccagtggtgacatttttctttattttgcaaaatgcttttaaaaccaaaggctgctctagttgatggacagtatcagtcttgatctaaattgtaggacactttttcatgtaacataacatttggggattgggtttatttagtgtaatgaagataatttgatataaaaatattttgtgtatatatatatatttttactttgttttctaaattgctgtttgcagtaacagtaagcgcaaagcaaaatatataagttatgactgtatgatcagatgaagtatgagttcttttggtttgcatccttaaatagttagagatctctgataaaaactttggaatctttgcaaaacaatacaaaaatgccaaaatgtgagcatgtcaatgaaaactaaagacaaatacttcactctttttcatactattataagttattctggtattaaatatgttaataaaagtgtttttgttttgacatatttcagttaaatgaatgaatgctggttgtattttatttgaatgagtcatgattcatgtttgccatctttttaaaaaaatcagcaaatttcttctatgttataaattatagatgacaaggcaatataggacaactattcacatgattttttttaataccaaaggttggaagattttataattaacatgtcaagaagactttatagtaagcacatccttggtaatatctccaattgcaatgactttttaatttattttttcttttgctgctttaacattttctggatattaaaatccccccagtcctttaaaagaatcttgaacaatgctgagccggcagctgaaaatctaactcataatttatgttgtagagaaatagaattacctctattctttgttttgccatatgtaatcattttaataaaattaataactgccaggagttcttgacagatttaaaataaaagttaatttctagacctcg

SEQ ID NO: 155224 - DNA, 1002 bp, Homo sapiens
  Payload ID: 10515
  Gene Symbol: MKX
  Gene Name: mohawk homeobox
  ENST ID: ENST00000460919
  CDS Start-End: 131-1002
ctgagcactctcagccagtaagtaacgagatgcaccttcctctcctagaagccgagccccgctgcggagctcccggcggcccagccccgaggctctgcggccgcgccgcgcgtccctaccaaccgacaccatgaacaccatcgtcttcaacaagctcagcggtgcggtgctgtttgaggacggaggcgcctcggagcgggagcggggtggccggccctacagcggtgtcctggacagtcctcacgcccgccccgaggtgggcattcccgacggcccgcccctcaaggacaacctcggcctgagacaccggaggaccggcgcccggcagaatggcgggaaggtgaggcacaagcggcaggccctgcaagacatggcgcgacccctcaagcagtggctttacaagcaccgtgacaacccgtaccccaccaagaccgagaagatactcttggccctcggctcgcagatgacgctagtgcaggtgtcaaattggtttgctaatgcaagacgtcggcttaagaataccgttcgacagccagatttaagctgggctttgagaataaagttatacaacaagtatgttcaaggcaatgctgaacggcttagcgtaagcagtgatgactcatgttctgaagatggagaaaatcctccaagaacccacatgaacgaagggggctataataccccagttcaccatcctgtgattaaaagtgagaattcggtcatcaaagcgggagtgaggccagagtcacgggccagtgaggactacgtggcaccccccaaatacaagagcagcttgttgaaccgttaccttaatgactctttgagacatgtcatggccacgaacactaccatgatgggaaaaacaaggcaaagaaaccactcgggatcttttagctccaatgaatttgaggaagaattagtgtctccatcgtcatcagaaactgaaggcaactttgtctatcgcacagtggaaaacttaggttctttgagtgaggactcctg

SEQ ID NO: 155225 - DNA, 431 bp, Homo sapiens
  Payload ID: 10515
  Gene Symbol: MKX
  Gene Name: mohawk homeobox
  ENST ID: ENST00000561227
  CDS Start-End: 258-431
aaggtctggtggagaggcgctcgggtagcggccaaggctggcccaagggtctgcgcggagcttgggagcccacctggccgcgcctcctttgctttaaaattattcgccggcgttgggggagggggacacttctgcagggagtgacctccccggccacagtctggagtgaatcgggaagccgagccccgctgcggagctcccggcggcccagccccgaggctctgcggccgcgccgcgcgtccctaccaaccgacaccatgaacaccatcgtcttcaacaagctcagcggtgcggtgctgtttgaggacggaggcgcctcggagcgggagcggggtggccggccctacagcggtgtcctggacagtcctcacgcccgccccgaggtgggcattcccgacggcccgcccctcaaggacaacctcggcctgaga

SEQ ID NO: 155226 - DNA, 1725 bp, Homo sapiens
  Payload ID: 10516
  Gene Symbol: MOK
  Gene Name: MOK protein kinase
  ENST ID: ENST00000193029
  CDS Start-End: 1-1257
attaaaaactataaagcaattggcaaaataggagagggaacgttttctgaagttatgaagatgcaaagcctgagagatggaaactactatgcatgtaaacaaatgaagcagcgctttgaaagtattgagcaagtcaacaacctacgagagatccaagcactgaggcgcctgaatccgcacccaaacattcttatgttgcatgaagtggtttttgacagaaaatctggttctcttgcactaatatgtgaacttatggacatgaatatttatgagctaatacgagggagaagatacccattatcagaaaaaaaaattatgcactatatgtaccagttatgtaagtccctggatcatattcacagaaatggaatatttcacagagatgtaaaaccagaaaatatactaataaaggatgtcctgaaattaggggactttggctcctgccggagtgtctattccaagcagccgtacacggaatacatctccacccgctggtaccgggccccggagtgtctcctcactgatgggttctacacgtacaagatggacctgtggagcgccggctgtgtgttctacgagatcgccagtctgcagcccctctttcctggagtaaatgaactggaccaaatctcaaaaatccacgatgtcatcggcacacccgctcagaagatcctcaccaagttcaaacagtcgagagctatgaattttgattttccttttaaaaagggatcaggaatacctctactaacaaccaatttgtccccacaatgcctctccctcctgcacgcaatggtggcctatgatcccgatgagagaatcgccgcccaccaggccctgcagcacccctacttccaagaacagaggaaaacagagaagcgggctctgggcagccacagaaaagctggctttccggagcaccctgtggcaccggaaccactcagtaacagctgccagatttccaaggagggcagaaagcagaaacagtccctaaagcaagaggaggaccgtcccaagagacgaggaccggcctatgtcatggaactgcccaaactaaagctttcgggagtggtcagactgtcgtcttactccagccccacgctgcagtccgtgcttggatctggaacaaatggaagagtgccggtgctgagacccttgaagtgcatccctgcgagcaagaagacagatccgcagaaggaccttaagcctgccccgcagcagtgtcgcctgcccaccatagtgcggaaaggcggaagataactgagcagcaccgtcgtctcgacttcggaggcaacaccaagcccgaccgggccaggcctgggtgatctgctgctgagacgccacggagggctggggatgcgcctgcgtccgtttcgcgctggccggggctctgggtgctgccctgcgccctgccgcacccgcggcccgcgcagctgcctaggatgttctgggctaatatacttgtaaaaccaccgcattctagggttttctttcattttcgttaagaatttggggcaggaaatactttgtaactttgtatatgaatcaaaacaaacgagcaggcatttctgtgatgtgttgggcgtggttggaaggtgggttctgcgtgtcccttcccagcgctgctggtcagtcgtggagcgccatcatgtcttaccagtgacgctgctgacacccctgacttttattaaagaataagctgtcgttacagtattgcattttaatgtt

SEQ ID NO: 155227 - DNA, 1940 bp, Homo sapiens
  Payload ID: 10516
  Gene Symbol: MOK
  Gene Name: MOK protein kinase
  Uniprot ID: Q9UQ07
  ENST ID: ENST00000361847
  CDS Start-End: 233-1492
atcttgcgcatgcgcaggcgacagctcatggcgttcagggcctgacggttgctagggtgacagggacacaacatggcggcgggatctctaacgctctccttcgagggaccaccacggagatcctagtgcgggaccccgcctcagggaagtggaaagcagggggacaaccttcctgcttctttcttttccgtccagtgtcggcaaggggttgtcaccggcttccgcatccaagatgaagaactataaagcaattggcaaaataggagagggaacgttttctgaagttatgaagatgcaaagcctgagagatggaaactactatgcatgtaaacaaatgaagcagcgctttgaaagtattgagcaagtcaacaacctacgagagatccaagcactgaggcgcctgaatccgcacccaaacattcttatgttgcatgaagtggtttttgacagaaaatctggttctcttgcactaatatgtgaacttatggacatgaatatttatgagctaatacgagggagaagatacccattatcagaaaaaaaaattatgcactatatgtaccagttatgtaagtccctggatcatattcacagaaatggaatatttcacagagatgtaaaaccagaaaatatactaataaagcaggatgtcctgaaattaggggactttggctcctgccggagtgtctattccaagcagccgtacacggaatacatctccacccgctggtaccgggccccggagtgtctcctcactgatgggttctacacgtacaagatggacctgtggagcgccggctgtgtgttctacgagatcgccagtctgcagcccctctttcctggagtaaatgaactggaccaaatctcaaaaatccacgatgtcatcggcacacccgctcagaagatcctcaccaagttcaaacagtcgagagctatgaattttgattttccttttaaaaagggatcaggaatacctctactaacaaccaatttgtccccacaatgcctctccctcctgcacgcaatggtggcctatgatcccgatgagagaatcgccgcccaccaggccctgcagcacccctacttccaagaacagaggaaaacagagaagcgggctctgggcagccacagaaaagctggctttccggagcaccctgtggcaccggaaccactcagtaacagctgccagatttccaaggagggcagaaagcagaaacagtccctaaagcaagaggaggaccgtcccaagagacgaggaccggcctatgtcatggaactgcccaaactaaagctttcgggagtggtcagactgtcgtcttactccagccccacgctgcagtccgtgcttggatctggaacaaatggaagagtgccggtgctgagacccttgaagtgcatccctgcgagcaagaagacagatccgcagaaggaccttaagcctgccccgcagcagtgtcgcctgcccaccatagtgcggaaaggcggaagataactgagcagcaccgtcgtctcgacttcggaggcaacaccaagcccgaccgggccaggcctgggtgatctgctgctgagacgccacggagggctggggatgcgcctgcgtccgtttcgcgctggccggggctctgggtgctgccctgcgccctgccgcacccgcggcccgcgcagctgcctaggatgttctgggctaatatacttgtaaaaccaccgcattctagggttttctttcattttcgttaagaatttggggcaggaaatactttgtaactttgtatatgaatcaaaacaaacgagcaggcatttctgtgatgtgttgggcgtggttggaaggtgggttctgcgtgtcccttcccagcgctgctggtcagtcgtggagcgccatcatgtcttaccagtgacgctgctgacacccctgacttttattaaagaataagctgtcgtta

SEQ ID NO: 155228 - DNA, 574 bp, Homo sapiens
  Payload ID: 10516
  Gene Symbol: MOK
  Gene Name: MOK protein kinase
  ENST ID: ENST00000524207
  CDS Start-End: 168-302
acacaacatggcggcgggatctctaacgctctccttcgagggaccaccacggagatcctagtgcgggaccccgcctcagggaagtggaaagcagggggacaaccttcctgcttctttcttttccgtccagtgtcggcaaggggttgtcaccggcttccgcatccaagatgaagaactataaagcaattggcaaaataggagagggaacgttttctgaagttatgaagatgcaaagcctgagagatggaaactactatgcatgtaaacaaatgaagcagcgctttgaaagactagggaattgaaattcggagagatcaagttccccacctggcccgttgctacccaacctacacgtcgtggagctgactctgagcccagtattgagcaagtcaacaacctacgagagatccaagcactgaggcgcctgaatccgcacccaaacattcttatgttgcatgaagtggtttttgacagaaaatctggttctcttgcactaatatgtgaacttatggacatgaatatttatgagctaatacgagggagaagatacccattatcagaaaaaaaaattatg

SEQ ID NO: 155229 - DNA, 580 bp, Homo sapiens
  Payload ID: 10516
  Gene Symbol: MOK
  Gene Name: MOK protein kinase
  ENST ID: ENST00000518482
  CDS Start-End: 187-366
ggttgctagggtgacagggacacaacatggcggcgggatctctaacgctctccttcgagggaccaccacggagatcctagtgcgggaccccgcctcagggaagtggaaagcagggggacaaccttcctgcttctttcttttccgtccagtgtcggcaaggggttgtcaccggcttccgcatccaagatgaagaactataaagcaattggcaaaataggagagggaacgttttctgaagttatgaagatgcaaagcctgagagatggaaactactatgcatgtaaacaaatgaagcagcgctttgaaagggagaagatacccattatcagaaaaaaaaattatgcactatatgtaccagttatgtaagtccctggatcatattcacagaaatggaatatttcacagagatgtaaaaccagaaaatatactaataaaggttgtaaaaaatggtttatttaataaatgccatcaacataactgactgcacctggaagaaaataattgaaagcaccattttcacaccgcagacaaaaatgaaccctattcagacggccgttcaaaccttctagagggaaatgtg

SEQ ID NO: 155230 - DNA, 1539 bp, Homo sapiens
  Payload ID: 10516
  Gene Symbol: MOK
  Gene Name: MOK protein kinase
  Uniprot ID: Q9UQ07
  ENST ID: ENST00000524214
  CDS Start-End: 218-1387
aggcgacagctcatggcgttcagggcctgacggttgctagggtgacagggacacaacatggcggcgggatctctaacgctctccttcgagggaccaccacggagatcctagtgcgggaccccgcctcagggaagtggaaagcagggggacaaccttcctgcttctttcttttccgtccagtgtcggcaaggggttgtcaccggcttccgcatccaagatgaagaactataaagcaattggcaaaataggagagggaacgttttctgaagttatgaagatgcaaagcctgagagatggaaactactatgcatgtaaacaaatgaagcagcgctttgaaagtgacagaaaatctggttctcttgcactaatatgtgaacttatggacatgaatatttatgagctaatacgagggagaagatacccattatcagaaaaaaaaattatgcactatatgtaccagttatgtaagtccctggatcatattcacagaaatggaatatttcacagagatgtaaaaccagaaaatatactaataaagcaggatgtcctgaaattaggggactttggctcctgccggagtgtctattccaagcagccgtacacggaatacatctccacccgctggtaccgggccccggagtgtctcctcactgatgggttctacacgtacaagatggacctgtggagcgccggctgtgtgttctacgagatcgccagtctgcagcccctctttcctggagtaaatgaactggaccaaatctcaaaaatccacgatgtcatcggcacacccgctcagaagatcctcaccaagttcaaacagtcgagagctatgaattttgattttccttttaaaaagggatcaggaatacctctactaacaaccaatttgtccccacaatgcctctccctcctgcacgcaatggtggcctatgatcccgatgagagaatcgccgcccaccaggccctgcagcacccctacttccaagaacagaggaaaacagagaagcgggctctgggcagccacagaaaagctggctttccggagcaccctgtggcaccggaaccactcagtaacagctgccagatttccaaggagggcagaaagcagaaacagtccctaaagcaagaggaggaccgtcccaagagacgaggaccggcctatgtcatggaactgcccaaactaaagctttcgggagtggtcagactgtcgtcttactccagccccacgctgcagtccgtgcttggatctggaacaaatggaagagtgccggtgctgagacccttgaagtgcatccctgcgagcaagaagacagatccgcagaaggaccttaagcctgccccgcagcagtgtcgcctgcccaccatagtgcggaaaggcggaagataactgagcagcaccgtcgtctcgacttcggaggcaacaccaagcccgaccgggccaggcctgggtgatctgctgctgagacgccacggagggctggggatgcgcctgcgtccgtttcgcgctggccggggctctgggtgctgccctgcgccctg

SEQ ID NO: 155231 - DNA, 617 bp, Homo sapiens
  Payload ID: 10516
  Gene Symbol: MOK
  Gene Name: MOK protein kinase
  ENST ID: ENST00000520238
  CDS Start-End: 175-309
gacagggacacaacatggcggcgggatctctaacgctctccttcgagggaccaccacggagatcctagtgcgggaccccgcctcagggaagtggaaagcagggggacaaccttcctgcttctttcttttccgtccagtgtcggcaaggggttgtcaccggcttccgcatccaagatgaagaactataaagcaattggcaaaataggagagggaacgttttctgaagttatgaagatgcaaagcctgagagatggaaactactatgcatgtaaacaaatgaagcagcgctttgaaagactagggaattgaaattcggagagatcaagttccccacctggcccgttgctacccaacctacacgtcgtggagctgactctgagcccagtgacggggtttcactggacaggctcgtcttgaactcctgacctcaggtgatccacccgcttcagcctcccaaagtgctgggattataggtgtgagcaactgcacctggccagtttatgcctctttaatgctgagcaacattcattacaatcttgacagaaaatctggttctcttgcactaatatgtgaacttatggacatgaatatttatgagctaatacgaggtacgtaga

SEQ ID NO: 155232 - DNA, 2736 bp, Homo sapiens
  Payload ID: 10516
  Gene Symbol: MOK
  Gene Name: MOK protein kinase
  ENST ID: ENST00000521766
  CDS Start-End: 201-380
gttcagggcctgacggttgctagggtgacagggacacaacatggcggcgggatctctaacgctctccttcgagggaccaccacggagatcctagtgcgggaccccgcctcagggaagtggaaagcagggggacaaccttcctgcttctttcttttccgtccagtgtcggcaaggggttgtcaccggcttccgcatccaagatgaagaactataaagcaattggcaaaataggagagggaacgttttctgaagttatgaagatgcaaagcctgagagatggaaactactatgcatgtaaacaaatgaagcagcgctttgaaagggagaagatacccattatcagaaaaaaaaattatgcactatatgtaccagttatgtaagtccctggatcatattcacagaaatggaatatttcacagagatgtaaaaccagaaaatatactaataaagcaggatgtcctgaaattaggggactttggctcctgccggagtgtctattccaagcagccgtacacggaatacatctccacccgctggtaccgggccccggagtgtctcctcactgatgggttctacacgtacaagatggacctgtggagcgccggctgtgtgttctacgagatcgccagtctgcagcccctctttcctggagtaaatgaactggaccaaatctcaaaaatccacgatgtcatcggcacacccgctcagaagatcctcaccaagttcaaacagtaagtattgtgttctgagagtggatgtggacccactcccctgctaggacctgcagcagggcaagcccctccctgtgcctccctcaaacccctctcaggagctcctttggctgactacaggggttcaagttcacttgagggccagtgagtggctgctcagacagagcccatcactttaagtggtctcaaaggtgagctcttccttgagcatcacagaaagatttgtcacaggctttctgagggctggggagtcaggctgtgttccctgagtaatttaaacaggacttagaagcctttgggtggaaacgttccccaagcacagagcataggtggtgagggctttctgcagccctccacagccctgctggcgggaccgacgcctggaagaggtgttcccggactcttagggtcattctggtgaagctgaggctgggagttgggacttcccagggagggcctgtgggctgaggggcaagtagcacccagcggcccccacatcccagggagggagaaggtggcaaccattttggactcttctttttttgttaaattttatttcattcttctcatgtgggaaggtgatattaatcttttataggaaaggtagttttcttacatttttagcataacagatccccccctttataatagactatttttaaatagatttttttaagagcagttttaggtttccatagagccctgtccccatgtgcacacagcctcccctgtcgtcagcacctgcctcgagtggtgtgtttattatggtcgatgaaccgtggatatctcattactacacagagcccatcatttacatcaggggtccctcttggtggtgcacgttctgtgggctgggacaggtgtagactctgcagtcataaaccattccccaccacacagggcccttagttgtgacagtggaccaccggtgcgctcagtgacagcatgaccatttattatcattgggtttttaatacaggtcgagagctatgaattttgattttccttttaaaaagggatcaggaatacctctactaacaaccaatttgtccccacaatgcctctccctcctgcacgcaatggtggcctatgatcccgatgagagaatcgccgcccaccaggccctgcagcacccctacttccaagaacagaggaaaacagagaagcgggctctgggcagccacagaaaagctggctttccggagcaccctgtggcaccggaaccactcagtaacagctgccagatttccaaggagggcagaaagcagaaacagtccctaaagcaagaggaggaccgtcccaagagacgaggaccggcctatgtcatggaactgcccaaactaaagctttcgggagtggtcagactgtcgtcttactccagccccacgctgcagtccgtgcttggatctggaacaaatggaagagtgccggtgctgagacccttgaagtgcatccctgcgagcaagaagatccgcagaaggaccttaagcctgccccgcagcagtgtcgcctgcccaccatagtgcggaaaggcggaagataactgagcagcaccgtcgtctcgacttcggaggcaacaccaagcccgaccgggccaggcctgggtgatctgctgctgagacgccacggagggctggggatgcgcctgcgtccgtttcgcgctggccggggctctgggtgctgccctgcgccctgccgcacccgcggcccgcgcagctgcctaggatgttctgggctaatatacttgtaaaaccaccgcattctagggttttctttcattttcgttaagaatttggggcaggaaatactttgtaactttgtatatgaatcaaaacaaacgagcaggcatttctgtgatgtgttgggcgtggttggaaggtgggttctgcgtgtcccttcccagcgctgctggtcagtcgtggagcgccatcatgtcttaccagtgacgctgctgacacccctgacttttattaaagaataagctgtcgttacagtattgcatttt

SEQ ID NO: 155233 - DNA, 549 bp, Homo sapiens
  Payload ID: 10516
  Gene Symbol: MOK
  Gene Name: MOK protein kinase
  ENST ID: ENST00000522093
  CDS Start-End: 187-321
ggttgctagggtgacagggacacaacatggcggcgggatctctaacgctctccttcgagggaccaccacggagatcctagtgcgggaccccgcctcagggaagtggaaagcagggggacaaccttcctgcttctttcttttccgtccagtgtcggcaaggggttgtcaccggcttccgcatccaagatgaagaactataaagcaattggcaaaataggagagggaacgttttctgaagttatgaagatgcaaagcctgagagatggaaactactatgcatgtaaacaaatgaagcagcgctttgaaagactagggaattgaaattcggagagatcaagttccccacctggcccgttgctacccaacctacacgtcgtggagctgactctgagcccagggagaagatacccattatcagaaaaaaaaattatgcactatatgtaccagttatgtaagtccctggatcatattcacagaaatggaatatttcacagagatgtaaaaccagaaaatatactaataaagcaggatgtcctgaaattaggggac

SEQ ID NO: 155234 - DNA, 1890 bp, Homo sapiens
  Payload ID: 10516
  Gene Symbol: MOK
  Gene Name: MOK protein kinase
  Uniprot ID: Q9UQ07
  ENST ID: ENST00000522874
  CDS Start-End: 184-1440
tgctagggtgacagggacacaacatggcggcgggatctctaacgctctccttcgagggaccaccacggagatcctagtgcgggaccccgcctcagggaagtggaaagcagggggacaaccttcctgcttctttcttttccgtccagtgtcggcaaggggttgtcaccggcttccgcatccaagatgaagaactataaagcaattggcaaaataggagagggaacgttttctgaagttatgaagatgcaaagcctgagagatggaaactactatgcatgtaaacaaatgaagcagcgctttgaaagtattgagcaagtcaacaacctacgagagatccaagcactgaggcgcctgaatccgcacccaaacattcttatgttgcatgaagtggtttttgacagaaaatctggttctcttgcactaatatgtgaacttatggacatgaatatttatgagctaatacgagggagaagatacccattatcagaaaaaaaaattatgcactatatgtaccagttatgtaagtccctggatcatattcacagaaatggaatatttcacagagatgtaaaaccagaaaatatactaataaaggatgtcctgaaattaggggactttggctcctgccggagtgtctattccaagcagccgtacacggaatacatctccacccgctggtaccgggccccggagtgtctcctcactgatgggttctacacgtacaagatggacctgtggagcgccggctgtgtgttctacgagatcgccagtctgcagcccctctttcctggagtaaatgaactggaccaaatctcaaaaatccacgatgtcatcggcacacccgctcagaagatcctcaccaagttcaaacagtcgagagctatgaattttgattttccttttaaaaagggatcaggaatacctctactaacaaccaatttgtccccacaatgcctctccctcctgcacgcaatggtggcctatgatcccgatgagagaatcgccgcccaccaggccctgcagcacccctacttccaagaacagaggaaaacagagaagcgggctctgggcagccacagaaaagctggctttccggagcaccctgtggcaccggaaccactcagtaacagctgccagatttccaaggagggcagaaagcagaaacagtccctaaagcaagaggaggaccgtcccaagagacgaggaccggcctatgtcatggaactgcccaaactaaagctttcgggagtggtcagactgtcgtcttactccagccccacgctgcagtccgtgcttggatctggaacaaatggaagagtgccggtgctgagacccttgaagtgcatccctgcgagcaagaagacagatccgcagaaggaccttaagcctgccccgcagcagtgtcgcctgcccaccatagtgcggaaaggcggaagataactgagcagcaccgtcgtctcgacttcggaggcaacaccaagcccgaccgggccaggcctgggtgatctgctgctgagacgccacggagggctggggatgcgcctgcgtccgtttcgcgctggccggggctctgggtgctgccctgcgccctgccgcacccgcggcccgcgcagctgcctaggatgttctgggctaatatacttgtaaaaccaccgcattctagggttttctttcattttcgttaagaatttggggcaggaaatactttgtaactttgtatatgaatcaaaacaaacgagcaggcatttctgtgatgtgttgggcgtggttggaaggtgggttctgcgtgtcccttcccagcgctgctggtcagtcgtggagcgccatcatgtcttaccagtgacgctgctgacacccctgacttttattaaagaataagctgtcgttaca

SEQ ID NO: 155235 - DNA, 837 bp, Homo sapiens
  Payload ID: 10516
  Gene Symbol: MOK
  Gene Name: MOK protein kinase
  ENST ID: ENST00000517537
  CDS Start-End: 167-622
cacaacatggcggcgggatctctaacgctctccttcgagggaccaccacggagatcctagtgcgggaccccgcctcagggaagtggaaagcagggggacaaccttcctgcttctttcttttccgtccagtgtcggcaaggggttgtcaccggcttccgcatccaagatgaagaactataaagcaattggcaaaataggagagggaacgttttctgaagttatgaagatgcaaagcctgagagatggaaactactatgcatgtaaacaaatgaagcagcgctttgaaagtattgagcaagtcaacaacctacgagagatccaagcactgaggcgcctgaatccgcacccaaacattcttatgttgcatgaagtggtttttgacagaaaatctggttctcttgcactaatatgtgaacttatggacatgaatatttatgagctaatacgagggagaagatacccattatcagaaaaaaaaattatgcactatatgtaccagttatgtaagtccctggatcatattcacagaaatggaatatttcacagagatgtaaaaccagaaaatatactaataaaggttgtaaaaaatggtttatttaataaatgccatcaacataactgactgcacctggaagaaaataattgaaagcaccattttcacaccgcagacaaaaatgaaccctattcagacggccgttcaaaccttctagagggaaatgtggcagaggcaggatttgagctcaggatgtcctgaaattaggggactttggctcctgccggagtgtctattccaagcagccgtacacggaatacatctccacccgctggtaccgggcc

SEQ ID NO: 155236 - DNA, 610 bp, Homo sapiens
  Payload ID: 10516
  Gene Symbol: MOK
  Gene Name: MOK protein kinase
  ENST ID: ENST00000518399
  CDS Start-End: 211-390
agctcatggcgttcagggcctgacggttgctagggtgacagggacacaacatggcggcgggatctctaacgctctccttcgagggaccaccacggagatcctagtgcgggaccccgcctcagggaagtggaaagcagggggacaaccttcctgcttctttcttttccgtccagtgtcggcaaggggttgtcaccggcttccgcatccaagatgaagaactataaagcaattggcaaaataggagagggaacgttttctgaagttatgaagatgcaaagcctgagagatggaaactactatgcatgtaaacaaatgaagcagcgctttgaaagggagaagatacccattatcagaaaaaaaaattatgcactatatgtaccagttatgtaagtccctggatcatattcacagaaatggaatatttcacagagatgtaaaaccagaaaatatactaataaaggatgtcctgaaattaggggactttggctcctgccggagtgtctattccaagcagccgtacacggaatacatctccacccgctggtaccgggccccggagtgtctcctcactgatgggttctacacgtacaagatggacctgtggagcgcc

SEQ ID NO: 155237 - DNA, 917 bp, Homo sapiens
  Payload ID: 10516
  Gene Symbol: MOK
  Gene Name: MOK protein kinase
  ENST ID: ENST00000519058
  CDS Start-End: 316-693
ctgtaagggtaacgattaggcagacggctaaagtgagggagacttttggctggtattccaattggaaggagttacactatataatcccactgcaaacaataggtctgcagcccctctttcctggagtaaatgaactggaccaaatctcaaaaatccacgatgtcatcggcacacccgctcagaagatcctcaccaagttcaaacagtcgagagctatgaattttgattttccttttaaaaagggatcaggaatacctctactaacaaccaatttgtccccacaatgcctctccctcctgcacgcaatggtggcctatgatcccgatgagagaatcgccgcccaccaggccctgcagcacccctacttccaagaacagagaaacagtccctaaagcaagaggaggaccgtcccaagagacgaggaccggcctatgtcatggaactgcccaaactaaagctttcgggagtggtcagactgtcgtcttactccagccccacgctgcagtccgtgcttggatctggaacaaatggaagagtgccggtgctgagacccttgaagtgcatccctgcgagcaagaaggtagcgcggaaccagcttctctgacggcgctgctcttcgacccagcccaggccgccactgaattttgtgtctgtaatttttctttgacagacagatccgcagaaggaccttaagcctgccccgcagcagtgtcgcctgcccaccatagtgcggaaaggcggaagataactgagcagcaccgtcgtctcgacttcggaggcaacaccaagcccgaccgggccaggcctgggtgatctgctgctgagacgccacggagggctggggatgcgcctgcgtccgtttcgcgctggccggggctctgggtgctgccctgcgccctgccgcacccgcggcccgc

SEQ ID NO: 155238 - DNA, 559 bp, Homo sapiens
  Payload ID: 10516
  Gene Symbol: MOK
  Gene Name: MOK protein kinase
  ENST ID: ENST00000521937
  CDS Start-End: 1-340
gaaaacagagaagcgggctctgggcagccacagaaaagctggctttccggagcaccctgtggcaccggaaccactcagtaacagctgccagatttccaaggagggcagaaagcagaaacagtccctaaagcaagaggaggaccgtcccaagagacgaggaccggcctatgtcatggaactgcccaaactaaagctttcgggagtggtcagactgtcgtcttactccagccccacgctgcagtccgtgcttggatctggaacaaatggaagagtgccggtgctgagacccttgaagtgcatccctgcgagcaagaaggtagcgcggaaccagcttctctgacggcgctgctcttcgacccagcccaggccgccactgaattttgtgtctgtaatttttctttgacagacagatccgcagaaggaccttaagcctgccccgcagcagtgtcgcctgcccaccatagtgcggaaaggcggaagataactgagcagcaccgtcgtctcgacttcggaggcaacaccaagcccgaccgggccaggcctgggtgatctgctgctg

SEQ ID NO: 155239 - DNA, 770 bp, Homo sapiens
  Payload ID: 10516
  Gene Symbol: MOK
  Gene Name: MOK protein kinase
  ENST ID: ENST00000521388
  CDS Start-End: 170-349
ggacacaacatggcggcgggatctctaacgctctccttcgagggaccaccacggagatcctagtgcgggaccccgcctcagggaagtggaaagcagggggacaaccttcctgcttctttcttttccgtccagtgtcggcaaggggttgtcaccggcttccgcatccaagatgaagaactataaagcaattggcaaaataggagagggaacgttttctgaagttatgaagatgcaaagcctgagagatggaaactactatgcatgtaaacaaatgaagcagcgctttgaaagggagaagatacccattatcagaaaaaaaaattatgcactatatgtaccagttatgtaagtccctggatcatattcacagcaggatgtcctgaaattaggggactttggctcctgccggagtgtctattccaagcagccgtacacggaatacatctccacccgctggtaccgggccccggagtgtctcctcactgatgggttctacacgtacaagatggacctgtggagcgccggctgtgtgttctacgagatcgccagtctgcagcccctctttcctggagtaaatgaactggaccaaatctcaaaaatccacgatgtcatcggcacacccgctcagaagatcctcaccaagttcaaacaggatcaggaatacctctactaacaaccaatttgtccccacaatgcctctccctcctgcacgcaatggtggcctatgatcccgatgagagaatcgccgcccaccaggccctgcagcaccc

SEQ ID NO: 155240 - DNA, 1165 bp, Homo sapiens
  Payload ID: 10516
  Gene Symbol: MOK
  Gene Name: MOK protein kinase
  ENST ID: ENST00000524370
  CDS Start-End: 373-660
ctgtgactggtgctggagttttgagtccacagataaaatgtgtctccttcgtctctactagagaggaaaaagaactggaattggaagaacagggagactgaagggtagcaagagaggctggagaagagagtgaaaagaccgcttacctgatttgaaattgtctgcagcccctctttcctggagtaaatgaactggaccaaatctcaaaaatccacgatgtcatcggcacacccgctcagaagatcctcaccaagttcaaacagtcgagagctatgaattttgattttccttttaaaaagggatcaggaatacctctactaacaaccaatttgtccccacaatgcctctccctcctgcacgcaatggtggcctatgatcccgatgagagaatcgccgcccaccaggccctgcagcacccctacttccaagaacagagaaacagtccctaaagcaagaggaggaccgtcccaagagacgaggaccggcctatgtcatggaactgcccaaactaaagctttcgggagtggtcagactgtcgtcttactccagccccacgctgcagtccgtgcttggatctggaacaaatggaagagtgccggtgctgagacccttgaagtgcatccctgcgagcaagaagacagatccgcagaaggaccttaagcctgccccgcagcagtgtcgcctgcccaccatagtgcggaaaggcggaagataactgagcagcaccgtcgtctcgacttcggaggcaacaccaagcccgaccgggccaggcctgggtgatctgctgctgagacgccacggagggctggggatgcgcctgcgtccgtttcgcgctggccggggctctgggtgctgccctgcgccctgccgcacccgcggcccgcgcagctgcctaggatgttctgggctaatatacttgtaaaaccaccgcattctagggttttctttcattttcgttaagaatttggggcaggaaatactttgtaactttgtatatgaatcaaaacaaacgagcaggcatttctgtgatgtgttgggcgtggttggaaggtgggttctgcgtgtcccttcccagcgctgctggtcagtcgtggagcgccatcatgtcttaccagtgacgctgctgacacccctgacttttattaaagaataagctgtcgttaca

SEQ ID NO: 155241 - DNA, 1230 bp, Homo sapiens
  Payload ID: 10516
  Gene Symbol: MOK
  Gene Name: MOK protein kinase
  ENST ID: ENST00000517966
  CDS Start-End: 430-717
attcctgagtctgtgactggtgctggagttttgagtccacagataaaatgtgtctccttcgtctctactagagaggaaaaagaactggaattggaagaacagggagactgaagggtagcaagagaggctggagaagagagtgaaaagaccgcttacctgatttgaaattgatggtggcgtgggaatgaagaatgtgatatacatctttggagtctgttctgcagcccctctttcctggagtaaatgaactggaccaaatctcaaaaatccacgatgtcatcggcacacccgctcagaagatcctcaccaagttcaaacagtcgagagctatgaattttgattttccttttaaaaagggatcaggaatacctctactaacaaccaatttgtccccacaatgcctctccctcctgcacgcaatggtggcctatgatcccgatgagagaatcgccgcccaccaggccctgcagcacccctacttccaagaacagagaaacagtccctaaagcaagaggaggaccgtcccaagagacgaggaccggcctatgtcatggaactgcccaaactaaagctttcgggagtggtcagactgtcgtcttactccagccccacgctgcagtccgtgcttggatctggaacaaatggaagagtgccggtgctgagacccttgaagtgcatccctgcgagcaagaagacagatccgcagaaggaccttaagcctgccccgcagcagtgtcgcctgcccaccatagtgcggaaaggcggaagataactgagcagcaccgtcgtctcgacttcggaggcaacaccaagcccgaccgggccaggcctgggtgatctgctgctgagacgccacggagggctggggatgcgcctgcgtccgtttcgcgctggccggggctctgggtgctgccctgcgccctgccgcacccgcggcccgcgcagctgcctaggatgttctgggctaatatacttgtaaaaccaccgcattctagggttttctttcattttcgttaagaatttggggcaggaaatactttgtaactttgtatatgaatcaaaacaaacgagcaggcatttctgtgatgtgttgggcgtggttggaaggtgggttctgcgtgtcccttcccagcgctgctggtcagtcgtggagcgccatcatgtcttaccagtgacgctgctgacacccctgacttttattaaagaataagctgtcgttacagtattgca

SEQ ID NO: 155242 - DNA, 2041 bp, Homo sapiens
  Payload ID: 10516
  Gene Symbol: MOK
  Gene Name: MOK protein kinase
  ENST ID: ENST00000559138
  CDS Start-End: 369-512
gactggtgctggagttttgagtccacagataaaatgtgtctccttcgtctctactagagaggaaaaagaactggaattggaagaacagggagactgaagggtagcaagagaggctggagaagagagtgaaaagaccgcttacctgatttgaaattgtctgcagcccctctttcctggagtaaatgaactggaccaaatctcaaaaatccacgatgtcatcggcacacccgctcagaagatcctcaccaagttcaaacagtcgagagctatgaattttgattttccttttaaaaagggatcaggaatacctctactaacaaccaatttgtccccacaatgcctctccctcctgcacgcaatggtggcctatgatcccgatgagagaatcgccgcccaccaggccctgcagcacccctacttccaagaacagagaacccagaacggaagcgaggatgaggcctcagccgtcctcctccccattcaaacacgttcatccctcaaccctctgctgagcacctgcatgctgcccggccgcagtgtcacccttcttgtgtgagcctaccctcatccacccacctcaccctcctgaccttaaagaagacaccgggcagaagcacaggggagcccagtcacaccccacactggcgggggcaggccttgcagggagaagcagtaagcagccatctccatcagccatttccatctggcactcagacgtgcacgtcttcgtgtgacaggcggcagcagtgcgaccgtgacctcccatctgctctgctgtccccacacctgcggtgcagccagcctgccacaaggcagctagagtccagctagacccacccctggcacggccgacctcttcctggcttcttctgggcctaatccccgtgcattctccaacgccagaagtgtaagaaagtgcaaggcaacaagtgagaagagcaaacccaaatcgtaccagggaagctagtctttccagggcacctgagtgagggcatgaccagccttgacgctgcctcgctaccatctgcccagggcctgctgaatgcttgagtccatggtgacagtggtgggaacagttacgaggcagttagattttggaagtcatgttggcccacttggctacagagcagtcttaggaacagcaccataaaaataaagacttattcctgacacacatgcatctagagtaaactggggcgtatctgacagcgttagtacagtgatggccaaatgcaaactgcattccagaaccagcgaagggtgacagactgggctgaggcagagctaggactaaccatctcgagtgatgccatctcggggccaacaaaagttttggacacggctggatcatctgaccaaactgctcaaatctttacacaattattgtcctggtattaaactttcacctgccacttccaacaaacaggagacagaataaggagatgaccaggaagatggctggattaagaattctagacttggccgggtgcggtggctcacacctgtaatcctagcatcttgggaggctgaggcaggaggatcgcttgagcccaggagtttgagaccagcctaggcaacataaggagaccccatctctacaaaatatcaaaaaattacccaggtatggtggcacacacgtgtgattccagctactcgggaggctgagatgggaggatcacttgaacccaggaggttggggctacaatgagctatgatcgcaccacttcattccagcctggatgacagaagactcactccatagttcatggccccgtgatccagagtccctgctggcgccttcgagtggggcaggctgagaactcaagctgtaactaatgtctcctccgaagaaaactaaaccgagggctgagctgatgtgaagttttccgtggctgcattcatacaaatggtgaaaatgtagcatacctcccctcaaaagcctgaaagtaaagacatgcccccaatttaatgtgatgaattagagaaataggtttcagacacttcatggtttaaagtctcacaaaataaagctttcgaagga

SEQ ID NO: 155243 - DNA, 643 bp, Homo sapiens
  Payload ID: 10516
  Gene Symbol: MOK
  Gene Name: MOK protein kinase
  ENST ID: ENST00000559838
  CDS Start-End: 1-520
aaatggaatatttcacagagatgtaaaaccagaaaatatactaataaagcaggatgtcctgaaattaggggactttggctcctgccggagtgtctattccaagcagccgtacacggaatacatctccacccgctggtaccgggccccggagtgtctcctcactgatgggttctacacgtacaagatggacctgtggagcgccggctgtgtgttctacgagatcgccagtctgcagcccctctttcctggagtaaatgaactggaccaaatctcaaaaatccacgatgtcatcggcacacccgctcagaagatcctcaccaagttcaaacagtcgagagctatgaattttgattttccttttaaaaagggatcaggaatacctctactaacaaccaatttgtccccacaatgcctctccctcctgcacgcaatggtggcctatgatcccgatgagagaatcgccgcccaccaggccctgcagcacccctacttccaagaacagagaagactcactccatagttcatggccccgtgatccagagtccctgctggcgccttcgagtggggcaggctgagaactcaagctgtaactaatgtctcctccgaagaaaactaaaccgagggctgagctgatgtgaagttt

SEQ ID NO: 155244 - DNA, 1114 bp, Homo sapiens
  Payload ID: 10516
  Gene Symbol: MOK
  Gene Name: MOK protein kinase
  ENST ID: ENST00000523231
  CDS Start-End: 322-609
ggagttttgagtccacagataaaatgtgtctccttcgtctctactagagaggaaaaagaactggaattggaagaacagggagactgaagggtagcaagagaggctggagaagagagtgaaaagaccgcttacctgatttgaaattgtctgcagcccctctttcctggagtaaatgaactggaccaaatctcaaaaatccacgatgtcatcggcacacccgctcagaagatcctcaccaagttcaaacaggatcaggaatacctctactaacaaccaatttgtccccacaatgcctctccctcctgcacgcaatggtggcctatgatcccgatgagagaatcgccgcccaccaggccctgcagcacccctacttccaagaacagagaaacagtccctaaagcaagaggaggaccgtcccaagagacgaggaccggcctatgtcatggaactgcccaaactaaagctttcgggagtggtcagactgtcgtcttactccagccccacgctgcagtccgtgcttggatctggaacaaatggaagagtgccggtgctgagacccttgaagtgcatccctgcgagcaagaagacagatccgcagaaggaccttaagcctgccccgcagcagtgtcgcctgcccaccatagtgcggaaaggcggaagataactgagcagcaccgtcgtctcgacttcggaggcaacaccaagcccgaccgggccaggcctgggtgatctgctgctgagacgccacggagggctggggatgcgcctgcgtccgtttcgcgctggccggggctctgggtgctgccctgcgccctgccgcacccgcggcccgcgcagctgcctaggatgttctgggctaatatacttgtaaaaccaccgcattctagggttttctttcattttcgttaagaatttggggcaggaaatactttgtaactttgtatatgaatcaaaacaaacgagcaggcatttctgtgatgtgttgggcgtggttggaaggtgggttctgcgtgtcccttcccagcgctgctggtcagtcgtggagcgccatcatgtcttaccagtgacgctgctgacacccctgacttttattaaagaataagctgtcgttaca

SEQ ID NO: 155245 - DNA, 608 bp, Homo sapiens
  Payload ID: 10516
  Gene Symbol: MOK
  Gene Name: MOK protein kinase
  ENST ID: ENST00000522537
  CDS Start-End: 320-608
atgctgttccggtggaggattaggatgttgtcgaggaggggagaaatcggtgggatcaaagaaggagaagtcgtccgctggggctattgggatgaggggagcaggagtctgcagcccctctttcctggagtaaatgaactggaccaaatctcaaaaatccacgatgtcatcggcacacccgctcagaagatcctcaccaagttcaaacagtcgagagctatgaattttgattttccttttaaaaagggatcaggaatacctctactaacaaccaatttgtccccacaatgcctctccctcctgcacgcaatggtggcctatgatcccgatgagagaatcgccgcccaccaggccctgcagcacccctacttccaagaacagagaaacagtccctaaagcaagaggaggaccgtcccaagagacgaggaccggcctatgtcatggaactgcccaaactaaagctttcgggagtggtcagactgtcgtcttactccagccccacgctgcagtccgtgcttggatctggaacaaatggaagagtgccggtgctgagacccttgaagtgcatccctgcgagcaagaaggtagcgcggaaccagcttctctga

SEQ ID NO: 155246 - DNA, 568 bp, Homo sapiens
  Payload ID: 10516
  Gene Symbol: MOK
  Gene Name: MOK protein kinase
  ENST ID: ENST00000561150
  CDS Start-End: 236-379
actctttccttttcttccggaaggagggtagaagacaaaataatatagagatcatgccaatctgcagcccctctttcctggagtaaatgaactggaccaaatctcaaaaatccacgatgtcatcggcacacccgctcagaagatcctcaccaagttcaaacaggatcaggaatacctctactaacaaccaatttgtccccacaatgcctctccctcctgcacgcaatggtggcctatgatcccgatgagagaatcgccgcccaccaggccctgcagcacccctacttccaagaacagagaacccagaacggaagcgaggatgaggcctcagccgtcctcctccccattcaaacacgttcatccctcaaccctctgctgagcacctgcatgctgcccggccgcagtgtcacccttcttgtgtgagcctaccctcatccacccacctcaccctcctgaccttaaagaagacaccgggcagaagcacaggggagcccagtcacaccccacactggcgggggcaggccttgcagggagaagcagtaagcagccatctccatcagccatttcc

SEQ ID NO: 155247 - DNA, 1883 bp, Homo sapiens
  Payload ID: 10516
  Gene Symbol: MOK
  Gene Name: MOK protein kinase
  ENST ID: ENST00000522867
  CDS Start-End: 1138-1425
ctgcaagccacactctttccttttcttccggaaggagggtagaagacaaaataatatagagatcatgccaatctgcagcccctctttcctggagtaaatgaactggaccaaatctcaaaaatccacgatgtcatcggcacacccgctcagaagatcctcaccaagttcaaacagtaagtattgtgttctgagagtggatgtggacccactcccctgctaggacctgcagcagggcaagcccctccctgtgcctccctcaaacccctctcaggagctcctttggctgactacaggggttcaagttcacttgagggccagtgagtggctgctcagacagagcccatcactttaagtggtctcaaaggtgagctcttccttgagcatcacagaaagatttccctccacagccctgctggcgggaccgacgcctggaagaggtgttcccggactcttagggtcattctggtgaagctgaggctgggagttgggacttcccagggagggcctgtgggctgaggggcaagtagcacccagcggcccccacatcccagggagggagaaggtggcaaccattttggactcttctttttttgttaaattttatttcattcttctcatgtgggaaggtgatattaatcttttataggaaaggtagttttcttacatttttagcataacagatccccccctttataatagactatttttaaatagatttttttaagagcagttttaggtttccatagagccctgtccccatgtgcacacagcctcccctgtcgtcagcacctgcctcgagtggtgtgtttattatggtcgatgaaccgtggatatctcattactacacagagcccatcatttacatcaggggtccctcttggtggtgcacgttctgtgggctgggacaggtgtagactctgcagtcataaaccattccccaccacacagggcccttagttgtgacagtggaccaccggtgcgctcagtgacagcatgaccatttattatcattgggtttttaatacaggtcgagagctatgaattttgattttccttttaaaaagggatcaggaatacctctactaacaaccaatttgtccccacaatgcctctccctcctgcacgcaatggtggcctatgatcccgatgagagaatcgccgcccaccaggccctgcagcacccctacttccaagaacagagaaacagtccctaaagcaagaggaggaccgtcccaagagacgaggaccggcctatgtcatggaactgcccaaactaaagctttcgggagtggtcagactgtcgtcttactccagccccacgctgcagtccgtgcttggatctggaacaaatggaagagtgccggtgctgagacccttgaagtgcatccctgcgagcaagaagacagatccgcagaaggaccttaagcctgccccgcagcagtgtcgcctgcccaccatagtgcggaaaggcggaagataactgagcagcaccgtcgtctcgacttcggaggcaacaccaagcccgaccgggccaggcctgggtgatctgctgctgagacgccacggagggctggggatgcgcctgcgtccgtttcgcgctggccggggctctgggtgctgccctgcgccctgccgcacccgcggcccgcgcagctgcctaggatgttctgggctaatatacttgtaaaaccaccgcattctagggttttctttcattttcgttaagaatttggggcaggaaatactttgtaactttgtatatgaatcaaaacaaacgagcaggcatttctgtgatgtgttgggcgtggttggaaggtgggttctgcgtgtcccttcccagcgctgctggtcagtcgtggagcgccatcatgtcttaccagtga

SEQ ID NO: 155248 - DNA, 796 bp, Homo sapiens
  Payload ID: 10516
  Gene Symbol: MOK
  Gene Name: MOK protein kinase
  ENST ID: ENST00000522534
  CDS Start-End: 342-719
gtgcggcttgaaggagttggtaaataagggggtggttagtgatagggtcactttggcagtaaggaatctcctctcttgccagatggtggcgtgggaatgaagaatgtgatatacatctttggagtctgttctgcagcccctctttcctggagtaaatgaactggaccaaatctcaaaaatccacgatgtcatcggcacacccgctcagaagatcctcaccaagttcaaacagtcgagagctatgaattttgattttccttttaaaaagggatcaggaatacctctactaacaaccaatttgtccccacaatgcctctccctcctgcacgcaatggtggcctatgatcccgatgagagaatcgccgcccaccaggccctgcagcacccctacttccaagaacagagaaacagtccctaaagcaagaggaggaccgtcccaagagacgaggaccggcctatgtcatggaactgcccaaactaaagctttcgggagtggtcagactgtcgtcttactccagccccacgctgcagtccgtgcttggatctggaacaaatggaagagtgccggtgctgagacccttgaagtgcatccctgcgagcaagaaggtagcgcggaaccagcttctctgacggcgctgctcttcgacccagcccaggccgccactgaattttgtgtctgtaatttttctttgacagacagatccgcagaaggaccttaagcctgccccgcagcagtgtcgcctgcccaccatagtgcggaaaggcggaagataactgagcagcaccgtcgtctcga

SEQ ID NO: 155249 - DNA, 735 bp, Homo sapiens
  Payload ID: 10516
  Gene Symbol: MOK
  Gene Name: MOK protein kinase
  ENST ID: ENST00000562292
  CDS Start-End: 188-457
cggttgctagggtgacagggacacaacatggcggcgggatctctaacgctctccttcgagggaccaccacggagatcctagtgcgggaccccgcctcagggaagtggaaagcagggggacaaccttcctgcttctttcttttccgtccagtgtcggcaaggggttgtcaccggcttccgcatccaagatgaagaactataaagcaattggcaaaataggagagggaacgttttctgaagttatgaagatgcaaagcctgagagatggaaactactatgcatgtaaacaaatgaagcagcgctttgaaagtattgagcaagtcaacaacctacgagagatccaagcactgaggcgcctgaatccgcacccaaacattcttatgttgcatgaagtggttttggagaagatacccattatcagaaaaaaaaattatgcactatatgtaccagttatgtaagtccctggatcatattcacagaaatggaatatttcacagagatgtaaaaccagaaaatatactaataaagcaggatgtcctgaaattaggggactttggctcctgccggagtgtctattccaagcagccgtacacggaatacatctccacccgctggtaccgggccccggagtgtctcctcactgatgggttctacacgtacaagatggacctgtggagcgccggctgtgtgttctacgagatcgccagtctgcagcccctctttcctggagtaaatg

SEQ ID NO: 155250 - DNA, 6160 bp, Homo sapiens
  Payload ID: 10517
  Gene Symbol: MOCOS
  Gene Name: molybdenum cofactor sulfurase
  Uniprot ID: Q96EN8
  ENST ID: ENST00000261326
  CDS Start-End: 22-2688
ctggatggactagccggggccatggccggcgcggcggcggagtcagggcgggagctgtggaccttcgcgggttcccgggacccgagcgcaccgcggctagcctacggctacggcccgggcagcctgcgcgagctgcgggcgcgcgagttcagccgcctggcaggaactgtctatcttgaccatgcaggtgccaccttgttctcccagagccagctcgaaagcttcactagtgatctcatggaaaacacttatggtaatcctcacagccagaacatcagcagcaagctcacccatgacactgtggagcaggtgcgctacagaatcctggcgcacttccacaccaccgcagaagactacactgtgatcttcactgccgggagcacggctgctctcaaactggtggcagaggcctttccatgggtgtcccagggcccagagagcagtgggagtcgcttctgttacctcaccgacagccacacctccgtagtgggtatgcggaacgtgaccatggctataaatgtcatatccaccccggtcaggccagaggacctgtggtctgcagaggaacgtagtgcttcagccagcaacccagactgccagctgccgcatctcttctgctacccagctcagagtaacttttctggagtcagataccccctgtcctggatagaagaggtcaagtctgggcggttgcaccctgtgagcacgcctgggaagtggtttgtgctgctggatgcagcctcctacgtgagcacctcgcctttggacctgtcagctcaccaggccgactttgtccccatctccttctataagatcttcgggtttcctacaggcctgggcgctctgctggtccataatcgtgcggctcctctactgaggaagacctactttggaggagggacagcctctgcgtacctagcaggagaagacttctacatcccgaggcagtcggtagctcagaggtttgaagatggcaccatctcattccttgatgttatcgcgctaaaacatggatttgacaccctagagcgcctcacaggtggaatggagaatataaagcagcacaccttcaccttggctcagtatacctacgtggccctgtcctctctccagtaccccaatggagcccctgtggtgcggatttacagcgattctgagttcagcagccctgaggttcagggcccaatcatcaattttaatgtgctggatgacaaagggaacatcattggttactcccaggtggacaaaatggccagtctttacaacatccacctgcgaactggctgcttctgtaacactggggcctgccagaggcacctgggcataagcaacgagatggtcaggaagcattttcaggctggtcatgtctgtggggacaatatggacctcatagatgggcagcccacaggatctgtgaggatttcatttggatacatgtcgacgctggatgatgtccaggcctttcttaggttcatcatagacactcgcctgcactcatcaggggactggcctgtccctcaggcccatgctgacaccggggagactggagccccatcagcagacagccaggctgatgttatacctgctgtcatgggcagacgtagcctctcgcctcaggaagatgccctcacaggctccagggtttggaacaactcgtctactgtgaatgctgtgcctgtggccccacctgtgtgtgatgtcgccagaacccagccgactccttcagagaaagctgcaggagtcctggagggggcccttgggccacatgttgtcactaacctttatctctatccaatcaaatcctgtgctgcatttgaggtgaccaggtggcctgtaggaaaccaagggctgctatatgaccggagctggatggttgtgaatcacaatggtgtttgcctgagtcagaagcaggaaccccggctctgcctgatccagcccttcatcgacttgcggcaaaggatcatggtcatcaaagccaaagggatggagcctatagaggtgcctcttgaggaaaatagtgaacggactcagattcgccaaagcagggtctgtgctgacagagtaagtacttatgattgtggagaaaaaatttcaagctggttgtcaacattttttggccgtccttgtcatttgatcaaacaaagttcaaactctcaaaggaatgcaaagaagaaacatggaaaagatcaacttcctggtacaatggccaccctttctctggtgaatgaggcacagtatctgctgatcaacacatccagtattttggaacttcaccggcaactaaacaccagtgatgagaatggaaaggaggaattattctcactgaaggatctcagcttgcgttttcgtgccaatattattatcaatggaaaaagggcttttgaagaagagaaatgggatgagatttcaattggctctttgcgtttccaggttttggggccttgtcacagatgccagatgatttgcatcgaccagcaaactgggcaacgaaaccagcatgttttccaaaaactttctgagagtcgtgaaacaaaggtgaactttggcatgtacctgatgcatgcatcattggatttatcctccccatgtttcctgtctgtaggatctcaggtgctccctgtgttgaaagagaatgtggaaggtcatgatttacctgcatctgagaaacaccaggatgttacctcctaaaaaaaatttttagcataaagtttctcttttacagtgatctctattattgttaagatctgcaacttggttcagtagaacttgatgttttgaataaggagagctctttttctttagaggcagggaatgctctcacctgcttccttctgcctttgacttctcaccctgcaaatttgcactggctgtgctcaggagagcacttctgaggcctcaggaacgaatgctgcacccacatccagtgaggctcctgtaggtatttgaagtataatcacttgtaatcagatgaaatttttaatgaagttcactgggaagattgaacttactgcgggtccctattttgccattttctcacattgttactttgtttttagagagcatctttggatctctccaacccgtttgtagtgaggaagggagtctatgcccagtgatcctgggtatgagaaggtgctcctctcctcccatgtacatgatggtgtgggtttatgctcaggggcccagagggtaacttgtgaccacattccttgaggggagtttctaccagaatatttatattctgagcaaaggcacaggccagcaattcctttcctgttgcttcccatccctggcctccgtcctcatcccccactgagttgatgcactgaggatggctcacgagcctgaagttacactcagtgatggctgtgcttatgcaggttgtcatcctcccctccacaagcccacaggatggtgttggtccatcacccgagagcctccaaatcctatcgagggaggaactttggcattcaggaatcctgtctgtatcatctttgaccactgctcctgcagcctccagatgaaaatgtccagtgaggaaatctcattctctaatgaagttacccatcccgctgagtttctaagaagtttctccctgtgcggagcttgtgtgtgccttatctgcttctgcatgacttccagcctggggtcttaccctgtcctctggagcaatgcagagtgagtacatccactccacattcattctgctggcgtccttctgaagcctgctgtccatgtgtgaacccagtcccttcatcatcttccccctggatggttgtatttttccagtcacttctcccccaaatgtctgcctgctgcagcccactgcatcttttgaaagcctgtgccaccccatctctcctgctgctcagttggagagcaggctccaggctcaggcttccctaatgtatctgttcagagcctgtgggattcagggtcagtttgtttcattatcacatttgtaggactttgtgttgttcccagcactaggtgagatttgaaagatgaggtgtgctctgttctcaaggattgttgagatggagcctaatgattgcacactcacgtgctgtgaagagttaagggtaaaaagtacaactctgactctggttcctgagatcaccgaaagaagaggcaaatgaagttaggtggggtggggtggggtttattgttttgaactgtttattaaaaacgcaacctcttcaaagactcagcactgccacatcatatgagtggacttgtcctcatcagctaactgataggagaacaatgccctaaagtaatggatttatccacctactcaggccagtttcatgcaggagggaactttccagatggcacattgccccatttccaagaccttccgctgacaaatgcatcatattaattatgatggaaaacaagtaagaaggcatgctctacaaaaattaggtcacttgcccaggtgcggtggctcacacctgtaattccagcactttgggaggctgacgtgggcagatcatgaggtcaggagatcgagaccatcctggctaacacggtgaaaccccgtctctactaaaatacaaaaaattagctgggcatggtggcatgcacctgtagtcccagctacttgggaggctgaggcaggggaatcgcttgaacccgggaggcggaggttgcagtgagccgagatcatgccactgcacaccggcctggtgacagagcaagactccatctcaaaaaaaaaaaaaaaaaaattaggtcacttttgtcatcaagaatatgtttttcttatccacgtctatgtcaccttttgcagtagatactttcatgactgatttcaggctttttgtttttttgagacagggtctcactctgtcacccaggctggagtgcagtggcatgatcacagatcattgcagccttgacctcttgggctcaagcgattcccctgcctcagcctcccaagtagctgggactacaggcacacatcaccacatccagctaattttttttttcttttttttctttttggtagagatggcatctcactttgttgcccaggctagttttgaattcctgggctcaagccatcctcccgccacagcctcccaaagttctgggattacaagtgtgagccactgtgcccagcttttgatttcagacattttaatgcagatcctctcctttacagcactattatttggttatctacttataattactgatttaacattgatctgttttcactagactgtaagctccatgaggacaagtcctgtgccagtatatctctagtgtcagcagacaatactcaaaatttgttgacagactatttaaagctgcccctatttttatcattaattgattgaatattaattaaatatattttattaatttaaaatgaattttaaatgcattttttctttagtgtctaccttcaatatttcttgtatgaagtttcagctaaaaatgtactttgtgtatctgtagagtggcttcatattcagagtttatggacatttatgattttatgtcccctccttggttcttatctcctggagttcagccttatgtgcttctcaaagtgtataacaaaatcaaagacaatgtcatgtcccttgaatttaattctaacaccaaaccttggtgttagagtcacaaaaagtccttttttaaaaaaacttggtgagaacagacaataacttgtctttctgggcattcgcgtcatggtccttttagccagaagagaggttttcttttgcatagtttggtgagcatcaagaatcctttaaggagggtggcggtgctgacttctccccattgagagtcagcctcatcccctcctcagccttgtggatggagaagaacaggcagtgatatacattttctgctgttgaaagatgtccgcttatccttctctttcagtgaaaagttgcttttttattcaatatgtactgaacaggttctagagtttcagaaacaaaagaaacagaaccaacatttatagatctcactatagaggcatcactaattggggaaagacagactaggtaatagtcagatgtgatatagtatgtttaagctataggatggcaggtgcatgagtgttggttgtattattctttatttttttgtatgacttatgatattcatgataattaaaacgttttggaacaattca

SEQ ID NO: 155251 - DNA, 2747 bp, Homo sapiens
  Payload ID: 10518
  Gene Symbol: MOCS1
  Gene Name: molybdenum cofactor synthesis 1
  Uniprot ID: Q9NZB8
  ENST ID: ENST00000340692
  CDS Start-End: 5-1915
cttcatggcggcgcggccactgtcccggatgctgcggcggcttctgaggtccagcgcccggagctgcagctcaggggctccggtgacccagccctgccccggggagtccgcgcgagctgcctcggaggaggtgtccaggcggaggcagttcctgcgggagcatgcggcccccttctccgccttcctcacagacagcttcggccggcagcacagctacctgcggatctccctcacagagaagtgcaacctcagatgtcagtactgcatgcccgaggagggggtcccgctgacccccaaagccaacctgctgaccacagaggagatcctgaccctcgcccggctctttgtgaaggaaggcatcgacaagatccggctcacaggtggagagccgcttatccggccggacgtggtggacattgtggcccagctccagcggctggaagggctgagaaccataggtgttaccaccaatggcatcaacctggcccggctactgccccagcttcagaaggctggtctcagtgccatcaacatcagcctggacaccctggtgcctgccaagtttgagttcattgtccgcaggaaaggcttccacaaggtcatggagggcatccacaaggccatcgagctgggctacaaccctgtgaaggtgaactgtgtggtgatgcgaggccttaacgaggatgaactcctggactttgcggccttgactgagggcctccccctggatgtgcgcttcatagagtatatgccctttgatggcaacaagtggaacttcaagaagatggtcagctataaggagatgctagacactgtccggcagcagtggccagagctggagaaggtgccagaggaggaatccagcacagccaaggcctttaaaatccctggcttccaaggccagatcagcttcatcacatccatgtctgagcatttctgtgggacctgcaaccgcctgcgaatcacagctgatgggaacctcaaggtctgcctctttggaaactctgaggtatccctgcgggatcacctgcgagctggggcctctgagcaggagctgctgagaatcattggggctgctgtgggcaggaagaagcggcagcatgcaggcatgttcagtatttcccagatgaagaaccggcccatgatcctcatcgagttatttttgatgttccccaattccccaccagccaatccaagcattttctcctgggacccgctccatgttcagggtctaagacccagaatgagtttctccagccaggtggccactttatggaaaggatgcagggtcccccagacccctcctctagcccagcagcggctggggtctggctcctttcagagacactacacttcccgtgcagactcagatgccaactcaaagtgccttagcccaggttcctgggcttctgctgccccctcaggaccccagctaacctcagaacaactaactcatgtggactcggaaggacgggcagctatggtagatgtgggcaggaagccagacacagagcgggtggctgtggcttcagccgtggtcctcctgggaccggtagccttcaagcttgtccagcagaaccagctcaagaaaggagatgccctagtggtggcccagctggctggagtccaggcagccaaggtgaccagccagctgatccctctgtgccaccacgtggccctgagccacatccaggtgcagctggagctggacagcacacgccatgccgtgaagatccaggcatcttgccgggctcggggccccaccggggtggagatggaggccctgacctctgctgcagtggccgccctcaccctgtatgacatgtgcaaggctgtcagcagggacatcgtgttggaggagatcaagctcattagcaagactggtggtcagcggggggacttccatcgggcttagcacctgcccttctcacccatggcccacccaggcctggagctgggatgcaatgtaggctgagggaaagacgtcaggttcctttaatcacagtcactgtttgtttaccttgagcagtaaacccgaagtcagcctgctctactactaacaaacaggcctgctgctagatgatctctaatgaccaatggggcttcctttctatagggaggataccagcaggcccttaagccttccaggacactaaggtcgtgggagcgggactgcaacaagcaatgccagataactgagaaatcatgttctttgtggactatttcagacaaccaggttccgacagtccagcccagaacttttccttctcattttgggttttctcttctcctgctttcctggggagagattaagcgctcattaagcagaggagcccactttgaggagagcaaagcacaagcttgcctgaagaatggatcccaacttctccccggcagctctgcctccctaagtctgtgaagccgcagccctgccctgtcctgtcctgtcctgacttcatctctccttctgcccaagtctgtgtcccatcagacttgcagcctttcagcttaacagttgcccggtcctgctggccccttttcctctggcccccctcttctgaaacaggatgtgcacacatgggccatagccctaaggactcctgccagaccacacagcccacacctggccctgttcacggctgttccacccacccctctttattctggagcatatcagggaaagaaaagttgatgatagattgccttcaccctcacagcgcacaaataaagctacgatgccaactttg

SEQ ID NO: 155252 - DNA, 1527 bp, Homo sapiens
  Payload ID: 10518
  Gene Symbol: MOCS1
  Gene Name: molybdenum cofactor synthesis 1
  Uniprot ID: Q9NZB8
  ENST ID: ENST00000373181
  CDS Start-End: 269-1114
tccaatttcacctggctcctggggctgtcacttccctttgcttcatgtttataaaatgagaggactgggccagcccatcataagatgggggagggcacagaaacttgtcttgaggagactctaaggggaggaggtgtccaggcggaggcagttcctgcgggagcatgcggcccccttctccgccttcctcacagacagcttcggccggcagcacagctacctgcggatctccctcacagagaagtgcaacctcagatgtcagtactgcatgcccgaggagggggtcccgctgacccccaaagccaacctgctgaccacagaggagatcctgaccctcgcccggctctttgtgaaggaaggcatcgacaagatccggctcacaggtggagagccgcttatccggccggacgtggtggacattgtggcccagctccagcggctggaagggctgagaaccataggtgttaccaccaatggcatcaacctggcccggctactgccccagcttcagaaggctggtctcagtgccatcaacatcagcctggacaccctggtgcctgccaagtttgagttcattgtccgcaggaaaggcttccacaaggtcatggagggcatccacaaggccatcgagctgggctacaaccctgtgaaggtgaactgtgtggtgatgcgaggccttaacgaggatgaactcctggactttgcggccttgactgagggcctccccctggatgtgcgcttcatagagtatatgccctttgatggcaacaagtggaacttcaagaagatggtcagctataaggagatgctagacactgtccggcagcagtggccagagctggagaaggtgccagaggaggaatccagcacagccaaggcctttaaaatccctggcttccaaggccagatcagcttcatcacatccatgtctgagcatttctgtgggacctgcaaccgcctgcgaatcacagctgatgggaacctcaaggtctgcctctttggaaactctgaggtatccctgcgggatcacctgcgagctggggcctctgagcaggagctgctgagaatcattggggctgctgtgggcaggaagaagcggcagcatgcagagtgagaaggctgagctctggaacaacgtatttgtgtcctctgtcaacagttgaaccaaattctgcttttctgaagatcaaatgtatcttgaacagcttccatagtccttttgtttccagagcactgagacccaacatgtgacctggggccagcagcatcacctaggaaattatgagaaatacagactctcagacccacaggatcagaagctgcattttaacaagactcatctttacaagactccaggtgactcatgcacaaattaaagagacatttttctaaagctcccagctgattcagaagctgctggtccatgtaccgcactttgagtagcacttaacaggactataaaattgtaaatttggaaatcatcttcccccaccgtagtggcaacaaaacgttctttgtcatccttaa

SEQ ID NO: 155253 - DNA, 4256 bp, Homo sapiens
  Payload ID: 10518
  Gene Symbol: MOCS1
  Gene Name: molybdenum cofactor synthesis 1
  Uniprot ID: Q9NZB8
  ENST ID: ENST00000373186
  CDS Start-End: 139-1296
gccagaaatcttcccagtagagatcaccatccgcccccgacccccaagctgaatacttaaggggtgggtccttcccatcaagctgatttctcaacgagagggacaatcccagcttccccaacattgcagagcccaaacatgtggaagagttggaagctccgcacagatgtcagagtaagggagggggcaggcggttctccttgtgcctcttcccagcccggtagcaggggcccatgcttcctccctggtctgtcctcgcaggaggtgtccaggcggaggcagttcctgcgggagcatgcggcccccttctccgccttcctcacagacagcttcggccggcagcacagctacctgcggatctccctcacagagaagtgcaacctcagatgtcagtactgcatgcccgaggagggggtcccgctgacccccaaagccaacctgctgaccacagaggagatcctgaccctcgcccggctctttgtgaaggaaggcatcgacaagatccggctcacaggtggagagccgcttatccggccggacgtggtggacattgtggcccagctccagcggctggaagggctgagaaccataggtgttaccaccaatggcatcaacctggcccggctactgccccagcttcagaaggctggtctcagtgccatcaacatcagcctggacaccctggtgcctgccaagtttgagttcattgtccgcaggaaaggcttccacaaggtcatggagggcatccacaaggccatcgagctgggctacaaccctgtgaaggtgaactgtgtggtgatgcgaggccttaacgaggatgaactcctggactttgcggccttgactgagggcctccccctggatgtgcgcttcatagagtatatgccctttgatggcaacaagtggaacttcaagaagatggtcagctataaggagatgctagacactgtccggcagcagtggccagagctggagaaggtgccagaggaggaatccagcacagccaaggcctttaaaatccctggcttccaaggccagatcagcttcatcacatccatgtctgagcatttctgtgggacctgcaaccgcctgcgaatcacagctgatgggaacctcaaggtctgcctctttggaaactctgaggtatccctgcgggatcacctgcgagctggggcctctgagcaggagctgctgagaatcattggggctgctgtgggcaggaagaagcggcagcatgcaggcatgttcagtatttcccagatgaagaaccggcccatgatcctcatcggtgggtgacccatcaagttatttttgatgttccccaattccccaccagccaatccaagcattttctcctgggacccgctccatgttcagggtctaagacccagaatgagtttctccagccaggtggccactttatggaaaggatgcagggtcccccagacccctcctctagcccagcagcggctggggtctggctcctttcagagacactacacttcccgtgcagactcagatgccaactcaaagtgccttagcccaggttcctgggcttctgctgccccctcaggaccccagctaacctcagaacaactaactcatgtggactcggaaggacgggcagctatggtagatgtgggcaggaagccagacacagagcgggtggctgtggcttcagccgtggtcctcctgggaccggtagccttcaagcttgtccagcagaaccagctcaagaaaggagatgccctagtggtggcccagctggctggagtccaggcagccaaggtgaccagccagctgatccctctgtgccaccacgtggccctgagccacatccaggtgcagctggagctggacagcacacgccatgccgtgaagatccaggcatcttgccgggctcggggccccaccggggtggagatggaggccctgacctctgctgcagtggccgccctcaccctgtatgacatgtgcaaggctgtcagcagggacatcgtgttggaggagatcaagctcattagcaagactggtggtcagcggggggacttccatcgggcttagcacctgcccttctcacccatggcccacccaggcctggagctgggatgcaatgtaggctgagggaaagacgtcaggttcctttaatcacagtcactgtttgtttaccttgagcagtaaacccgaagtcagcctgctctactactaacaaacaggcctgctgctagatgatctctaatgaccaatggggcttcctttctatagggaggataccagcaggcccttaagccttccaggacactaaggtcgtgggagcgggactgcaacaagcaatgccagataactgagaaatcatgttctttgtggactatttcagacaaccaggttccgacagtccagcccagaacttttccttctcattttgggttttctcttctcctgctttcctggggagagattaagcgctcattaagcagaggagcccactttgaggagagcaaagcacaagcttgcctgaagaatggatcccaacttctccccggcagctctgcctccctaagtctgtgaagccgcagccctgccctgtcctgtcctgtcctgacttcatctctccttctgcccaagtctgtgtcccatcagacttgcagcctttcagcttaacagttgcccggtcctgctggccccttttcctctggcccccctcttctgaaacaggatgtgcacacatgggccatagccctaaggactcctgccagaccacacagcccacacctggccctgttcacggctgttccacccacccctctttattctggagcatatcagggaaagaaaagttgatgatagattgccttcaccctcacagcgcacaaataaagctacgatgccaactttgcagatgcaagaatgaagacactgtgtgggtagggcactgagctgctgcagtttcacagggaaggctgcacctatcaatcaatcaatcaatcctatcccaagacacagttccctgagggaagaagaggagggacctggaaaggcctaagggtgtactctctgtatagccccgctatgggaaaataaagtggagtagggggcatagaaatgcaccatctaagggaaatcttttgtcaggtggtggccaggggtgttcaaagctcattgcttgcattaccagctattagagagatcagagagggcaattaattagaggctcctggttctcacatcccaaacacacacagttctggcctgctgggctctctaacttggatgtctttgagtcctcagtggtgccccctgcctgcctcccctctgccctatgccaaggtgtgctggcaaatattaaacaaccagctctctggaaaagacaatttgtgatataaatactcccatgttgaataatttcaagctaccagtatgtcaaatggcttgcaaaatttctgaaaatgtaaacaattggttctcacagagctggtacaagctggctccagcacactctcagcccaccccagatcccctcataggaagaaggcacaagtttaaaggcagactgggtagggatggtatgaatttaatattttttagtattacaatatattcttataaaaaaggtgcaagtgaaaaaggacactgtagattatgtccattagcctcatttgtcatctgaggcagctggtgagaacagccttggcgtgaaggcatccctggtagaagtcgggggagatagatagtcacagttccccagttggtggaaatgggatgggagtagggagaggctggaacagacccttccccattcacctggagaattttctcctcccactgccctaaacactttatttccatcacaggggagaaatgctgctgagaaggttgtgtttgttaggttgatgacgaattttacattggccacaaaattagctagagaaacttatctaaaggtggcaggagcagtggggagggcatgaagaaagcaagaccaagaaacaacctattaaggaccagctcagccaccccgactgggcaccagccccttcttactcagttgagtatgagtccatggtccaaggcactgttggagatctggctacagtggcatctagcaccagagccactggccagatgtagaaaataaatagaaaaatatctttcttttagagtgagaaggctgagctctggaacaacgtatttgtgtcctctgtcaacagttgaaccaaattctgcttttctgaagatcaaatgtatcttgaacagct

SEQ ID NO: 155254 - DNA, 3358 bp, Homo sapiens
  Payload ID: 10518
  Gene Symbol: MOCS1
  Gene Name: molybdenum cofactor synthesis 1
  Uniprot ID: Q9NZB8
  ENST ID: ENST00000373188
  CDS Start-End: 135-1292
gcgtcctcgcctattggctgcgcgggtcccgccctccccctgcccctccccgcccttgctgggatgaccccgggggcgagtgcccggccagtgtgctcccgaagcgggctgcggttccgctcgtatcaggcttcatggcggcgcggccactgtcccggatgctgcggcggcttctgaggtccagcgcccggagctgcagctcaggggctccggtgacccagccctgccccggggagtccgcgcgagctgcctcggaggaggtgtccaggcggaggcagttcctgcgggagcatgcggcccccttctccgccttcctcacagacagcttcggccggcagcacagctacctgcggatctccctcacagagaagtgcaacctcagatgtcagtactgcatgcccgaggagggggtcccgctgacccccaaagccaacctgctgaccacagaggagatcctgaccctcgcccggctctttgtgaaggaaggcatcgacaagatccggctcacaggtggagagccgcttatccggccggacgtggtggacattgtggcccagctccagcggctggaagggctgagaaccataggtgttaccaccaatggcatcaacctggcccggctactgccccagcttcagaaggctggtctcagtgccatcaacatcagcctggacaccctggtgcctgccaagtttgagttcattgtccgcaggaaaggcttccacaaggtcatggagggcatccacaaggccatcgagctgggctacaaccctgtgaaggtgaactgtgtggtgatgcgaggccttaacgaggatgaactcctggactttgcggccttgactgagggcctccccctggatgtgcgcttcatagagtatatgccctttgatggcaacaagtggaacttcaagaagatggtcagctataaggagatgctagacactgtccggcagcagtggccagagctggagaaggtgccagaggaggaatccagcacagccaaggcctttaaaatccctggcttccaaggccagatcagcttcatcacatccatgtctgagcatttctgtgggacctgcaaccgcctgcgaatcacagctgatgggaacctcaaggtctgcctctttggaaactctgaggtatccctgcgggatcacctgcgagctggggcctctgagcaggagctgctgagaatcattggggctgctgtgggcaggaagaagcggcagcatgcaggcatgttcagtatttcccagatgaagaaccggcccatgatcctcatcggtgggtgacccatcaagttatttttgatgttccccaattccccaccagccaatccaagcattttctcctgggacccgctccatgttcagggtctaagacccagaatgagtttctccagccaggtggccactttatggaaaggatgcagggtcccccagacccctcctctagcccagcagcggctggggtctggctcctttcagagacactacacttcccgtgcagactcagatgccaactcaaagtgccttagcccaggttcctgggcttctgctgccccctcaggaccccagctaacctcagaacaactaactcatgtggactcggaaggacgggcagctatggtagatgtgggcaggaagccagacacagagcgggtggctgtggcttcagccgtggtcctcctgggaccggtagccttcaagcttgtccagcagaaccagctcaagaaaggagatgccctagtggtggcccagctggctggagtccaggcagccaaggtgaccagccagctgatccctctgtgccaccacgtggccctgagccacatccaggtgcagctggagctggacagcacacgccatgccgtgaagatccaggcatcttgccgggctcggggccccaccggggtggagatggaggccctgacctctgctgcagtggccgccctcaccctgtatgacatgtgcaaggctgtcagcagggacatcgtgttggaggagatcaagctcattagcaagactggtggtcagcggggggacttccatcgggcttagcacctgcccttctcacccatggcccacccaggcctggagctgggatgcaatgtaggctgagggaaagacgtcaggttcctttaatcacagtcactgtttgtttaccttgagcagtaaacccgaagtcagcctgctctactactaacaaacaggcctgctgctagatgatctctaatgaccaatggggcttcctttctatagggaggataccagcaggcccttaagccttccaggacactaaggtcgtgggagcgggactgcaacaagcaatgccagataactgagaaatcatgttctttgtggactatttcagacaaccaggttccgacagtccagcccagaacttttccttctcattttgggttttctcttctcctgctttcctggggagagattaagcgctcattaagcagaggagcccactttgaggagagcaaagcacaagcttgcctgaagaatggatcccaacttctccccggcagctctgcctccctaagtctgtgaagccgcagccctgccctgtcctgtcctgtcctgacttcatctctccttctgcccaagtctgtgtcccatcagacttgcagcctttcagcttaacagttgcccggtcctgctggccccttttcctctggcccccctcttctgaaacaggatgtgcacacatgggccatagccctaaggactcctgccagaccacacagcccacacctggccctgttcacggctgttccacccacccctctttattctggagcatatcagggaaagaaaagttgatgatagattgccttcaccctcacagcgcacaaataaagctacgatgccaactttgcagatgcaagaatgaagacactgtgtgggtagggcactgagctgctgcagtttcacagggaaggctgcacctatcaatcaatcaatcaatcctatcccaagacacagttccctgagggaagaagaggagggacctggaaaggcctaagggtgtactctctgtatagccccgctatgggaaaataaagtggagtagggggcatagaaatgcaccatctaagggaaatcttttgtcaggtggtggccaggggtgttcaaagctcattgcttgcattaccagctattagagagatcagagagggcaattaattagaggctcctggttctcacatcccaaacacacacagttctggcctgctgggctctctaacttggatgtctttgagtcctcagtggtgccccctgcctgcctcccctctgccctatgccaaggtgtgctggcaaatattaaacaaccagctctctgg

SEQ ID NO: 155255 - DNA, 2852 bp, Homo sapiens
  Payload ID: 10518
  Gene Symbol: MOCS1
  Gene Name: molybdenum cofactor synthesis 1
  Uniprot ID: Q9NZB8
  ENST ID: ENST00000373195
  CDS Start-End: 215-1816
cttgctgggatgaccccgggggcgagtgcccggccagtgtgctcccgaagcgggctgcggttccgctcgtatcaggcttcatggcggcgcggccactgtcccggatgctgcggcggcttctgaggtccagcgcccggagctgcagctcaggggctccggtgacccagccctgccccggggagtccgcgcgagctgcctcggaggtcagtactgcatgcccgaggagggggtcccgctgacccccaaagccaacctgctgaccacagaggagatcctgaccctcgcccggctctttgtgaaggaaggcatcgacaagatccggctcacaggtggagagccgcttatccggccggacgtggtggacattgtggcccagctccagcggctggaagggctgagaaccataggtgttaccaccaatggcatcaacctggcccggctactgccccagcttcagaaggctggtctcagtgccatcaacatcagcctggacaccctggtgcctgccaagtttgagttcattgtccgcaggaaaggcttccacaaggtcatggagggcatccacaaggccatcgagctgggctacaaccctgtgaaggtgaactgtgtggtgatgcgaggccttaacgaggatgaactcctggactttgcggccttgactgagggcctccccctggatgtgcgcttcatagagtatatgccctttgatggcaacaagtggaacttcaagaagatggtcagctataaggagatgctagacactgtccggcagcagtggccagagctggagaaggtgccagaggaggaatccagcacagccaaggcctttaaaatccctggcttccaaggccagatcagcttcatcacatccatgtctgagcatttctgtgggacctgcaaccgcctgcgaatcacagctgatgggaacctcaaggtctgcctctttggaaactctgaggtatccctgcgggatcacctgcgagctggggcctctgagcaggagctgctgagaatcattggggctgctgtgggcaggaagaagcggcagcatgcagagttatttttgatgttccccaattccccaccagccaatccaagcattttctcctgggacccgctccatgttcagggtctaagacccagaatgagtttctccagccaggtggccactttatggaaaggatgcagggtcccccagacccctcctctagcccagcagcggctggggtctggctcctttcagagacactacacttcccgtgcagactcagatgccaactcaaagtgccttagcccaggttcctgggcttctgctgccccctcaggaccccagctaacctcagaacaactaactcatgtggactcggaaggacgggcagctatggtagatgtgggcaggaagccagacacagagcgggtggctgtggcttcagccgtggtcctcctgggaccggtagccttcaagcttgtccagcagaaccagctcaagaaaggagatgccctagtggtggcccagctggctggagtccaggcagccaaggtgaccagccagctgatccctctgtgccaccacgtggccctgagccacatccaggtgcagctggagctggacagcacacgccatgccgtgaagatccaggcatcttgccgggctcggggccccaccggggtggagatggaggccctgacctctgctgcagtggccgccctcaccctgtatgacatgtgcaaggctgtcagcagggacatcgtgttggaggagatcaagctcattagcaagactggtggtcagcggggggacttccatcgggcttagcacctgcccttctcacccatggcccacccaggcctggagctgggatgcaatgtaggctgagggaaagacgtcaggttcctttaatcacagtcactgtttgtttaccttgagcagtaaacccgaagtcagcctgctctactactaacaaacaggcctgctgctagatgatctctaatgaccaatggggcttcctttctatagggaggataccagcaggcccttaagccttccaggacactaaggtcgtgggagcgggactgcaacaagcaatgccagataactgagaaatcatgttctttgtggactatttcagacaaccaggttccgacagtccagcccagaacttttccttctcattttgggttttctcttctcctgctttcctggggagagattaagcgctcattaagcagaggagcccactttgaggagagcaaagcacaagcttgcctgaagaatggatcccaacttctccccggcagctctgcctccctaagtctgtgaagccgcagccctgccctgtcctgtcctgtcctgacttcatctctccttctgcccaagtctgtgtcccatcagacttgcagcctttcagcttaacagttgcccggtcctgctggccccttttcctctggcccccctcttctgaaacaggatgtgcacacatgggccatagccctaaggactcctgccagaccacacagcccacacctggccctgttcacggctgttccacccacccctctttattctggagcatatcagggaaagaaaagttgatgatagattgccttcaccctcacagcgcacaaataaagctacgatgccaactttgcagatgcaagaatgaagacactgtgtgggtagggcactgagctgctgcagtttcacagggaaggctgcacctatcaatcaatcaatcaatcctatcccaagacacagttccctgagggaagaagaggagggacctggaaaggcctaagggtgtactctctgtatagccccgctatgggaaaataaagtggagtagggggcatag

SEQ ID NO: 155256 - DNA, 1071 bp, Homo sapiens
  Payload ID: 10518
  Gene Symbol: MOCS1
  Gene Name: molybdenum cofactor synthesis 1
  Uniprot ID: Q9NZB8
  ENST ID: ENST00000432280
  CDS Start-End: 1-1071
atgtggaagagttggaagctccgcacagatgtcagagaggtgtccaggcggaggcagttcctgcgggagcatgcggcccccttctccgccttcctcacagacagcttcggccggcagcacagctacctgcggatctccctcacagagaagtgcaacctcagatgtcagtactgcatgcccgaggagggggtcccgctgacccccaaagccaacctgctgaccacagaggagatcctgaccctcgcccggctctttgtgaaggaaggcatcgacaagatccggctcacaggtggagagccgcttatccggccggacgtggtggacattgtggcccagctccagcggctggaagggctgagaaccataggtgttaccaccaatggcatcaacctggcccggctactgccccagcttcagaaggctggtctcagtgccatcaacatcagcctggacaccctggtgcctgccaagtttgagttcattgtccgcaggaaaggcttccacaaggtcatggagggcatccacaaggccatcgagctgggctacaaccctgtgaaggtgaactgtgtggtgatgcgaggccttaacgaggatgaactcctggactttgcggccttgactgagggcctccccctggatgtgcgcttcatagagtatatgccctttgatggcaacaagtggaacttcaagaagatggtcagctataaggagatgctagacactgtccggcagcagtggccagagctggagaaggtgccagaggaggaatccagcacagccaaggcctttaaaatccctggcttccaaggccagatcagcttcatcacatccatgtctgagcatttctgtgggacctgcaaccgcctgcgaatcacagctgatgggaacctcaaggtctgcctctttggaaactctgaggtatccctgcgggatcacctgcgagctggggcctctgagcaggagctgctgagaatcattggggctgctgtgggcaggaagaagcggcagcatgcaggcatgttcagtatttcccagatgaagaaccggcccatgatcctcatcggtgggtga

SEQ ID NO: 155257 - DNA, 1920 bp, Homo sapiens
  Payload ID: 10518
  Gene Symbol: MOCS1
  Gene Name: molybdenum cofactor synthesis 1
  Uniprot ID: Q9NZB8
  ENST ID: ENST00000425303
  CDS Start-End: 10-1920
agcccaaacatgtggaagagttggaagctccgcacagatgtcagagtaagggagggggcaggcggttctccttgtgcctcttcccagcccggtagcaggggcccatgcttcctccctggtctgtcctcgcaggaggtgtccaggcggaggcagttcctgcgggagcatgcggcccccttctccgccttcctcacagacagcttcggccggcagcacagctacctgcggatctccctcacagagaagtgcaacctcagatgtcagtactgcatgcccgaggagggggtcccgctgacccccaaagccaacctgctgaccacagaggagatcctgaccctcgcccggctctttgtgaaggaaggcatcgacaagatccggctcacaggtggagagccgcttatccggccggacgtggtggacattgtggcccagctccagcggctggaagggctgagaaccataggtgttaccaccaatggcatcaacctggcccggctactgccccagcttcagaaggctggtctcagtgccatcaacatcagcctggacaccctggtgcctgccaagtttgagttcattgtccgcaggaaaggcttccacaaggtcatggagggcatccacaaggccatcgagctgggctacaaccctgtgaaggtgaactgtgtggtgatgcgaggccttaacgaggatgaactcctggactttgcggccttgactgagggcctccccctggatgtgcgcttcatagagtatatgccctttgatggcaacaagtggaacttcaagaagatggtcagctataaggagatgctagacactgtccggcagcagtggccagagctggagaaggtgccagaggaggaatccagcacagccaaggcctttaaaatccctggcttccaaggccagatcagcttcatcacatccatgtctgagcatttctgtgggacctgcaaccgcctgcgaatcacagctgatgggaacctcaaggtctgcctctttggaaactctgaggtatccctgcgggatcacctgcgagctggggcctctgagcaggagctgctgagaatcattggggctgctgtgggcaggaagaagcggcagcatgcaggcatgttcagtatttcccagatgaagaaccggcccatgatcctcatcgagttatttttgatgttccccaattccccaccagccaatccaagcattttctcctgggacccgctccatgttcagggtctaagacccagaatgagtttctccagccaggtggccactttatggaaaggatgcagggtcccccagacccctcctctagcccagcagcggctggggtctggctcctttcagagacactacacttcccgtgcagactcagatgccaactcaaagtgccttagcccaggttcctgggcttctgctgccccctcaggaccccagctaacctcagaacaactaactcatgtggactcggaaggacgggcagctatggtagatgtgggcaggaagccagacacagagcgggtggctgtggcttcagccgtggtcctcctgggaccggtagccttcaagcttgtccagcagaaccagctcaagaaaggagatgccctagtggtggcccagctggctggagtccaggcagccaaggtgaccagccagctgatccctctgtgccaccacgtggccctgagccacatccaggtgcagctggagctggacagcacacgccatgccgtgaagatccaggcatcttgccgggctcggggccccaccggggtggagatggaggccctgacctctgctgcagtggccgccctcaccctgtatgacatgtgcaaggctgtcagcagggacatcgtgttggaggagatcaagctcattagcaagactggtggtcagcggggggacttccatcgggcttag

SEQ ID NO: 155258 - DNA, 566 bp, Homo sapiens
  Payload ID: 10518
  Gene Symbol: MOCS1
  Gene Name: molybdenum cofactor synthesis 1
  ENST ID: ENST00000487924
  CDS Start-End: 43-339
gtgctcccgaagcgggctgcggttccgctcgtatcaggcttcatggcggcgcggccactgtcccggatgctgcggcggcttctgaggtccagcgcccggagctgcagctcaggggctccggtgacccagccctgccccggggagtccgcgcgagctgcctcggaggaggtgtccaggcggaggcagttcctgcgggagcatgcggcccccttctccgccttcctcacagacagcttcggccggcagcacagctacctgcggatctccctcacagagaagtgcaacctcagatgtgagtcaccttcctgggccctctctgggctggtgtccatctgctgaagcagcccttgaaatttccctgtgcctggaaatcctcctgtgtcctccagttctgctttctaacttcttcacctgctaccccttgcttaccaggccaggtcagtactgcatgcccgaggagggggtcccgctgacccccaaagccaacctgctgaccacagaggagatcctgaccctcgcccggctctttgtgaaggaaggcatcgacaagatccggctcacaggtg

SEQ ID NO: 155259 - DNA, 3568 bp, Homo sapiens
  Payload ID: 10519
  Gene Symbol: MOCS2
  Gene Name: molybdenum cofactor synthesis 2
  Uniprot ID: O96033
  ENST ID: ENST00000361377
  CDS Start-End: 43-309
gcgcctttgcggccgtgattcggtcccgctgtcctaggcgggatggtgccgctgtgccaggttgaagtattgtattttgcaaaaagtgctgaaataacaggagttcgttcagagaccatttctgtgcctcaagaaataaaagcgttgcagctgtggaaggagatagaaactcgacatcctggattggctgatgttagaaatcagataatatttgctgttcgtcaagaatatgtcgagcttggagatcagctcctcgtgcttcagcctggagacgaaattgccgttatcccccccattagtggaggatagtgcttttgagccatctaggaaagatatggatgaagttgaagagaaatctaaagatgttataaactttactgccgagaaactttcagtagatgaagtctcacagttggtgatttctccgctctgtggtgcaatatccctatttgtagcttggttccagtgtcagaagcaagcataatcattgctgtgtcctcagcccacagagctgcatctcttgaagctgtgagctatgccattgatactttaaaagccaaggtgcccatatggaaaaaggaaatatacgaagagtcatcaacttggaaaggaaacaaagagtgcttttgggcatccaacagttaatcacttatgtttttagagcatgcaatcttaactttgttaaactattattattgatcacattttgatttttttctctccacatcaggatagtttactgaagcacaatctcttatactagtgggacaaaagggagaaaaaggaagcaagataaatgggtatgtaggatgaagggttatttaaaatggaactaaagatagaaggaggactgtaggaagaaatggaataatttaaatgtgaggaaagatatctgtggtagacatgtccttccatgactaatttctaattgtaactcaacacacattgaggtatgggccctcctcagtgactttaactagctcagaaacgtactcccccaccaaccccacctcaccgccccccatcccggttctgggagagcattgttattaaggatgcatgacaggaatgttggcagaactggaaagtattaaaaaagcattatcagacagtcttgatattatacattttcagaaatatattaaaaataataaactaaaacccatgatttcaaaagtttaaaaagagtattttctttttttttaaattgcctaaaatagttctcattatggagatttctgggatttcagaatctataatcttaccagaaaactttttgttgttttttattagttgttaattttgtatcaatatacaaatcagcacaaaattgtcataaagctaactagcaacaaggtggtttgtgttgaaatgtttaggtaaacaatgccccaatttttaactggttaagctttatagtattttgatagacttgtacatataagtcccatatagttcttaaatttttttttccagctttatttaggtatacttgacaaaaattgtatgtatttaaagtatacaatgtgatttttgatacacatatacattgtgaggtgattaccataatccaactaattaacatattcctcagctcacatagtcccctcttctgtgtggtgagaatatttaaggtctactctcagcaaatttcaggtaaacacatagctcataaaataataaaatacaggcaaaatttgggcagtcggcatcatcacaaaatttgcattatgcatattaagaacaaaagctatactttcagacacttagattgaaggatttttttcttatgtctgggacaaataagaaacgtagtaatcctatttgttatatgtagtgaaaacatcttttacctaaggaacccatttattcaacaaatatttattgaatgcctgttttgtgccaggcacccacccagtgatctttttctgccaacctaaaataccttgaggaacactctgcatcttatctgtggctgggacccataggacagccacactgactttaggaatcacctggttacatcagttgatgcttgttcattagtccgtctggagagattgggccagaaggatactggaagggcagacaaaccctccgcctacttcctctgccgggttcgggttgcctgtttggtctcagccttaccttcacagttcagtgtcactctggcttgccatcgagcttccgcctgtccccattggagagaaggggtgggtgttggctgttgcattatatctaaaagcacattatcatggggttactgggtcactggacatttctaggattttggacataggttgttaaatggatgttatgtcatatgcaatgttgataggtatatgtggatttcaagactttcctacttagatatttctttagaagttccttattgagggtaatgatgtttttaaagaacatagaacattctttatgttttaaaagaatcatgccttcattaagtaggctttattctaagtttggaactgagactgttatgcttttaaagtctccaacagagaggttaaggagttaacctggggcatgccagaactgggatggaatggccttgaaagattttagtgcattgcacttgacttagataggatctttactgacccttgcttacttaggagtggcagagttaattggtggttcagatattaaggggctactgtcactctgatatgtagcttttctatcatctctgtaacttagcttcaagtaactagaagagtaatctaaaaaaaataattagcctttaatcagattgcctgcagtgtttcttggtcactttaaagccgtgactttgcatgattgctaggtaagttcacttaagaaataggaaattcaaattatttatgtttcaagtatttttgaacaggtggtaaaatgaaattgatttttatcatctttgaatgaaagtaacagcagatattcaatgagtgacttattttgtggacatttttgtcctttggatatgatgtatagagtcacaatatattttcagccttttttgagaaataagtgatttagacatcttacacagttactgagcacctggtacagtgaagatctctcaagaatgatttgtgtgatgtagttcggtggatcatccagcagagggcagtagagccagagccatagtaaaagttatagtaaagttgctcttagcaacttgagtcttacttagatttaattttgcatagaaccaaaagttcagtttagtagccattttctttaaagtcaggctgtagtggttccgaaatgaaaattaggccctgattttatgtaagatgatgtccaatctttaattgacaccttaaaaatattaaaagattatgataggatcaggaaggagtttttgaaaatgcaatttgtagtttttaacaagtgatgtagaataaataaaaagaagtactttttaaaaagtaagtataaaattattttccagttaactatgggatataaatgattgctttaatacaggtcttcctaacctgtacagcatttcctaacctgctctgtgaaaaacaaagaaataaaacttagtgctctctttctctaa

SEQ ID NO: 155260 - DNA, 1785 bp, Homo sapiens
  Payload ID: 10519
  Gene Symbol: MOCS2
  Gene Name: molybdenum cofactor synthesis 2
  Uniprot ID: O96007
  ENST ID: ENST00000396954
  CDS Start-End: 679-1245
ccgtgattcggtcccgctgtcctaggcgggatggtgccgctgtgccaggtaagggtggcgggtgtgcgtgcgggcctgggtgcggagccctcctcgacgtgtctctcccgccctttccctccacatacccagccttggtcagtcggacctccccactagcccccaacctggccggcgtcttgggttcgggggcgcccccgcccccgcccccgggcccttcctgtctccgggctttactgcgactgccccagcagaagtcgggtcctctccgagaactcttgtcagctcacggcagcaaggacggactcgttctgaaggcgcctccaccttttatgaccacctctttcccagattattcgttttgatgaagctaaaattttaatctaaaaagaaatgcacctcatggagaattcttgtgaagaactgtgcttcatctgtggatttctacacccttgatcatttgcaaacctgtaattatttcgtaaagagttgtttgcacggagtgacaggttgaagtattgtattttgcaaaaagtgctgaaataacaggagttcgttcagagaccatttctgtgcctcaagaaataaaagcgttgcagctgtggaaggagatagaaactcgacatcctggattggctgatgttagaaatcagataatatttgctgttcgtcaagaatatgtcgagcttggagatcagctcctcgtgcttcagcctggagacgaaattgccgttatcccccccattagtggaggatagtgcttttgagccatctaggaaagatatggatgaagttgaagagaaatctaaagatgttataaactttactgccgagaaactttcagtagatgaagtctcacagttggtgatttctccgctctgtggtgcaatatccctatttgtagggactacaagaaataactttgaagggaaaaaagtcattagcttagaatatgaagcatatctacccatggcggaaaatgaagtcagaaagatttgtagtgacattaggcagaaatggccagtcaaacacatagcagtgttccatagacttggcttggttccagtgtcagaagcaagcataatcattgctgtgtcctcagcccacagagctgcatctcttgaagctgtgagctatgccattgatactttaaaagccaaggtgcccatatggaaaaaggaaatatacgaagagtcatcaacttggaaaggaaacaaagagtgcttttgggcatccaacagttaatcacttatgtttttagagcatgcaatcttaactttgttaaactattattattgatcacattttgatttttttctctccacatcaggatagtttactgaagcacaatctcttatactagtgggacaaaagggagaaaaaggaagcaagataaatgggtatgtaggatgaagggttatttaaaatggaactaaagatagaaggaggactgtaggaagaaatggaataatttaaatgtgaggaaagatatctgtggtagacatgtccttccatgactaatttctaattgtaactcaacacacattgaggtatgggccctcctcagtgactttaactagctcagaaacgtactcccccaccaaccccacctcaccgccccccatcccggttctgggagagcattgttattaaggatgcatgacaggaatgttggcagaactggaaagtattaaaaaagcattatcagacagtcttgatattatacattttcagaaatatattaaaaataataaactaaaacccatgatttcaaaagtttaaaaa

SEQ ID NO: 155261 - DNA, 1337 bp, Homo sapiens
  Payload ID: 10519
  Gene Symbol: MOCS2
  Gene Name: molybdenum cofactor synthesis 2
  Uniprot ID: O96033
  ENST ID: ENST00000450852
  CDS Start-End: 50-316
cgcgcctgcgcctttgcggccgtgattcggtcccgctgtcctaggcgggatggtgccgctgtgccaggttgaagtattgtattttgcaaaaagtgctgaaataacaggagttcgttcagagaccatttctgtgcctcaagaaataaaagcgttgcagctgtggaaggagatagaaactcgacatcctggattggctgatgttagaaatcagataatatttgctgttcgtcaagaatatgtcgagcttggagatcagctcctcgtgcttcagcctggagacgaaattgccgttatcccccccattagtggaggatagtgcttttgagccatctaggaaagatatggatgaagttgaagagaaatctaaagatgttataaactttactgccgagaaactttcagtagatgaagtctcacagttggtgatttctccgctctgtggtgcaatatccctatttgtagggactacaagaaataactttgaagggaaaaaagtcattagcttagaatatgaagcatatctacccatggcggaaaatgaagtcagaaagatttgtagtgacattaggcagaaatggccagtcaaacacatagcagtgttccatagacttggcttggttccagtgtcagaagcaagcataatcattgctgtgtcctcagcccacagagctgcatctcttgaagctgtgagctatgccattgatactttaaaagccaaggtgcccatatggaaaaaggaaatatacgaagagtcatcaacttggaaaggaaacaaagagtgcttttgggcatccaacagttaatcacttatgtttttagagcatgcaatcttaactttgttaaactattattattgatcacattttgatttttttctctccacatcaggatagtttactgaagcacaatctcttatactagtgggacaaaagggagaaaaaggaagcaagataaatgggtatgtaggatgaagggttatttaaaatggaactaaagatagaaggaggactgtaggaagaaatggaataatttaaatgtgaggaaagatatctgtggtagacatgtccttccatgactaatttctaattgtaactcaacacacattgaggtatgggccctcctcagtgactttaactagctcagaaacgtactcccccaccaaccccacctcaccgccccccatcccggttctgggagagcattgttattaaggatgcatgacaggaatgttggcagaactggaaagtattaaaaaagcattatcagacagtcttgatattatacattttcagaaatatattaaaaataataaactaaaacccatgatttcaaaagtt

SEQ ID NO: 155262 - DNA, 1251 bp, Homo sapiens
  Payload ID: 10519
  Gene Symbol: MOCS2
  Gene Name: molybdenum cofactor synthesis 2
  Uniprot ID: O96033
  ENST ID: ENST00000510818
  CDS Start-End: 14-280
tgtcctaggcgggatggtgccgctgtgccaggttgaagtattgtattttgcaaaaagtgctgaaataacaggagttcgttcagagaccatttctgtgcctcaagaaataaaagcgttgcagctgtggaaggagatagaaactcgacatcctggattggctgatgttagaaatcagataatatttgctgttcgtcaagaatatgtcgagcttggagatcagctcctcgtgcttcagcctggagacgaaattgccgttatcccccccattagtggaggatagtgcttttgagccatctaggaaagatatggatgaagttgaagagaaatctaaagatgttataaactttactgccgagaaactttcagtagatgaagtctcacagttggtgatttctccgctctgtggtgcaatatccctatttgtagggactacaagaaataactttgaagggaaaaaagtcattagcttagaatatgaagcatatctacccatggcggaaaatgaagtcagaaagatttgtagtgacattaggcagaaatggccagtcaaacacatagcagtgttccatagacttggcccacagagctgcatctcttgaagctgtgagctatgccattgatactttaaaagccaaggtgcccatatggaaaaaggaaatatacgaagagtcatcaacttggaaaggaaacaaagagtgcttttgggcatccaacagttaatcacttatgtttttagagcatgcaatcttaactttgttaaactattattattgatcacattttgatttttttctctccacatcaggatagtttactgaagcacaatctcttatactagtgggacaaaagggagaaaaaggaagcaagataaatgggtatgtaggatgaagggttatttaaaatggaactaaagatagaaggaggactgtaggaagaaatggaataatttaaatgtgaggaaagatatctgtggtagacatgtccttccatgactaatttctaattgtaactcaacacacattgaggtatgggccctcctcagtgactttaactagctcagaaacgtactcccccaccaaccccacctcaccgccccccatcccggttctgggagagcattgttattaaggatgcatgacaggaatgttggcagaactggaaagtattaaaaaagcattatcagacagtcttgatattatacattttcagaaatatattaaaaataataaactaaaacccatgatttcaaaa

SEQ ID NO: 155263 - DNA, 1210 bp, Homo sapiens
  Payload ID: 10519
  Gene Symbol: MOCS2
  Gene Name: molybdenum cofactor synthesis 2
  Uniprot ID: O96033
  ENST ID: ENST00000508922
  CDS Start-End: 34-300
cggccgtgattcggtcccgctgtcctaggcgggatggtgccgctgtgccaggttgaagtattgtattttgcaaaaagtgctgaaataacaggagttcgttcagagaccatttctgtgcctcaagaaataaaagcgttgcagctgtggaaggagatagaaactcgacatcctggattggctgatgttagaaatcagataatatttgctgttcgtcaagaatatgtcgagcttggagatcagctcctcgtgcttcagcctggagacgaaattgccgttatcccccccattagtggaggatagtgcttttgagccatctaggaaagatatggatgaagttgaagagaaatctaaagatgttataaactttactgccgagaaactttcagtagatgaagtctcacagttggtgatttctccgctctgtggtgcaatatccctatttgtagggactacaagaaataactttgaagggaaaaaagtcattagcttagaatatgaagcatatctacccatggcggaaaatgaagtcagaaagatttgtagtgacattaggcagaaatggccagtcaaacacatagcagtgttccatagacttggtagaatggtctatttttaatacctgttatgattttgttttttaggaaatatacgaagagtcatcaacttggaaaggaaacaaagagtgcttttgggcatccaacagttaatcacttatgtttttagagcatgcaatcttaactttgttaaactattattattgatcacattttgatttttttctctccacatcaggatagtttactgaagcacaatctcttatactagtgggacaaaagggagaaaaaggaagcaagataaatgggtatgtaggatgaagggttatttaaaatggaactaaagatagaaggaggactgtaggaagaaatggaataatttaaatgtgaggaaagatatctgtggtagacatgtccttccatgactaatttctaattgtaactcaacacacattgaggtatgggccctcctcagtgactttaactagctcagaaacgtactcccccaccaaccccacctcaccgccccccatcccggttctgggagagcattgttattaaggatgcatgacaggaatgttggcagaactggaaagtattaaaaaagcattatcagacagtcttgatattatacattttcagaaatatattaaaaa

SEQ ID NO: 155264 - DNA, 707 bp, Homo sapiens
  Payload ID: 10519
  Gene Symbol: MOCS2
  Gene Name: molybdenum cofactor synthesis 2
  ENST ID: ENST00000527216
  CDS Start-End: 77-328
cgcaggcggcaagtgtccaggagtctggcgtctgctcgcctgcaccacgacctccctcctggggagaaggacatgcatggttgaagtattgtattttgcaaaaagtgctgaaataacaggagttcgttcagagaccatttctgtgcctcaagaaataaaagcgttgcagctgtggaaggagatagaaactcgacatcctggattggctgatgttagaaatcagataatatttgctgttcgtcaagaatatgtcgagcttggagatcagctcctcgtgcttcagcctggagacgaaattgccgttatcccccccattagtggaggatagtgcttttgagccatctaggaaagatatggatgaagttgaagagaaatctaaagatgttataaactttactgccgagaaactttcagtagatgaagtctcacagttggtgatttctccgctctgtggtgcaatatccctatttgtagggactacaagaaataactttgaagggaaaaaagtcattagcttagaatatgaagcatatctacccatggcggaaaatgaagtcagaaagatttgtagtgacattaggcagaaatggccagtcaaacacatagcagtgttccatagacttggcttggttccagtgtcagaagcaagcataatcattgctgtgtcctcagcccacagagctgcatctcttgaagctgtgagctat

SEQ ID NO: 155265 - DNA, 741 bp, Homo sapiens
  Payload ID: 10519
  Gene Symbol: MOCS2
  Gene Name: molybdenum cofactor synthesis 2
  Uniprot ID: O96033
  ENST ID: ENST00000582677
  CDS Start-End: 49-315
gcgcctgcgcctttgcggccgtgattcggtcccgctgtcctaggcgggatggtgccgctgtgccaggttgaagtattgtattttgcaaaaagtgctgaaataacaggagttcgttcagagaccatttctgtgcctcaagaaataaaagcgttgcagctgtggaaggagatagaaactcgacatcctggattggctgatgttagaaatcagataatatttgctgttcgtcaagaatatgtcgagcttggagatcagctcctcgtgcttcagcctggagacgaaattgccgttatcccccccattagtggaggatagtgcttttgagccatctagcttggttccagtgtcagaagcaagcataatcattgctgtgtcctcagcccacagagctgcatctcttgaagctgtgagctatgccattgatactttaaaagccaaggtgcccatatggaaaaaggaaatatacgaagagtcatcaacttggaaaggaaacaaagagtgcttttgggcatccaacagttaatcacttatgtttttagagcatgcaatcttaactttgttaaactattattattgatcacattttgatttttttctctccacatcaggatagtttactgaagcacaatctcttatactagtgggacaaaagggagaaaaaggaagcaagataaatgggtatgtaggatgaagggttatttaaaatggaactaaagatagaaggaggactgtaggaagaaa

SEQ ID NO: 155266 - DNA, 736 bp, Homo sapiens
  Payload ID: 10519
  Gene Symbol: MOCS2
  Gene Name: molybdenum cofactor synthesis 2
  Uniprot ID: O96033
  ENST ID: ENST00000584946
  CDS Start-End: 49-315
gcgcctgcgcctttgcggccgtgattcggtcccgctgtcctaggcgggatggtgccgctgtgccaggttgaagtattgtattttgcaaaaagtgctgaaataacaggagttcgttcagagaccatttctgtgcctcaagaaataaaagcgttgcagctgtggaaggagatagaaactcgacatcctggattggctgatgttagaaatcagataatatttgctgttcgtcaagaatatgtcgagcttggagatcagctcctcgtgcttcagcctggagacgaaattgccgttatcccccccattagtggaggatagtgcttttgagccatctagggactacaagaaataactttgaagggaaaaaagtcattagcttagaatatgaagcatatctacccatggcggaaaatgaagtcagaaagatttgtagtgacattaggcagaaatggccagtcaaacacatagcagtgttccatagacttggcttggttccagtgtcagaagcaagcataatcattgctgtgtcctcagcccacagagctgcatctcttgaagctgtgagctatgccattgatactttaaaagccaaggtgcccatatggaaaaaggaaatatacgaagagtcatcaacttggaaaggaaacaaagagtgcttttgggcatccaacagttaatcacttatgtttttagagcatgcaatcttaactttgttaaactattattattgatcacattt

SEQ ID NO: 155267 - DNA, 5106 bp, Homo sapiens
  Payload ID: 10520
  Gene Symbol: MOCS3
  Gene Name: molybdenum cofactor synthesis 3
  Uniprot ID: O95396
  ENST ID: ENST00000244051
  CDS Start-End: 18-1400
ttccggaagaggtcgccatggcttcccgggaggaggtactcgccttacaagctgaagttgcccaacgtgaggaggaattgaattcgctgaagcagaagctggcgtcggctcttttggctgagcaggaaccgcagccagaacggctggttccggtgtcgccgctgccgccgaaggccgctctgtcccgagatgagattctgcgctatagccggcagctagtgctgcccgagctgggcgtgcacggacagctgcgcctggggaccgcgtgcgtgctaatcgtgggctgcggtgggctcggctgtccactagcgcagtacttggcagcggccggcgtgggccgccttggccttgtggactatgacgtggtagagatgagcaacctggcccgccaagtgctgcatggcgaggcactggctggccaggccaaggccttttcggccgccgcctcgctgcgccgcctcaattcggcagtggaatgcgtgccgtacactcaggcccttacgccagccactgccctagacctggtccgccgatatgatgtggtggctgactgctcggacaacgtgcccactcgctacctggttaatgacgcatgtgtgctggcgggtcggcccctcgtgtctgccagtgccttgcgcttcgagggccaaatcacagtctaccattatgacggtggcccttgctatcgctgcatattcccccaaccacccccagcggagacagtgaccaactgcgcggacggcggggtgctcggtgtcgttaccggggtcctgggctgcctgcaggccttggaagtgctgaaaatcgctgcgggtctgggcccctcttacagtggcagcttgttgctctttgatgccctgagagggcatttccgctctattcggctgcggagccgcaggctcgactgtgcagcttgcggggaacggcccactgtgactgatctgctggactatgaagccttctgtggctcctcagccactgataaatgccgctccctgcaactactgagcccagaggagcgtgtttctgtcaccgactataagcgactgctggattctggggcattccacctgttgctggacgtcaggcctcaggtggaggtggacatttgtcgtttgcctcatgccctacacatccctctgaaacatttggaacgcagggatgcggagagcctgaaactcttaaaagaagcaatctgggaagagaagcagggcacacaagaaggggctgctgtccccatttatgtgatttgcaaactgggaaatgactcacagaaagccgtgaagatcctccagtccttatcagcagctcaagagttagaccctttaacagttcgggatgttgtggggggcctcatggcctgggctgccaaaatcgatggaacatttccacagtactgaggtgactggtatagtctgatgagaaagatgtggattgccataatacctcaaagatacacttgtttgcatttttcggtaatatacataggagctggggattctacagtatctgtgaatacgtggactcctttttataaggagttttaaaaattgttatgtattggatgaatgacttattaatggattataccgtttctgagaaccatcattttttttttcagcacacggaggatgtcttggacatgtgagatgtaacgtgacaggattttgcattttaaactgcagatcatttacatgtccttattttccacctcccccagtcaaaatgctttctaaatcattttcacagattatatacttcggatctgtttactgttcagttaagaaattcttggatcttattaatatttcagatgatagaatacatcctacagaaatacatgtttaaaatgtaaattgttttaattattcagaaagagggtcattctatttggccttttgaattagtatcaaaatgagattttttttttttttttgagatggaatctctctctgttgcccaggctggagtgtagtggtgcgatctcagctcactgcaacctccgcctcccaggttcaagcgattctcctgcctcagcctcctgagtagctgggattacaggcgcacgccaccacgcctggctaatttttgtatttttagtacagagggggtttcaccatgtttgtcaggctggtctcgaactcctgacctcgtgatccgcctgcctcgacttcccagagtgctgggattacaggcgtgagccaccacaccctcccgagatctttaaagtttaccaaaataaaggaaaccacctttgtagtctgtcagtgtctcttataaattgctactgttttcttaaagttaacttcagggtccaccttatgttgcacacatatcacatcgtttaaattgcatactatggtttgacttgctttggaattttcaagtcaaagtcccaaccctttgcctctccccctttaatttgccttttctcttttgatttaatgtttttttattccagcattttatactaatgtaaaatgtttttatgtttgtttacttaacattttcataaaatagtaggtagtctcaccaacttccaatatatacaacaacattataagtaaaaatttgatttgtgagtgcctatcagtggccagatgaactaatggcttgtcagaagggggcctgtgacctcctgcttgctgcatgcaggcttataatcatcaattgctgctgttgtttttttaagaatggcagaaatcacagatacaactataaaatctttgtatttctgttaaccattttttttaaagcttaaatgtatcataagccagcaaaaaccctttgtagaccagatttacttaccagtttgcaatttgtgatatagaatcttgttttattataagagggtggtatttaacaaattcaaaattagtcatcactttttaactgtgaaacattgtaactaattctttgaacaggtatacttaaagtatggtatacccttctgttataaagatgaagcaggtctcttatgactgttcctgccaacgagttatggaggtaaatgactgtgacctggagtggagaacaaagatggctggcctgtgtttttcatctccttcttccagggacaactgattctgatacatagcaggaaacaaatagcgacacacaggaacaatttcatattctaaagactgaagtcctaaagttatagacagttgtagttcctataaacctggttgtcacaggggacaggcaagagaagctgactagctaagtgttaaaaggtttactaaagtgataggaggtgcttttgagaattttggggacagattcaaggctgtacttctaggaatgatgcccgaaatcatgcacaaaactggccttaggagaacagtgtctatgttgtgctgccctatcaagtaccggaggaaacgccactacagtctcaccagtttcacttgacgtgcccccccaactctcccagaaagcccaacacttcagccacagtccatgtgtcgagaaacagagtcactacattattcttttctgagtcaagccttatgagggtgcctggtaggcagagtctaattacatgcctacatcttagctgcaagagaggctgggaatttgtgttttgatatctacaataggaagacagaactcatgatgtgggattttcccaaatagtgaaatatttttcaaaagatgggctgttaagaatataacagatacccagtacacaacccagatctatttcagtatttgttttttgttgttgttgttttggagacagagtctcgctctatcccccaggctggatggagtgcagcggcacaatctcggctcactgcaacctccacctcccatgttcaagtgattctcatgcctcagcctcctgagtagctgggattacaggcacctgccaccacatctggctaatttttctatttttagtagcgatggggtttcgccatgttggcctggctggtcttgaactcctgacctcaggtgatctgtgcacctcagcctcccaaagtgctaggattacaggcatgagtcactgcacctggcatatattagtatttgaaatttggttttctctggggattgtagctaggtttttatggtgagataggatttgaacataatttgttttttgagacgaagtcttgcttcgtcgcccagggtggagtgtagtgttgtgatcacagctcgctgtggcctcaacctcctgggttcaagtgatcctcccacctcagcctctcaagtagcttgaattacagttgtatgccaccatgcctagccattttttaatttaaaaattttttggtagcaatggggtctgaatatgtggcctaggctgatctcaaactcctgggctcaagcatccctcctgcctcagcctcccaaagtgcttgggattacgggtatgaggcaccatgcccagcctgaacttgatttttttgttgtttccttttcataacaaacatcaaatgccttcagtgtactagttcttctaggttctggaataaaaatgagcaagaggtttcctgttgtagaggagtttatatttaaatggtgataagtaaattactgataagtgccataaaagaaatgaaactgtgacatattagggtgggggaggggatctgttttgaatagcttaattatggaaggcctcagagatgacattaaacccaaaacctgaaaggtgagaaagagccagttacagaagatctgaggaaaattctatactgggagaaaaataactgtaaagacctcaaggtaaataaacttggaatgttccgttcaagaaactgcagaggcaagttgggttgcaaacaattagggagagtgggacagggtgaggtttgagaagcagggaacatcataaactttgtagaccatagtagtttggtttttattctaaatacaataatagctaatattttgagcacttactgtgttatttgggatttgaatccagatgctctggttgaagagcccattccctaagtgtcatgctatactgactctaagcaaaactttgccattgcttcatatgtgttcatgccctgtcagggcatagaaagcaatctatgtcctgacaatcacggaagtgtattccagatacaatagaaatgtactctgaga

SEQ ID NO: 155268 - DNA, 2370 bp, Homo sapiens
  Payload ID: 10521
  Gene Symbol: MON1A
  Gene Name: MON1 secretory trafficking family member A
  ENST ID: ENST00000296473
  CDS Start-End: 260-2218
gggagaaacaatcctaacgtccctttctctcacttgaaatgaactgctagctggctcggacggagaggcccagagtccagggctgttctgtgtgggactctagactcggaggaggcgcccaggcccctagaaggcggcgccggatgaggcaatcgcggacccgggtcaggacctgcccacggctctgctgggactaggagcccagaaccagtccctcggcgccgcaggcggccaaacgctaaggactacatttcccacaatgcaccccgggggcgggccgagtcgggctgagcggctggagctgggccttggccgcgagaggccggcgaaagctatcttcctgcaccggcggccgggtgagggcggtgggagggagcggtgcctgcgctgtggccatgtctgtgtacgcagggggccggggccccgcgaagctgtgccctcaggccggccccggccggacacccttacccctccatgggtccggcagagggcagtgaccggcaccttctgtgcgtcctggactcctctgagaaacaggagagctcaaaggatggctactgacatgcagaggaagagaagcagcgaatgccttgatggcacattgactccttctgatggacagagtatggagagagctgagagccccacaccaggaatggcccagggaatggagccaggtgcgggccaggagggtgccatgttcgtccatgcccgttcctacgaggacctgactgagtcagaggatggggcagcttctggggacagccacaaggagggtaccaggggtcccccgccgctgcctacagacatgcgccagatcagccaggactttagcgagctaagcacccagctgacgggtgtggcccgggacctgcaggaggagatgctgccaggaagctctgaggattggctggaacccccaggggcagttgggcgaccagccacagagccccccagggagggcacaaccgagggggatgaggaggatgccacggaggcatggcgcctgcaccagaagcatgtctttgtgctgagtgaggcagggaagcctgtgtactcccgctatgggtctgaggaggcactttccagcactatgggtgttatggtggccctggtgtccttcctggaggcagacaagaacgccatccgctccatccatgcagatggctacaaggtagtattcgtgcgccggagcccgctggtgctagtggcggtggctcgtacgcggcagtcggcacaagagctggcgcaggagctgctctacatctactaccagatcctaagccttcttaccggtgcgcagctgagccacatcttccagcagaagcagaactatgatttgcggcgcctactctcgggctcagagcgcatcaccgacaacctgctgcagctcatggcacgagaccccagcttcctgatgggggcggcacggtgcctgcccctggcggcggccgtgcgcgacactgtgagcgccagcctgcagcaggcgcgtgcgcgcagcctggtcttctccatcctgctggcccgcaaccagctcgtggcactcgtgcgccgaaaggaccaatttctgcaccccatcgacctgcacctgctcttcaacctcattagttcctcctcgtcctttcgcgagggcgaggcctggacgcccgtgtgcctgcccaaattcaacgcagccggcttcttccacgcacacatctcttacctagagcctgacactgacctctgcctgctgcttgtctccactgaccgtgaggacttctttgcagtctctgactgccgccgccgcttccaggagcgccttcgcaagcgcggagcccacctggccctgcgagaggcactgcgcacaccctactacagcgttgcccaagtgggcatccctgacctgcgtcacttcctctataagtcaaagagctcgggactcttcaccagccctgagattgaggccccatacaccagtgaagaggagcaggagcggctgctgggcctctaccagtacttgcacagtcgtgcccacaatgcctctcgcccactcaagaccatttactacacgggccccaacgagaacctcctggcctgggtgacaggcgcctttgagctctacatgtgttacagccccctggggaccaaggcgtcagccgtcagtgccatccataagctgatgcgctggatccgcaaagaggaagaccgcctcttcattctcacgcccctcacctattgatgggaatgtgtgcgggctcagccttcctggacacactaggtgtgggaagccataggagcctccagatgggggctggcctctcttgcccagccagcgggcagggactgtgggttggtgaatgcattaaagtgctttggggaagacacttgtca

SEQ ID NO: 155269 - DNA, 2527 bp, Homo sapiens
  Payload ID: 10521
  Gene Symbol: MON1A
  Gene Name: MON1 secretory trafficking family member A
  ENST ID: ENST00000417270
  CDS Start-End: 695-2386
aaacttgcactgtccttccacaatcagtgggagaaacaatcctaacgtccctttctctcacttgaaatgaactgctagctggctcggacggagaggcccagagtccagggctgttctgtgtgggactctagactcggaggaggcgcccaggcccctagaaggcggcgccggatgaggcaatcgcggacccgggtcaggacctgcccacggctctgctgggactaggagcccagaaccagtccctcggcgccgcaggcggccaaacgctaaggactacatttcccacaatgcaccccgggggcgggccgagtcgggctgagcggctggagctgggccttggccgcgagaggccggcgaaagctatcttcctgcaccggcggccgggtgagggcggtgggagggagcggtgcctgcgctgtggccatgtctgtgtacgcagggggccggggccccgcgaagctgtgccctcaggccggccccggccggacacccttacccctccatgggtccggcagagggcagtgaccggcaccttctgtgcgtcctggactcctctgagaaacagggtctgctctggcacccaagctggagtgcagcagtgcgatctcagctcactgcaacctctgcctccccccgggttcaagtgattctcataccttagcctcccaagcagttgggattacaggcgcccgtcatgacacctaggagagctcaaaggatggctactgacatgcagaggaagagaagcagcgaatgccttgatggcacattgactccttctgatggacagagtatggagagagctgagagccccacaccaggaatggcccagggaatggagccaggtgcgggccaggagggtgccatgttcgtccatgcccgttcctacgaggacctgactgagtcagaggatggggcagcttctggggacagccacaaggagggtaccaggggtcccccgccgctgcctacagacatgcgccagatcagccaggactttagcgagctaagcacccagctgacgggtgtggcccgggacctgcaggaggagatgctgccaggaagctctgaggattggctggaacccccaggggcagttgggcgaccagccacagagccccccagggagggcacaaccgagggggatgaggaggatgccacggaggcatggcgcctgcaccagaagcatgtctttgtgctgagtgaggcagggaagcctgtgtactcccgctatgggtctgaggaggcactttccagcactatgggtgttatggtggccctggtgtccttcctggaggcagacaagaacgccatccgctccatccatgcagatggctacaaggtagtattcgtgcgccggagcccgctggtgctagtggcggtggctcgtacgcggcagtcggcacaagagctggcgcaggagctgctctacatctactaccagatcctaagccttcttaccggtgcgcagctgagccacatcttccagcagaagcagaactatgatttgcggcgcctactctcgggctcagagcgcatcaccgacaacctgctgcagctcatggcacgagaccccagcttcctgatgggggcggcacggtgcctgcccctggcggcggccgtgcgcgacactgtgagcgccagcctgcagcaggcgcgtgcgcgcagcctggtcttctccatcctgctggcccgcaaccagctcgtggcactcgtgcgccgaaaggaccaatttctgcaccccatcgacctgcacctgctcttcaacctcattagttcctcctcgtcctttcgcgagggcgaggcctggacgcccgtgtgcctgcccaaattcaacgcagccggcttcttccacgcacacatctcttacctagagcctgacactgacctctgcctgctgcttgtctccactgaccgtgaggacttctttgcagtctctgactgccgccgccgcttccaggagcgccttcgcaagcgcggagcccacctggccctgcgagaggcactgcgcacaccctactacagcgttgcccaagtgggcatccctgacctgcgtcacttcctctataagtcaaagagctcgggactcttcaccagccctgagattgaggccccatacaccagtgaagaggagcaggagcggctgctgggcctctaccagtacttgcacagtcgtgcccacaatgcctctcgcccactcaagaccatttactacacgggccccaacgagaacctcctggcctgggtgacaggcgcctttgagctctacatgtgttacagccccctggggaccaaggcgtcagccgtcagtgccatccataagctgatgcgctggatccgcaaagaggaagaccgcctcttcattctcacgcccctcacctattgatgggaatgtgtgcgggctcagccttcctggacacactaggtgtgggaagccataggagcctccagatgggggctggcctctcttgcccagccagcgggcagggactgtgggttggtgaatgcattaaagtgctttggggaa

SEQ ID NO: 155270 - DNA, 1617 bp, Homo sapiens
  Payload ID: 10521
  Gene Symbol: MON1A
  Gene Name: MON1 secretory trafficking family member A
  Uniprot ID: Q86VX9
  ENST ID: ENST00000455683
  CDS Start-End: 4-1476
acaatgcaccccgggggcgggccgagtcgggctgagcggctggagctgggccttggccgcgagaggccggcgaaagctatcttcctgcaccggcggccgggtgagggcggtgggagggagcggtgcctgcgctgtggccatgtctgtgtacgcagggggccggggccccgcgaagctgtgccctcaggccggccccggccggacacccttacccctccatgggtccggcagagggcagtgaccggcaccttctgtgcgtcctggactcctctgagaaacaggagagctcaaaggatggctactgacatgcagaggaagagaagcagcgaatgccttgatggcacattgactccttctgatggacagagtatggagagagctgagagccccacaccaggaatggcccagggaatggagccagatggctacaaggtagtattcgtgcgccggagcccgctggtgctagtggcggtggctcgtacgcggcagtcggcacaagagctggcgcaggagctgctctacatctactaccagatcctaagccttcttaccggtgcgcagctgagccacatcttccagcagaagcagaactatgatttgcggcgcctactctcgggctcagagcgcatcaccgacaacctgctgcagctcatggcacgagaccccagcttcctgatgggggcggcacggtgcctgcccctggcggcggccgtgcgcgacactgtgagcgccagcctgcagcaggcgcgtgcgcgcagcctggtcttctccatcctgctggcccgcaaccagctcgtggcactcgtgcgccgaaaggaccaatttctgcaccccatcgacctgcacctgctcttcaacctcattagttcctcctcgtcctttcgcgagggcgaggcctggacgcccgtgtgcctgcccaaattcaacgcagccggcttcttccacgcacacatctcttacctagagcctgacactgacctctgcctgctgcttgtctccactgaccgtgaggacttctttgcagtctctgactgccgccgccgcttccaggagcgccttcgcaagcgcggagcccacctggccctgcgagaggcactgcgcacaccctactacagcgttgcccaagtgggcatccctgacctgcgtcacttcctctataagtcaaagagctcgggactcttcaccagccctgagattgaggccccatacaccagtgaagaggagcaggagcggctgctgggcctctaccagtacttgcacagtcgtgcccacaatgcctctcgcccactcaagaccatttactacacgggccccaacgagaacctcctggcctgggtgacaggcgcctttgagctctacatgtgttacagccccctggggaccaaggcgtcagccgtcagtgccatccataagctgatgcgctggatccgcaaagaggaagaccgcctcttcattctcacgcccctcacctattgatgggaatgtgtgcgggctcagccttcctggacacactaggtgtgggaagccataggagcctccagatgggggctggcctctcttgcccagccagcgggcagggactgtgggttggtgaatgcattaaagtgctttggggaa

SEQ ID NO: 155271 - DNA, 6091 bp, Homo sapiens
  Payload ID: 10522
  Gene Symbol: MON1B
  Gene Name: MON1 secretory trafficking family member B
  Uniprot ID: Q7L1V2
  ENST ID: ENST00000248248
  CDS Start-End: 351-1994
ctcacgccaaccactggtaagcgaagtgggcctcgctctcccgggttagcagccgtagccagatccgttgaaaggagtgcagagaggtctcattgcgctcccgaacagacctgacgtagatccgaagtggcccgcgccatctcaactatgaggggacacccgtaggcggcgggagagggacgccgcgaggagccaataaagctccgcaaccggaagtgtcttctgggaggggtcgtacccggaagtgtggcacctcccgggccgcacccggaagtgtgatgccaccgccgctacggggaagtaatggtatccggccaattgagattcggagttaaaacagggatgtgcagatggaggtcggaggagacactgctgccccggcccccgggggcgcggaggacttggaggacacgcagttccccagtgaggaagctagagaaggtggaggggttcacgcggtcccgccggatcccgaagacgagggcctggaggaaacaggatccaaggacaaggaccagccacccagcccatcaccaccgccccagtcagaggccctgtcaagcacctctcggctctggagtcctgcagcccctgagaatagtcccacatgtagccctgagagtagctctggaggccagggcggggaccccagtgatgaggagtggcgcagccagcggaagcatgtgtttgtgctgagtgaggctggcaagcccatctactcgcggtatggtagtgtggaggcgctgtcggctaccatgggtgtaatgaccgccctggtgtcctttgtgcagagtgcgggagatgccatccgtgccatctacgctgaggaccacaagctggtgttcctacaacagggcccactgttgctcgtggccatgtcacggacttctcagtcagcagcccagctgcggggggagctgctagctgtgcacgcacagatcgtgagcacacttacacgtgcaagtgtcgcccgcatcttcgcacacaagcagaactatgacctccgccgcctgctggctggttcagagcgcacactggaccgacttctggacagtatggagcaggacccaggagccctgctcctgggtgccgtgcgctgtgtgccccttgcccgcccgctgcgagacgcactaggtgcgctcctccgacgttgcacagcgcctggcctggcgctgtcagtgctggcagtaggcggtcgacttataacagcagcccaggagcgaaatgtgctggccgagtgccggctggacccagctgacctgcagttgctgctcgactgggtgggtgcaccagcctttgcggcgggtgaggcttgggcacctgtgtgcctgccccgcttcaaccctgatggttttttctacgcctacgtggcccgcctggatgctatgcctgtctgcctgctgctgcttggcacccaacgtgaagccttccatgccatggccgcctgccggcgcctggttgaagatgggatgcatgcccttggtgccatgcgtgcccttggggaggctgccagcttctctaatgcctcatcagccagtgctcctgcctacagcgtgcaggctgtcggggcgccgggcctccggcacttcctgtataagccgctggacatccctgaccaccaccgccaactgccccagtttaccagccctgagctagaggccccctacagcagagaggaggagcggcagcggctgtcggacctgtaccaccgcctgcatgctcgtctccacagcacctcccgacccctgcgcctcatttaccacgtggctgagaaggagacactactggcctgggtgacctccaaattcgagctctatacctgcctcagccctctggtgaccaaggcaggtgcaatcttggtagtgaccaaactcctgcgctgggtgaagaaagaggaggaccggctcttcattcgttacccacccaagtactccacaccaccagccacctctacggaccaagctgcccataatggcttgttcactggactctgatagttggagctcccagaccaggcagtgctgggagcaaccacctttgttttttaccttctgtctaccctggaaatgtgtgtgggggtgtgtctgtggccagtcattgtctccctaagcaatggggcaaggtctgagggcccaccgatgagagagatggtggcagccgccaggcgagcaggctgctttccctgcccagtcatgcacctccccctctggggaaatccttaggcctccctctcccttccctctgtctcatctcctccacttggatgatgctctagcctctgtcagggactgtcccctccaaacttgcttccgtggtctgcctcctagttgaatctcagccctgagtgtccagatctggccaaggtgtctagggtggcccacgggggtgctggaattggcacttcagggccaggctatgcttgggactggcctgagggtattttaaagaaaaaaactacataaaaggcctaaaagtaagacccacaaggatattcctttgcccttcttgtacttttttcatctttaccctgccagaaatgacccgccctcaatgctggctgctgctaacattaatgagaaggtggccttcagtgtccacctgtggaacccaggacacagcacctgactgcacacagtggctgaaatccagcatttttacataggagatgcacttagcctctaagcctcgttttactcatctgtgaaacagagataagtaaccctctctcatgaactctttgatgaggatttgtaaacgaaaacagactcgaactattgtgtaccaccacatagcacatgcacgtctgtcccagactttgacaacctgcacaagacaagcagcctaaagcaggagagacctccctagggttttgtgtgtgtgcacactaccctcactccccaactggccattaccctagttctgcccttgtttgtggagttacagcctcaaggttgtagcatgtgtgctggcaatcagggccgcagtgtgttctgcgcctgcccagagctgactcctgatttaaccgctggcgtaaccgcgggttgcacgcatgcgtgctgaaaagcctttcaccctcacgtggtttcttttttaaccagtcatcaagcgaggctcgcgcgcaggccccgcgttggaaaatggcggggaagctgaaacctctgaatgtggaggcgccagaagctactgaggaggctgaaggtagtgagggcaagtgggctgcactcctttctctccaaccagggcagaaaggagggaggattcgtcccattacaataatgaaataatgatattctaatttttttaaataaaatgttaagccttttgttattgaagaaaaacaattttttaaccgttcagcacagtggagataaattaacaggcatattcttatcaccgagattaacttttgtcaactgtagtgtatacgttgttgaaagtaaacaacatgtagttcagtacgaaagtcttcaaacaaaagtggggcggtggggatgttctcataacaatcaccgtgctgcagccaccccttattaacagtaattcccagtgtcgccatttcacacctaacacatatgacactttgatggactcttaaacctcctaatcgaacatggcctcccccacagcctcttttctccagggtattgacttgaatgacaggcaaaggagggtggaggggtgtcggcctagacactattggaaattgtattccatccaaaagaaaaaaaaatctcaggccgggcacggaggctcacgcctgtaatcccagcactttgggaggccgaggcgggcggatcacgaggttaggagttcgaggccagcctgaccaacatggtgaaacaccatctctactaaaaaactatatatacatatacatatgtgtgtatgtgtatttatatgtatgtatgtatgtgtgtgtatatatatatatatgtatatgtgtatatatatatatatgtgtatatatatatatatatacacacactaatcagccgggcgcggtggtgtgggcctgtaatcgcagctactcaggaagctgaggcaggagaatcacttgaacccgagaggcggaggttgcagtgagccgagatcatgtcactgcactccagcctgggtgacagagtgagactccgtctcaaaagaaaaaaaattctcccttggccgggcttggtggcttatgcctgtaatcccagcactttggaaggccgaggcgggtgggtcacctgaggtcaggagtttgagaccagcctggccagcatggcgaaacctcgtctctactaaaaatacaaaaattgtccgggtgtggtggcgggcgcctgtagtcccagctactggggaggctgaggcaggggaattgcttgaacccgggaggcagaggttatcgtgagctgacattgcgccactgcactccagcgcggaagacagagtgagcaaaaaaaaaaaaaaaaaaagaaaaaacaaaaagaaaaaaatctcccaaggcagtcatgcatttgtatgccactagcatttttttgttatagaaatattcaaagtgtaccaacgtagagaaaatagctttaaacaaagcccatgtgtacctatcagtatgctttaactgttgtcacctttctgccccacttttatctatctcgaacacccctttctgcacactctttaaaccactgtattaacaaacacattagactgcatcctgccagacctacccatacagacatcaaagtaatgattattgcttattgcctgacctaggatgtgagctccatgagaacagagactgtttacctctcgctcccctgcacctaaaacaatgcctgcttggtgtaaagtaagtgctcagtaattttttaatgtgtgaccaatgaaataacttcaagagcagagagctcttttagattagaggcacatactaagtgccagcattcaacaaaagacagacggaaataagacagatgcaaatagatctcatttattaactgtgtaatgcagctgccactgcaattaaaaaaaaaattttagtatcaacctttcaaattcctcaaaattaaagttatgactaacttcaccagcaaaggaaaaattgaaggatgtatcaagttgccatttctagcccatcaaatcggctttataaagggaagcatagtatctggtattgacgaccttgtagagaaacaggccttttcctgcctcagggaagagagctgactcaaagtaaaggctttgctagaggcagtcggcagagtatttttagcatctaaaatgctcttccacttcggcagtgaccatgcgatgtaatcaaaggagaatacgtaagtgtatggaccaggaatggtcactggagtgttgatgtaggcacaacacaagaagtagtcacagaaattgctaagtctaggtttatgtgtgcatgctgtggagtgtctctgtggtggatttctttttaagaggcagaaaaaaattctaatttaaatgtattaaattataagttctaatttaaatgtattaaaattaaattataagttgataggattattattgacacacaaggagctccaaaagagatcgtatttttattagagacaagccagttgggattgaaacaaaaatggaggggggtatagccctgtgtatgttgcacagaaaaagtatctgaatgataaaggcctaagtgataactctggacaaggaatttggattttgggagtagtgcagaggtagaggcatttttgtgatttattgttctattttttcttctagaaaaatgtaagtagtcatatataattttaaaatataaaggagaagaggcaaaatgttgaatggcacctgaggatcctatattcatattggatcagtattaacatccaggttttgattgttgtactatggttacctggtagattccctttgtatataggaaatagacactggaatagtaaggagtagtgggtcaagatgtctgcaacttattgttcagaatcactcacaaatgggaaatctgatataaggacaaaatgggagcactgtggcctatttttacaacttttgtgtacatctgcaattgtttcaaaataaaatgtttaaaagggtgctctta

SEQ ID NO: 155272 - DNA, 1759 bp, Homo sapiens
  Payload ID: 10522
  Gene Symbol: MON1B
  Gene Name: MON1 secretory trafficking family member B
  ENST ID: ENST00000439557
  CDS Start-End: 78-1394
gtgtgatgccaccgccgctacggggaagtaatggtatccggccaattgagattcggagttaaaacagggatgtgcagatggaggtcggaggagacactgctgccccggcccccgggggcgcggaggacttggaggacacgcagttccccagtgaggaagctagagaaggtggaggggttcacgcggtcccgccggatcccgaagacgagggcctggaggaaacagaggaccacaagctggtgttcctacaacagggcccactgttgctcgtggccatgtcacggacttctcagtcagcagcccagctgcggggggagctgctagctgtgcacgcacagatcgtgagcacacttacacgtgcaagtgtcgcccgcatcttcgcacacaagcagaactatgacctccgccgcctgctggctggttcagagcgcacactggaccgacttctggacagtatggagcaggacccaggagccctgctcctgggtgccgtgcgctgtgtgccccttgcccgcccgctgcgagacgcactaggtgcgctcctccgacgttgcacagcgcctggcctggcgctgtcagtgctggcagtaggcggtcgacttataacagcagcccaggagcgaaatgtgctggccgagtgccggctggacccagctgacctgcagttgctgctcgactgggtgggtgcaccagcctttgcggcgggtgaggcttgggcacctgtgtgcctgccccgcttcaaccctgatggttttttctacgcctacgtggcccgcctggatgctatgcctgtctgcctgctgctgcttggcacccaacgtgaagccttccatgccatggccgcctgccggcgcctggttgaagatgggatgcatgcccttggtgccatgcgtgcccttggggaggctgccagcttctctaatgcctcatcagccagtgctcctgcctacagcgtgcaggctgtcggggcgccgggcctccggcacttcctgtataagccgctggacatccctgaccaccaccgccaactgccccagtttaccagccctgagctagaggccccctacagcagagaggaggagcggcagcggctgtcggacctgtaccaccgcctgcatgctcgtctccacagcacctcccgacccctgcgcctcatttaccacgtggctgagaaggagacactactggcctgggtgacctccaaattcgagctctatacctgcctcagccctctggtgaccaaggcaggtgcaatcttggtagtgaccaaactcctgcgctgggtgaagaaagaggaggaccggctcttcattcgttacccacccaagtactccacaccaccagccacctctacggaccaagctgcccataatggcttgttcactggactctgatagttggagctcccagaccaggcagtgctgggagcaaccacctttgttttttaccttctgtctaccctggaaatgtgtgtgggggtgtgtctgtggccagtcattgtctccctaagcaatggggcaaggtctgagggcccaccgatgagagagatggtggcagccgccaggcgagcaggctgctttccctgcccagtcatgcacctccccctctggggaaatccttaggcctccctctcccttccctctgtctcatctcctccacttggatgatgctctagcctctgtcagggactgtcccctccaaacttgcttccgtggtctgcctcctagttgaatctcagccctgagtgtccagatctggc

SEQ ID NO: 155273 - DNA, 1814 bp, Homo sapiens
  Payload ID: 10522
  Gene Symbol: MON1B
  Gene Name: MON1 secretory trafficking family member B
  Uniprot ID: Q7L1V2
  ENST ID: ENST00000545553
  CDS Start-End: 23-1228
ccaccgccgctacggggaagtaatggtatccggccaattgagattcggagttaaaacagaggaccacaagctggtgttcctacaacagggcccactgttgctcgtggccatgtcacggacttctcagtcagcagcccagctgcggggggagctgctagctgtgcacgcacagatcgtgagcacacttacacgtgcaagtgtcgcccgcatcttcgcacacaagcagaactatgacctccgccgcctgctggctggttcagagcgcacactggaccgacttctggacagtatggagcaggacccaggagccctgctcctgggtgccgtgcgctgtgtgccccttgcccgcccgctgcgagacgcactaggtgcgctcctccgacgttgcacagcgcctggcctggcgctgtcagtgctggcagtaggcggtcgacttataacagcagcccaggagcgaaatgtgctggccgagtgccggctggacccagctgacctgcagttgctgctcgactgggtgggtgcaccagcctttgcggcgggtgaggcttgggcacctgtgtgcctgccccgcttcaaccctgatggttttttctacgcctacgtggcccgcctggatgctatgcctgtctgcctgctgctgcttggcacccaacgtgaagccttccatgccatggccgcctgccggcgcctggttgaagatgggatgcatgcccttggtgccatgcgtgcccttggggaggctgccagcttctctaatgcctcatcagccagtgctcctgcctacagcgtgcaggctgtcggggcgccgggcctccggcacttcctgtataagccgctggacatccctgaccaccaccgccaactgccccagtttaccagccctgagctagaggccccctacagcagagaggaggagcggcagcggctgtcggacctgtaccaccgcctgcatgctcgtctccacagcacctcccgacccctgcgcctcatttaccacgtggctgagaaggagacactactggcctgggtgacctccaaattcgagctctatacctgcctcagccctctggtgaccaaggcaggtgcaatcttggtagtgaccaaactcctgcgctgggtgaagaaagaggaggaccggctcttcattcgttacccacccaagtactccacaccaccagccacctctacggaccaagctgcccataatggcttgttcactggactctgatagttggagctcccagaccaggcagtgctgggagcaaccacctttgttttttaccttctgtctaccctggaaatgtgtgtgggggtgtgtctgtggccagtcattgtctccctaagcaatggggcaaggtctgagggcccaccgatgagagagatggtggcagccgccaggcgagcaggctgctttccctgcccagtcatgcacctccccctctggggaaatccttaggcctccctctcccttccctctgtctcatctcctccacttggatgatgctctagcctctgtcagggactgtcccctccaaacttgcttccgtggtctgcctcctagttgaatctcagccctgagtgtccagatctggccaaggtgtctagggtggcccacgggggtgctggaattggcacttcagggccaggctatgcttgggactggcctgagggtattttaaagaaaaaaactacataaaaggcctaaaagtaagacccacaaggatattcctttgcccttcttgtacttttttcatctttaccctgccagaaatgacccgccctcaatgctggctgctgctaacattaatgagaag

SEQ ID NO: 155274 - DNA, 877 bp, Homo sapiens
  Payload ID: 10522
  Gene Symbol: MON1B
  Gene Name: MON1 secretory trafficking family member B
  ENST ID: ENST00000563612
  CDS Start-End: 546-877
gaagtgggcctcgctctcccgggttagcagccgtagccagatccgttgaaaggagtgcagagaggtctcattgcgctcccgaacagacctgacgtagatccgaagtggcccgcgccatctcaactatgaggggacacccgtaggcggcgggagagggacgccgcgaggagccaataaagctccgcaaccggaagtgtcttctgggaggggtcgtacccggaagtgtggcacctcccgggccgcacccggaagtgtgatgccaccgccgctacggggaagtaatggtatccggccaattgagattcggagttaaaacaggtgtttgtatatctctatttcctgaggcccagtagagtctcctcttttcggaaagtgttggaggggggacgtatttgggcatgattttggatgtctcgtcctattgaaatccgtggggaaatgagcagtaggagtgtgtccaagggggcctgactctataaaggcttttcagaagtttctttcaccgcccgtcaccctcgattcccctcccactcagggatgtgcagatggaggtcggaggagacactgctgccccggcccccgggggcgcggaggacttggaggacacgcagttccccagtgaggaagctagagaaggtggaggggttcacgcggtcccgccggatcccgaagacgagggcctggaggaaacaggatccaaggacaaggaccagccacccagcccatcaccaccgccccagtcagaggccctgtcaagcacctctcggctctggagtcctgcagcccctgagaatagtcccacatgtagccctgagagtagctctggaggccagggcggggaccccagtgatgaggagtggcgcagccagcggaagca

SEQ ID NO: 155275 - DNA, 948 bp, Homo sapiens
  Payload ID: 10522
  Gene Symbol: MON1B
  Gene Name: MON1 secretory trafficking family member B
  ENST ID: ENST00000564006
  CDS Start-End: 239-598
gacgtagatccgaagtggcccgcgccatctcaactatgaggggacacccgtaggcggcgggagagggacgccgcgaggagccaataaagctccgcaaccggaagtgtcttctgggaggggtcgtacccggaagtgtggcacctcccgggccgcacccggaagtgtgatgccaccgccgctacggggaagtaatggtatccggccaattgagattcggagttaaaacagggatgtgcagatggaggtcggaggagacactgctgccccggcccccgggggcgcggaggacttggaggacacgcagttccccagtgaggaagctagagaaggtggaggggttcacgcggtcccgccggatcccgaagacgagggcctggaggaaacaggggctccctttcaggatccaaggacaaggaccagccacccagcccatcaccaccgccccagtcagaggccctgtcaagcacctctcggctctggagtcctgcagcccctgagaatagtcccacatgtagccctgagagtagctctggaggccagggcggggaccccagtgatgaggagtggcgcagccagcggaagcatgtgtttgtgctgagtgaggctggcaagcccatctactcgcggtatggtagtgtggaggcgctgtcggctaccatgggtgtaatgaccgccctggtgtcctttgtgcagagtgcgggagatgccatccgtgccatctacgctgaggaccacaagctggtgttcctacaacagggcccactgttgctcgtggccatgtcacggacttctcagtcagcagcccagctgcggggggagctgctagctgtgcacgcacagatcgtgagcacacttacacgtgcaagtgtcgcccgcatcttcgcacacaagcagaactatgacctccgccgcctgctggctggttcagagcgcacactggaccgactt

SEQ ID NO: 155276 - DNA, 611 bp, Homo sapiens
  Payload ID: 10522
  Gene Symbol: MON1B
  Gene Name: MON1 secretory trafficking family member B
  ENST ID: ENST00000569610
  CDS Start-End: 111-611
gaggcggctcatctcgattggcccagaaagaagacggtcgcgccctatgtactccgggattggctagagcgagccgcgtcccccctcacgccaaccactgggatgtgcagatggaggtcggaggagacactgctgccccggcccccgggggcgcggaggacttggaggacacgcagttccccagtgaggaagctagagaaggtggaggggttcacgcggtcccgccggatcccgaagacgagggcctggaggaaacaggatccaaggacaaggaccagccacccagcccatcaccaccgccccagtcagaggccctgtcaagcacctctcggctctggagtcctgcagcccctgagaatagtcccacatgtagccctgagagtagctctggaggccagggcggggaccccagtgatgaggagtggcgcagccagcggaagcatgtgtttgtgctgagtgaggctggcaagcccatctactcgcggtatggtagtgtggaggcgctgtcggctaccatgggtgtaatgaccgccctggtgtcctttgtgcagagtgcgggagatgccatccgtgccatctacgctgaggaccacaagctggtgttcctacaa

SEQ ID NO: 155277 - DNA, 576 bp, Homo sapiens
  Payload ID: 10522
  Gene Symbol: MON1B
  Gene Name: MON1 secretory trafficking family member B
  ENST ID: ENST00000563279
  CDS Start-End: 273-576
gttagcagccgtagccagatccgttgaaaggagtgcagagaggtctcattgcgctcccgaacagacctgacgtagatccgaagtggcccgcgccatctcaactatgaggggacacccgtaggcggcgggagagggacgccgcgaggagccaataaagctccgcaaccggaagtgtcttctgggaggggtcgtacccggaagtgtggcacctcccgggccgcacccggaagtgtgatgccaccgccgctacggggaagtaatgggatgtgcagatggaggtcggaggagacactgctgccccggcccccgggggcgcggaggacttggaggacacgcagttccccagtgaggaagctagagaaggtggaggggttcacgcggtcccgccggatcccgaagacgagggcctggaggaaacaggatccaaggacaaggaccagccacccagcccatcaccaccgccccagtcagaggccctgtcaagcacctctcggctctggagtcctgcagcccctgagaatagtcccacatgtagccctgagagtagctctggaggccagggcggggaccccagtg

SEQ ID NO: 155278 - DNA, 1110 bp, Homo sapiens
  Payload ID: 10522
  Gene Symbol: MON1B
  Gene Name: MON1 secretory trafficking family member B
  ENST ID: ENST00000567291
  CDS Start-End: 345-1110
aaccactggtaagcgaagtgggcctcgctctcccgggttagcagccgtagccagatccgttgaaaggagtgcagagaggtctcattgcgctcccgaacagacctgacgtagatccgaagtggcccgcgccatctcaactatgaggggacacccgtaggcggcgggagagggacgccgcgaggagccaataaagctccgcaaccggaagtgtcttctgggaggggtcgtacccggaagtgtggcacctcccgggccgcacccggaagtgtgatgccaccgccgctacggggaagtaatggtatccggccaattgagattcggagttaaaacaggtggatgtgcagatggaggtcggaggagacactgctgccccggcccccgggggcgcggaggacttggaggacacgcagttccccagtgaggaagctagagaaggtggaggggttcacgcggtcccgccggatcccgaagacgagggcctggaggaaacaggatccaaggacaaggaccagccacccagcccatcaccaccgccccagtcagaggccctgtcaagcacctctcggctctggagtcctgcagcccctgagaatagtcccacatgtagccctgagagtagctctggaggccagggcggggaccccagtgatgaggagtggcgcagccagcggaagcatgtgtttgtgctgagtgaggctggcaagcccatctactcgcggtatggtagtgtggaggcgctgtcggctaccatgggtgtaatgaccgccctggtgtcctttgtgcagagtgcgggagatgccatccgtgccatctacgctgaggaccacaagctggtgttcctacaacagggcccactgttgctcgtggccatgtcacggacttctcagtcagcagcccagctgcggggggagctgctagctgtgcacgcacagatcgtgagcacacttacacgtgcaagtgtcgcccgcatcttcgcacacaagcagaactatgacctccgccgcctgctggctggttcagagcgcacactggaccgacttctggacagtatggagcaggacccaggagccctgctcctgggtgccgtgcgctgtgtgccccttgcccgcc

SEQ ID NO: 155279 - DNA, 5612 bp, Homo sapiens
  Payload ID: 10523
  Gene Symbol: MON2
  Gene Name: MON2 homolog, regulator of endosome-to-Golgi trafficking
  Uniprot ID: Q7Z3U7
  ENST ID: ENST00000393629
  CDS Start-End: 361-5496
agtcttaggggcctggggagctggcgctgaagcttcttgccaggttggctggtgacacccggtgtggctgggccccgcggcagcggagggacctgcccgccttgtgggtttctcggccagagtcggcggagcctagcgggacggtgcgactgcggggggcgcctccgagaaaagccagaggtgttgcggggaagctgctgggggacgctcgagcaggctccgggttcgcagcccagggcccaagaagcgggctgctgaaggaccagagacaccgggagggagctgcctgtggccctaaggagctgaccgtgccagagcttgtttgtacctctcggaaattggctgggaccttggaggatcatgtccggcaccagcagccccgaggcggtgaagaagctgctggagaatatgcagagcgacttgcgcgccttgtcactggagtgcaagaagaaattcccacctgtcaaagaggctgctgaatcaggaataataaaagttaaaacaattgctgcacgaaacactgaaattttggcagcactgaaagagaacagctcagaggttgtacagccttttttaatgggttgtggaaccaaggaaccgaagatcactcagctatgtttggctgctattcagagactcatgtcacatgaagtcgtgtctgagactgcagctggaaatataattaacatgctttggcagctaatggagaatagtcttgaagaacttaagctacttcaaacagttcttgttcttttaacaaccaatacagtagttcatgatgaggcactttctaaggcaatcgttctttgttttcgactacacttcacaaaagataatattacaaataatacagctgctgctacagtgcgacaagttgttactgttgtttttgagaggatggttgctgaagatgaacgacacagagatattatagaacaaccagtactggtacaaggaaatagtaacagaagatctgtcagtaccctcaaaccttgtgctaaagatgcatatatgcttttccaggatctttgtcagttggttaatgctgatgctccttattggctagtgggcatgacagaaatgactcggacgtttggcctcgaattacttgagtcagtcctcaatgattttccgcaggtctttttacaacaccaagaatttagtttcctcctcaaagaaagggtatgtcctcttgtgataaagctcttttctccaaatataaagttcagacaaggttccagcacctcatcttctccagcaccagttgaaaaaccatattttcctatctgcatgcgtttgctgagagtagtatctgttctgattaagcagttttacagtcttttggtaactgaatgtgagatatttctgtcacttctggtgaaatttctggatgcagataaaccacagtggctacgagctgttgcggtggaatcaatacacagattctgtgtgcagcctcaactattaaggtcattttgtcagtcctatgatatgaaacagcattctaccaaggtttttcgtgatattgtaaatgcactgggatcttttatacagtccttgtttcttgtcccccctactggaaatcctgcaacaagcaaccaagctggaaacaataatttaggtggctcagtctcagcaccagctaactcaggaatggtggggattggtggaggtgttactttgctaccagcatttgaatataggggaacctggatacctattctgacaatcacagttcaaggcagtgctaaagccacctacttagaaatgttggacaaagttgagcctccaactatacctgaaggttacgccatgtctgtggcattccattgtttgctagaccttgttcgtggaatcacaagtatgattgaaggagagctaggagagcttgaaacagaatgtcaaaccaccactgaagaaggttcttcaccaacacagtcgacagaacagcaggatttacagtcaacatcagaccaaatggataaggaaattgttagtagggctgtttgggaagaaatggtgaatgcctgctggtgtggtcttcttgctgcactctcactccttcttgatgccagcacagatgaagctgccactgagaatattttaaaagctgaactgactatggctgctctttgtggaagactgggccttgtaacttcaagagatgcctttataactgcaatatgcaaaggttccctgcctccccattatgctcttactgtattgaataccaccactgcagctacactttccaacaaatcatattccgttcagggccaaagtgttatgatgataagtccatcaagtgaatctcaccaacaagttgtggcagtgggtcaacctttagcagtccagcctcaagggacagtaatgctgacttccaaaaatatccagtgtatgaggactttacttaacttggcgcattgccatggggctgttcttggaacatcatggcaacttgtcttggcaactcttcagcatcttgtgtggattctgggattaaagcctagtagtggcggtgccttgaaacctgggagagctgtagaaggacccagtacagttctaacaacagcagtgatgacagatttaccagtgatttccaatatactttcaagattgtttgaaagctcacagtatcttgatgatgtatcactgcatcatttaataaatgcactttgctccttgtctctagaagcaatggatatggcctatggaaataataaggaaccatctctttttgctgttgccaaattgttagaaactggtttagttaatatgcaccgaatagaaattctgtggagacctctgactggccatctacttgaggtctgccagcatccaaactctcgaatgagagaatggggagcagaagctttaacttctcttattaaagcaggattaacatttaaccatgatcctccactctcacaaaaccagaggctgcagttgcttttattgaacccgttaaaggagatgtccaatattaatcatccagatattcgactcaagcagttagaatgcgtgttgcagattctgcagagtcagggagacagtcttgggcctggatggccattagtgcttggagtcatgggagcaatcagaaatgatcaaggagaatccttgatacgaactgcattccagtgtcttcagttggttgtgacagattttctaccaacaatgccttgtacttgcctgcaaatagttgtagatgttgcaggtagctttggcctccataaccaagaactcaatattagtttaacttcaataggtttattgtggaatatttcagattattttttccaaagaggggaaactattgaaaaagaactaaataaggaagaggcagcacagcaaaagcaggcagaagagaaaggagttgttttaaatcggccattccaccctgcaccgccatttgattgcttgtggttatgtctttatgcaaaattgggtgaactatgtgtggatccccgtcctgctgtcaggaagagtgcagggcaaactctgttttctacaattggtgcgcatggaactttattacagcattcaacctggcacactgttatctggaaggtactctttcatctactggacagagttcgagagtcctctaccactgcagacaaagaaaagattgagtctggaggtggcaatattctcattcatcattcaagggacaccgccgagaagcaatgggctgagacgtgggtattaacattggctggagtagcaaggatcttcaacactagaagatatttgctgcagcctttaggagatttttcaagagcttgggatgttcttcttgaccatatacagtcagcagcactcagcaaaaacaatgaagtatctctggctgctctgaaaagcttccaggaaattttacagattgtgtcccctgtcagagactcagataagcctgagacaccacctgtagttaatgtacctgtgcctgttcttatagggcccatatcaggcatgagcaggccatttgtaagaacagattccattggagaaaaactaggaagatatagtagctctgagccacccattgttactgatgagcttgaagatttgaatctatggtgggctgcgtggaatacctggtatagaattggatctgaaagtactaagcctcctattacttttgataaactaacttttattcctagccagccttttcttacagctttaattcagatatttccagctctctaccaacacataaaaactggtttcaatatggatgacttgcaaaagttgggagtcatattgcacagtgctatttcagtcccaataagttcagatgcatccccttttattcttccatcttataccgaagcagttttgacaagtttacaggaagctgtacttacagctttagatgttctccaaaaggccatttgtgtaggaccagaaaacatgcagataatgtatccagctatatttgaccagttgttggcatttgtagaattttcctgtaaacctccacagtatggacagctggaaacaaagcacattgcaaatgcaaaatataatcaggcggaatgggtagccttgaattatgtgccgtttgctgaaaggtctttagaagtagttgtggatttataccaaaaaacagcgtgtcacaaagcagtggtgaatgagaaagtgctccagaatattattaagactcttagggttcctctcagtttgaagtattcctgcccttctgaaagcacatggaaactagcagtatcctctctcctcagagttctttctattgggctacctgttgcccggcagcatgcttcttctggaaaatttgacagtatgtggccagaactagccaatacttttgaagattttctctttactaaaagcatacctccagataatctctctattcaagagtttcaaagaaatgaaaatattgatgtcgaggtagttcaacttatcagcaatgagatactaccttatgccaattttattcctaaggaatttgttggtcaaataatgacaatgcttaacaagggctcaatacattctcagtcatcttcatttacagaagcagagattgatattcgtttgagagaggaattttctaaaatgtgttttgaaacattactccagttttccttcagtaataaagtcacaacacctcaagaaggctacatctcacgaatggcactctcagtgcttttaaagaggtcccaagatgtactacatcgctatatagaggatgaaagattaagtggtaaatgccctcttccaaggcaacaagtaacagaaattatatttgttttaaaagcagtcagtactcttattgattcacttaagaaaactcagcctgagaatgttgatggaaatacctgggcacaagtaattgccttatacccaactttagtagaatgcatcacctgttcttcttcagaagtctgttctgcacttaaagaggcactagttccttttaaggatttcatgcagccaccagcatccagagttcaaaatggagaatcttgaccggctacaatatatttgaaagcaggaagatagtctaaaaaatgtttgctcctaattgagtcttctgtgagaaggacatttcttactgcagataattcttggcagctgttgttggc

SEQ ID NO: 155280 - DNA, 13275 bp, Homo sapiens
  Payload ID: 10523
  Gene Symbol: MON2
  Gene Name: MON2 homolog, regulator of endosome-to-Golgi trafficking
  Uniprot ID: Q7Z3U7
  ENST ID: ENST00000393630
  CDS Start-End: 392-5545
attgtgggcgactcggctaatggcgtcggcgagtcttaggggcctggggagctggcgctgaagcttcttgccaggttggctggtgacacccggtgtggctgggccccgcggcagcggagggacctgcccgccttgtgggtttctcggccagagtcggcggagcctagcgggacggtgcgactgcggggggcgcctccgagaaaagccagaggtgttgcggggaagctgctgggggacgctcgagcaggctccgggttcgcagcccagggcccaagaagcgggctgctgaaggaccagagacaccgggagggagctgcctgtggccctaaggagctgaccgtgccagagcttgtttgtacctctcggaaattggctgggaccttggaggatcatgtccggcaccagcagccccgaggcggtgaagaagctgctggagaatatgcagagcgacttgcgcgccttgtcactggagtgcaagaagaaattcccacctgtcaaagaggctgctgaatcaggaataataaaagttaaaacaattgctgcacgaaacactgaaattttggcagcactgaaagagaacagctcagaggttgtacagccttttttaatgggttgtggaaccaaggaaccgaagatcactcagctatgtttggctgctattcagagactcatgtcacatgaagtcgtgtctgagactgcagctggaaatataattaacatgctttggcagctaatggagaatagtcttgaagaacttaagctacttcaaacagttcttgttcttttaacaaccaatacagtagttcatgatgaggcactttctaaggcaatcgttctttgttttcgactacacttcacaaaagataatattacaaataatacagctgctgctacagtgcgacaagttgttactgttgtttttgagaggatggttgctgaagatgaacgacacagagatattatagaacaaccagtactggtacaaggaaatagtaacagaagatctgtcagtaccctcaaaccttgtgctaaagatgcatatatgcttttccaggatctttgtcagttggttaatgctgatgctccttattggctagtgggcatgacagaaatgactcggacgtttggcctcgaattacttgagtcagtcctcaatgattttccgcaggtctttttacaacaccaagaatttagtttcctcctcaaagaaagggtatgtcctcttgtgataaagctcttttctccaaatataaagttcagacaaggttccagcacctcatcttctccagcaccagttgaaaaaccatattttcctatctgcatgcgtttgctgagagtagtatctgttctgattaagcagttttacagtcttttggtaactgaatgtgagatatttctgtcacttctggtgaaatttctggatgcagataaaccacagtggctacgagctgttgcggtggaatcaatacacagattctgtgtgcagcctcaactattaaggtcattttgtcagtcctatgatatgaaacagcattctaccaaggtttttcgtgatattgtaaatgcactgggatcttttatacagtccttgtttcttgtcccccctactggaaatcctgcaacaagcaaccaagctggaaacaataatttaggtggctcagtctcagcaccagctaactcaggaatggtggggattggtggaggtgttactttgctaccagcatttgaatataggggaacctggatacctattctgacaatcacagttcaaggcagtgctaaagccacctacttagaaatgttggacaaagttgagcctccaactatacctgaaggttacgccatgtctgtggcattccattgtttgctagaccttgttcgtggaatcacaagtatgattgaaggagagctaggagagcttgaaacagaatgtcaaaccaccactgaagaaggttcttcaccaacacagtcgacagaacagcaggatttacagtcaacatcagaccaaatggataaggaaattgttagtagggctgtttgggaagaaatggtgaatgcctgctggtgtggtcttcttgctgcactctcactccttcttgatgccagcacagatgaagctgccactgagaatattttaaaagctgaactgactatggctgctctttgtggaagactgggccttgtaacttcaagagatgcctttataactgcaatatgcaaaggttccctgcctccccattatgctcttactgtattgaataccaccactgcagctacactttccaacaaatcatattccgttcagggccaaagtgttatgatgataagtccatcaagtgaatctcaccaacaagttgtggcagtgggtcaacctttagcagtccagcctcaagggacagtaatgctgacttccaaaaatatccagtgtatgaggactttacttaacttggcgcattgccatggggctgttcttggaacatcatggcaacttgtcttggcaactcttcagcatcttgtgtggattctgggattaaagcctagtagtggcggtgccttgaaacctgggagagctgtagaaggacccagtacagttctaacaacagcagtgatgacagatttaccagtgatttccaatatactttcaagattgtttgaaagctcacagtatcttgatgatgtatcactgcatcatttaataaatgcactttgctccttgtctctagaagcaatggatatggcctatggaaataataaggaaccatctctttttgctgttgccaaattgttagaaactggtttagttaatatgcaccgaatagaaattctgtggagacctctgactggccatctacttgaggtctgccagcatccaaactctcgaatgagagaatggggagcagaagctttaacttctcttattaaagcaggattaacatttaaccatgatcctccactctcacaaaaccagaggctgcagttgcttttattgaacccgttaaaggagatgtccaatattaatcatccagatattcgactcaagcagttagaatgcgtgttgcagattctgcagagtcagggagacagtcttgggcctggatggccattagtgcttggagtcatgggagcaatcagaaatgatcaaggagaatccttgatacgaactgcattccagtgtcttcagttggttgtgacagattttctaccaacaatgccttgtacttgcctgcaaatagttgtagatgttgcaggtagctttggcctccataaccaagaactcaatattagtttaacttcaataggtttattgtggaatatttcagattattttttccaaagaggggaaactattgaaaaagaactaaataaggaagaggcagcacagcaaaagcaggcagaagagaaaggagttgttttaaatcggccattccaccctgcaccgccatttgattgcttgtggttatgtctttatgcaaaattgggtgaactatgtgtggatccccgtcctgctgtcaggaagagtgcagggcaaactctgttttctacaattggtgcgcatggaactttattacagcattcaacctggcacactgttatctggaaggtactctttcatctactggacagagttcgagagtcctctaccactgcagacaaagaaaagattgagtctggaggtggcaatattctcattcatcattcaagggacaccgccgagaagcaatgggctgagacgtgggtattaacattggctggagtagcaaggatcttcaacactagaagatatttgctgcagcctttaggagatttttcaagagcttgggatgttcttcttgaccatatacagtcagcagcactcagcaaaaacaatgaagtatctctggctgctctgaaaagcttccaggaaattttacagattgtgtcccctgtcagagactcagataagcctgagacaccacctgtagttaatgtacctgtgcctgttcttatagggcccatatcaggcatgagcaggccatttgtaagaacagattccattggagaaaaactaggaagatatagtagctctgagccacccattgttactgatgagcttgaagatttgaatctatggtgggctgcgtggaatacctggtatagaattggatctgaaagtactaagcctcctattacttttgataaactaacttttattcctagccagccttttcttacagctttaattcagatatttccagctctctaccaacacataaaaactggtttcaatatggatgacttgcaaaagttgggagtcatattgcacagtgctatttcagtcccaataagttcagatgcatccccttttattcttccatcttataccgaagcagttttgacaagtttacaggaagctgtacttacagctttagatgttctccaaaaggccatttgtgtaggaccagaaaacatgcagataatgtatccagctatatttgaccagttgttggcatttgtagaattttcctgtaaacctccacagtatggacagctggaaacaaagcacattgcaaatgcaaaatataatcagatccaactatttgcaccggcggaatgggtagccttgaattatgtgccgtttgctgaaaggtctttagaagtagttgtggatttataccaaaaaacagcgtgtcacaaagcagtggtgaatgagaaagtgctccagaatattattaagactcttagggttcctctcagtttgaagtattcctgcccttctgaaagcacatggaaactagcagtatcctctctcctcagagttctttctattgggctacctgttgcccggcagcatgcttcttctggaaaatttgacagtatgtggccagaactagccaatacttttgaagattttctctttactaaaagcatacctccagataatctctctattcaagagtttcaaagaaatgaaaatattgatgtcgaggtagttcaacttatcagcaatgagatactaccttatgccaattttattcctaaggaatttgttggtcaaataatgacaatgcttaacaagggctcaatacattctcagtcatcttcatttacagaagcagagattgatattcgtttgagagaggaattttctaaaatgtgttttgaaacattactccagttttccttcagtaataaagtcacaacacctcaagaaggctacatctcacgaatggcactctcagtgcttttaaagaggtcccaagatgtactacatcgctatatagaggatgaaagattaagtggtaaatgccctcttccaaggcaacaagtaacagaaattatatttgttttaaaagcagtcagtactcttattgattcacttaagaaaactcagcctgagaatgttgatggaaatacctgggcacaagtaattgccttatacccaactttagtagaatgcatcacctgttcttcttcagaagtctgttctgcacttaaagaggcactagttccttttaaggatttcatgcagccaccagcatccagagttcaaaatggagaatcttgaccggctacaatatatttgaaagcaggaagatagtctaaaaaatgtttgctcctaattgagtcttctgtgagaaggacatttcttactgcagataattcttggcagctgttgttggcctcctttaaattctacttacctgagttcagtaattcatattacaggcttgcacatcaacaaaggctcctgaatgaacagcagtgtaaggctttaataaattaaactgatgggagggataattaacactacagtatacatgctaccatatctccagttggtgatttaaagtgagcttatgtacagtttgtggtgtatgtgttaatgatgtactttttaaaaagaaagaagagatatttcaattcagtcagatttattagtctggtgtttttgcaccctttttcaagtacaaaatcgtactagaattttatgcaagatggtactgtaacattccatattatctataaccagcctttgttaacaaagggaactgatatacttgtgtgtataataaatggtacagttctgtataaaatagtgcatttatttaaattttaaaagtattgataatgttaaatgcttaaagctctatttattattaatacaaaattgtttgcttacatttttacttataatttgccttcatatgtggcggataagctcaccatatgatcatgcagttagcttcatgcttattttaaatgtattattagtgaccattaaacatctgaccagtaaggtcatgtgaacacagcagcaaatagtttatgatttgctgattttggagctttgaaatataggttcttaatacattgatacatattgtagcactatgacttcatcatacctcatttctttaaacagctctccaagctttcactgaagtctgtctgttttttatattggctgtctggattttaaagacttttcatattttatatttctactgattttgtttcccctaacaacatttgtcactgtctttgaattatgacccaggcaagatgatttcagattttctaaaatcttgcctgtgaggttttgttcatatcagtgcttcattttgtaatgtcttctcaagaaaaatacctatgttaactcacaagtataaaatatgtgtgtattataaaacaatgaaaagtgtatttttggagatagtcaagcatttagaagtgcagtgaacttgctgtcacggagtaaaatgctaattatgtttcactttcctagcctagtgaaaaagaaaagtgctcttgagtacaataccttaattatttcttaaaatactgactttgacctagctcactgtattttttatttaatggattatggattacagtatttttcttctgagttaaattttcataatttatgtgaagacacaaagatgtttaaaacaatgattattcataagaaatcatgatggtctcagtattattttagtgtattggaaggtctttgatcttaatagaatttataaatttcagcttctccagaataatcataaaactgcaaaaagatattataattgagtcatgattgagatacagttttgaggctattataattgtataattatttaatttgcattatctgtaaaatgtagtaaggtctttgaggggatattttttatttacatgaattactgaatttctattttattatttcacctaaaattaaggtaaaatatggcatttcataagttctgctttcagcattttccttaaagttgtaaaaaatcaagctatgtacttattttctatatttgggtgtgttaaattgaggattagaaaaatccacataatcactgataaagcattgaaacagaataacccaagggtagtgtaccgattcagtaacatgttaaaaatattgctatgcatttattcaaaggaaaatggtctgttcttgagaaataaaagatcagttgcaattaggataattaaatagttaaatatgagtcaagtgtatgcaatatacatttatatgaaccaaagcttgctttatcaggaccatgccctacagttcaaaacataaacatagtgaatgtgttaatatcatataataaggtaataaatgccagtcttagtgtgaagcaagtgggtggcccccttggtagtataattggacaggattttcctccagaatatttcctgtcaccctccaagagtcactacagtaattgattgctggcatggaacacattgcccttgtcttgttagtatgaattgggttctccagtgactagaagaactggggtgtgtgaaagtattcgatgccaggagattcaaaaaggaagctctcaaagataagatcattttatggcacaattgagtctataaccagccctttaagcagtagtaaaaatgtcctttgtcatacttactagaaatactatgagttttttttttttttttcatttgagacggagtctcgctctgtcacccaggctggaatgcagtggcacgatcttggctcactgcaacctctgcttcccgggttcaagcagtttcctgcttcagacttccaagtagctgggattacagacatgccaccatgccaggctaatttttttaatatttttagtagagatggggtttcaccattttggccattctagtcttgaactcctgacctcaggtgatctgcccgccttggcctcccaaagtgctgacattacaggcctgagccactgcgcccagccaataccatgagttttaagcctcacatcgtcacttgctgtcactgccagtgcctgttttattcatattgctggacaacagacatatgccaccaattgtatgattaataaagtctttttctggccattttgtccattataaaggaaataaactaattgttaacttgcatagattacttcttagtttcctatgctaccaccactgccaagggagaaaaaaatacatcattttgtaatgtctttagtatttctttataactagtgttaaggttttgttaattttattgtatacatttgtaacatttattaggagccttttaggttccaaaacaaacaaaaggcataaaaaagtctagcttagaaccacttttcacttgctttcatttttaattttattcacttaacagctaacatctttcttgtttcttgttttttccattatatggttatcgattcaactcttgctatattccttaaatttgtatgtatcatcagaagaaagagatgaacaatttagtgtagatattttattctggagaataatattcaattaaattatttctacagcaggccagtaacaactagattatttgtcctttctcagtataattttaaagagcattttgttttattgtcacaatttggtaccactagtcccaggtaaccattgggccaaaggatcagttgagaaacagttaaggatgaattagcataagttatggaacagtgttagaaaacaactcaaaagtatattctttattaatgaggtggtcattattacatttgtgtcaatgaagggcagtgtagttattttaaaatgactaatattttctccccaaatacagaataattcagatgggcaaccaagttttcaagagactgctgtaggtgaagtctgtctagccaaggcagaacacttacaggagtccctaactgtgccacccttggaatgggttagtgtacaggctcagaatattgtggattacagtttttcagagaaaactaccacagatgtagacaaaaatgatctctgaaagcattgccagcagccaggtatgttccttagatttccacttaggtttggcattttggcagataagctaatcttgtataaagcatcacattttactatgcttagtgttcctgggttgtatttatctacattattagagggaatttttattttaaaaaaattgtcattcatgagaagaatgggagttcatgccacatagtattttaccaatttatataaagtgggaaaagtctttaatacttcatgatcacttgaattaaagtttttgtatctctggaaagtagaatagtgctttcatttgaatgaaaagtgtttatagattcagaaagagagatgatatctttgtatcttgatttatatacagaccatttcagaggaagttaaatgtcttacaaatccaatactttctaatgctctaacagtgttggctatttaaaagaacatgtggcaagttctatatgaatattcttggtcatctcgactaattctgaggcaatgatggacagagatgctacttcttatttaactctaggcatgttgacttttcaaagcggtttccttatttctaaacagagatgatgatcaatgagttactaattctttagaggaaaaaatgcataatttgagtgtggagttgattttaatgacagggtaattcaagttgtttgataaatttattactatattgtaagagagatctttgaccatttttcttcctttttcttggacatcactttcttccctccccttctctcttttatgtttttatccttgttaaattttatgtttacgttaccatctttcttatactttcccctgatttttctcttttaattcctctttcattctctgcctcttctctttcagctctttctctaattgtgcctattccttgttcataagaagtggagctgttagtggtagaaccactgctcatggttctaccactacaaagtggaaagtagaaatactttgcactttggccactgttgcgtttttgccaaggtaaagttcccctgccattttgaaatagctgaacaagttaaagtaatatgttccaaaaactggaagtgccataaaaaactaaaaataaaaaaaaattgtgactataactcctactgtctttatgaatacacgggattcagcagccaagatgctcacaaaatgggattgctataaatatgatggattcagcacctaaatttggaataatcatgtcttttctgttatgtgggtagagagattatatatcttttctcaaagtaaagtatttaaaacctgtttaaatgagggttttggctggcgtggtggcccacacctgtaatcccagcactttgggaagccaaggtgggagtatcacttgaggccaggagtttgagactagcctagacaacatagcaagatcctatctctagttcaaaaaaatatttttaattagggttttggttttttatgattttggggggtgggggagatatttgtttttttgaggcagacgtttaaacttttagatttatcccatcttaatattgatttatattgacactgcctacttacaagaataatttgaggcagcatattgcccatgtatttcaactattttcatttttctgttgcaaagcagtctttgatggaagacccggaatcttatagttctcatatctgagtctttctggagtgtatttggtgtctgtgtgattggttcacccagaggtcacccagaggtcaattgaaaccttcctaattgtactatggtattgattctatcccctcaagtatgaaaaaattaaattttcagaccattttcagttgctgcgaatgtagttacactaagttttattttaaactaaaattcaataaacagtgcagccagggaagatctgctaaaccatgccgttatttggaaaatcattgcaatatattaacaactgcttccttctatgatgtttactagatggagaaaaatactccatacctatattgcaattttatttttatctagaaaaagaaaatattaggcttcagacccaactgtgcaaatttcatttgctttccatctcttactactacctctgtgtcataatttaacacgtaacatacaactcctgtctcttaaggcagctaccatatggtgtttatgtcagactggatatatttatctaattttgtgaaattattttttagttcccaacacaattcttgaaagtaataccactgttgttactctttctccttacaatttttatgttgttgagatgtatcagttatgtattataatcatgaaattgtattggcctcaaacccaaattttctttgtagtctaggatagatttttcatgaaagctatatagttataactgtgattgtacagattgtttatttgttttacagctaacattaagcatgattccaggtttttaattatgttccagcaacactagtgtttctttataacttaaaatcataaccactttgataatttacctttggatctgaccagtgattcatttttttcttgaatatactttgtgtttgctttctcatccccgttaagtctgaaacattattgacaccccacatcacttactctgtttaaagactttacgagtagtgagtcacatgtttaggatgatcactttgggaaaaaaaaaattatagagtaaaggggaaatgttcttgagagctttattaaaaccattaatatataaaatgaaaaaataataaacagaagacacgaagtgtctctcaatagtttagaaagaaagatttggaactttaagtaaaaatgctaggtcaagtaaaaatcctgatgtagattagattatcttaatcttatgagcatttttttttaatttggtgaagctgttttgaaactgcctgtccatatcaatgccagactatctctctacctctcaaagaaaataatttgcattaaaattcctttttttgttatgtaatgaaagtataaaacaagaatttgtacgttactcagtgtgtactgcagtcagatatagttaaaataatttttctgatgcgtaattttaaccaccatttctggagtacctagtatgtgcaggccaaggctttgcctatattattccctttaatcctcaaagtagccttgcaaagaagttattttcattttacagaagagtcaaggattagggggttgaagtgagctgcctagagtcacatacctaaagtccaggtggatcactatgtcttgctttttcaaaagcagttctttctactacagtacaatagtttcatgttttacagtccattaaaatccaagacttataaaataaactaaaaatactcttgaggcaattactatttctatgatgggcactgggacaaatatacttgaacataacaaagaactaaaaatactgtgaaaaaaagatttgtcttaacgatgaccttgaaagttgcattgggtttttattattggtccaggtttaaaacattttatctatttaaaacatatgttgtgtgttttaagaagttatgttataaataacagcattgtggttaagagcccagagtctggggccaggcttcttagatgcaaatcccaactctgttattttactaaatgtgtgaccttgggcaagttaattaacctgttttggtgtcctcctctgtgaaatggagttaatcgtggtatttaacagaattcaaaatgtagtgtgttctaaagcgctgtgcctggagcatcatcaccactaggtggttagggaagtaaaacacatttggcacacatcattcaagaatggccagaaaatccatgtcttcccacaatagggaccaattttttgcctttcaccagacaaccactgaatgttaagaatctactgtgtgctaataactgtgtccttgctgtatgacagaagctatttggagcgctctcaagtgcttattacagctagtcaaggaaaccgcatatataaaataatactggatacaagactatacaattaaatactggtgtatcactaacaa

SEQ ID NO: 155281 - DNA, 5708 bp, Homo sapiens
  Payload ID: 10523
  Gene Symbol: MON2
  Gene Name: MON2 homolog, regulator of endosome-to-Golgi trafficking
  ENST ID: ENST00000547095
  CDS Start-End: 361-492
agtcttaggggcctggggagctggcgctgaagcttcttgccaggttggctggtgacacccggtgtggctgggccccgcggcagcggagggacctgcccgccttgtgggtttctcggccagagtcggcggagcctagcgggacggtgcgactgcggggggcgcctccgagaaaagccagaggtgttgcggggaagctgctgggggacgctcgagcaggctccgggttcgcagcccagggcccaagaagcgggctgctgaaggaccagagacaccgggagggagctgcctgtggccctaaggagctgaccgtgccagagcttgtttgtacctctcggaaattggctgggaccttggaggatcatgtccggcaccagcagccccgaggcggtgaagaagctgctggagaatatgcagagcgacttgcgcgccttgtcactggagtgcaagaagaaattcccacctgtcaaagaggtacagatgaggggtatctaactgagcctggaagttggaggaggggagtcattcctagcagaggaaatagcacacgttgctgctgaatcaggaataataaaagttaaaacaattgctgcacgaaacactgaaattttggcagcactgaaagagaacagctcagaggttgtacagccttttttaatgggttgtggaaccaaggaaccgaagatcactcagctatgtttggctgctattcagagactcatgtcacatgaagtcgtgtctgagactgcagctggaaatataattaacatgctttggcagctaatggagaatagtcttgaagaacttaagctacttcaaacagttcttgttcttttaacaaccaatacagtagttcatgatgaggcactttctaaggcaatcgttctttgttttcgactacacttcacaaaagataatattacaaataatacagctgctgctacagtgcgacaagttgttactgttgtttttgagaggatggttgctgaagatgaacgacacagagatattatagaacaaccagtactggtacaaggaaatagtaacagaagatctgtcagtaccctcaaaccttgtgctaaagatgcatatatgcttttccaggatctttgtcagttggttaatgctgatgctccttattggctagtgggcatgacagaaatgactcggacgtttggcctcgaattacttgagtcagtcctcaatgattttccgcaggtctttttacaacaccaagaatttagtttcctcctcaaagaaagggtatgtcctcttgtgataaagctcttttctccaaatataaagttcagacaaggttccagcacctcatcttctccagcaccagttgaaaaaccatattttcctatctgcatgcgtttgctgagagtagtatctgttctgattaagcagttttacagtcttttggtaactgaatgtgagatatttctgtcacttctggtgaaatttctggatgcagataaaccacagtggctacgagctgttgcggtggaatcaatacacagattctgtgtgcagcctcaactattaaggtcattttgtcagtcctatgatatgaaacagcattctaccaaggtttttcgtgatattgtaaatgcactgggatcttttatacagtccttgtttcttgtcccccctactggaaatcctgcaacaagcaaccaagctggaaacaataatttaggtggctcagtctcagcaccagctaactcaggaatggtggggattggtggaggtgttactttgctaccagcatttgaatataggggaacctggatacctattctgacaatcacagttcaaggcagtgctaaagccacctacttagaaatgttggacaaagttgagcctccaactatacctgaaggttacgccatgtctgtggcattccattgtttgctagaccttgttcgtggaatcacaagtatgattgaaggagagctaggagagcttgaaacagaatgtcaaaccaccactgaagaaggttcttcaccaacacagtcgacagaacagcaggatttacagtcaacatcagaccaaatggataaggaaattgttagtagggctgtttgggaagaaatggtgaatgcctgctggtgtggtcttcttgctgcactctcactccttcttgatgccagcacagatgaagctgccactgagaatattttaaaagctgaactgactatggctgctctttgtggaagactgggccttgtaacttcaagagatgcctttataactgcaatatgcaaaggttccctgcctccccattatgctcttactgtattgaataccaccactgcagctacactttccaacaaatcatattccgttcagggccaaagtgttatgatgataagtccatcaagtgaatctcaccaacaagttgtggcagtgggtcaacctttagcagtccagcctcaagggacagtaatgctgacttccaaaaatatccagtgtatgaggactttacttaacttggcgcattgccatggggctgttcttggaacatcatggcaacttgtcttggcaactcttcagcatcttgtgtggattctgggattaaagcctagtagtggcggtgccttgaaacctgggagagctgtagaaggacccagtacagttctaacaacagcagtgatgacagatttaccagtgatttccaatatactttcaagattgtttgaaagctcacagtatcttgatgatgtatcactgcatcatttaataaatgcactttgctccttgtctctagaagcaatggatatggcctatggaaataataaggaaccatctctttttgctgttgccaaattgttagaaactggtttagttaatatgcaccgaatagaaattctgtggagacctctgactggccatctacttgaggtctgccagcatccaaactctcgaatgagagaatggggagcagaagctttaacttctcttattaaagcaggattaacatttaaccatgatcctccactctcacaaaaccagaggctgcagttgcttttattgaacccgttaaaggagatgtccaatattaatcatccagatattcgactcaagcagttagaatgcgtgttgcagattctgcagagtcagggagacagtcttgggcctggatggccattagtgcttggagtcatgggagcaatcagaaatgatcaaggagaatccttgatacgaactgcattccagtgtcttcagttggttgtgacagattttctaccaacaatgccttgtacttgcctgcaaatagttgtagatgttgcaggtagctttggcctccataaccaagaactcaatattagtttaacttcaataggtttattgtggaatatttcagattattttttccaaagaggggaaactattgaaaaagaactaaataaggaagaggcagcacagcaaaagcaggcagaagagaaaggagttgttttaaatcggccattccaccctgcaccgccatttgattgcttgtggttatgtctttatgcaaaattgggtgaactatgtgtggatccccgtcctgctgtcaggaagagtgcagggcaaactctgttttctacaattggtgcgcatggaactttattacagcattcaacctggcacactgttatctggaaggtactctttcatctactggacagagttcgagagtcctctaccactgcagacaaagaaaagattgagtctggaggtggcaatattctcattcatcattcaagggacaccgccgagaagcaatgggctgagacgtgggtattaacattggctggagtagcaaggatcttcaacactagaagatatttgctgcagcctttaggagatttttcaagagcttgggatgttcttcttgaccatatacagtcagcagcactcagcaaaaacaatgaagtatctctggctgctctgaaaagcttccaggaaattttacagattgtgtcccctgtcagagactcagataagcctgagacaccacctgtagttaatgtacctgtgcctgttcttatagggcccatatcaggcatgagcaggccatttgtaagaacagattccattggagaaaaactaggaagatatagtagctctgagccacccattgttactgatgagcttgaagatttgaatctatggtgggctgcgtggaatacctggtatagaattggatctgaaagtactaagcctcctattacttttgataaactaacttttattcctagccagccttttcttacagctttaattcagatatttccagctctctaccaacacataaaaactggtttcaatatggatgacttgcaaaagttgggagtcatattgcacagtgctatttcagtcccaataagttcagatgcatccccttttattcttccatcttataccgaagcagttttgacaagtttacaggaagctgtacttacagctttagatgttctccaaaaggccatttgtgtaggaccagaaaacatgcagataatgtatccagctatatttgaccagttgttggcatttgtagaattttcctgtaaacctccacagtatggacagctggaaacaaagcacattgcaaatgcaaaatataatcagatccaactatttgcaccggcggaatgggtagccttgaattatgtgccgtttgctgaaaggtctttagaagtagttgtggatttataccaaaaaacagcgtgtcacaaagcagtggtgaatgagaaagtgctccagaatattattaagactcttagggttcctctcagtttgaagtattcctgcccttctgaaagcacatggaaactagcagtatcctctctcctcagagttctttctattgggctacctgttgcccggcagcatgcttcttctggaaaatttgacagtatgtggccagaactagccaatacttttgaagattttctctttactaaaagcatacctccagataatctctctattcaagagtttcaaagaaatgaaaatattgatgtcgaggtagttcaacttatcagcaatgagatactaccttatgccaattttattcctaaggaatttgttggtcaaataatgacaatgcttaacaagggctcaatacattctcagtcatcttcatttacagaagcagagattgatattcgtttgagagaggaattttctaaaatgtgttttgaaacattactccagttttccttcagtaataaagtcacaacacctcaagaaggctacatctcacgaatggcactctcagtgcttttaaagaggtcccaagatgtactacatcgctatatagaggatgaaagattaagtggtaaatgccctcttccaaggcaacaagtaacagaaattatatttgttttaaaagcagtcagtactcttattgattcacttaagaaaactcagcctgagaatgttgatggaaatacctgggcacaagtaattgccttatacccaactttagtagaatgcatcacctgttcttcttcagaagtctgttctgcacttaaagaggcactagttccttttaaggatttcatgcagccaccagcatccagagttcaaaatggagaatcttgaccggctacaatatatttgaaagcaggaagatagtctaaaaaatgtttgctcctaattgagtcttctgtgagaaggacatttcttactgcagataattcttggcagctgttgttggc

SEQ ID NO: 155282 - DNA, 3760 bp, Homo sapiens
  Payload ID: 10523
  Gene Symbol: MON2
  Gene Name: MON2 homolog, regulator of endosome-to-Golgi trafficking
  ENST ID: ENST00000552115
  CDS Start-End: 360-3578
gtcttaggggcctggggagctggcgctgaagcttcttgccaggttggctggtgacacccggtgtggctgggccccgcggcagcggagggacctgcccgccttgtgggtttctcggccagagtcggcggagcctagcgggacggtgcgactgcggggggcgcctccgagaaaagccagaggtgttgcggggaagctgctgggggacgctcgagcaggctccgggttcgcagcccagggcccaagaagcgggctgctgaaggaccagagacaccgggagggagctgcctgtggccctaaggagctgaccgtgccagagcttgtttgtacctctcggaaattggctgggaccttggaggatcatgtccggcaccagcagccccgaggcggtgaagaagctgctggagaatatgcagagcgacttgcgcgccttgtcactggagtgcaagaagaaattcccacctgtcaaagaggctgctgaatcaggaataataaaagttaaaacaattgctgcacgaaacactgaaattttggcagcactgaaagagaacagctcagaggttgtacagccttttttaatgggttgtggaaccaaggaaccgaagatcactcagctatgtttggctgctattcagagactcatgtcacatgaagtcgtgtctgagactgcagctggaaatataattaacatgctttggcagctaatggagaatagtcttgaagaacttaagctacttcaaacagttcttgttcttttaacaaccaatacagtagttcatgatgaggcactttctaaggcaatcgttctttgttttcgactacacttcacaaaagataatattacaaataatacagctgctgctacagtgcgacaagttgttactgttgtttttgagaggatggttgctgaagatgaacgacacagagatattatagaacaaccagtactggtacaaggaaatagtaacagaagatctgtcagtaccctcaaaccttgtgctaaagatgcatatatgcttttccaggatctttgtcagttggttaatgctgatgctccttattggctagtgggcatgacagaaatgactcggacgtttggcctcgaattacttgagtcagtcctcaatgattttccgcaggtctttttacaacaccaagaatttagtttcctcctcaaagaaagggtatgtcctcttgtgataaagctcttttctccaaatataaagttcagacaaggttccagcacctcatcttctccagcaccagttgaaaaaccatattttcctatctgcatgcgtttgctgagagtagtatctgttctgattaagcagttttacagtcttttggtaactgaatgtgagatatttctgtcacttctggtgaaatttctggatgcagataaaccacagtggctacgagctgttgcggtggaatcaatacacagattctgtgtgcagcctcaactattaaggtcattttgtcagtcctatgatatgaaacagcattctaccaaggtttttcgtgatattgtaaatgcactgggatcttttatacagtccttgtttcttgtcccccctactggaaatcctgcaacaagcaaccaagctggaaacaataatttaggtggctcagtctcagcaccagctaactcaggaatggtggggattggtggaggtgttactttgctaccagcatttgaatataggggaacctggatacctattctgacaatcacagttcaaggcagtgctaaagccacctacttagaaatgttggacaaagttgagcctccaactatacctgaaggttacgccatgtctgtggcattccattgtttgctagaccttgttcgtggaatcacaagtatgattgaaggagagctaggagagcttgaaacagaatgtcaaaccaccactgaagaaggttcttcaccaacacagtcgacagaacagcaggatttacagtcaacatcagaccaaatggataaggaaattgttagtagggctgtttgggaagaaatggtgaatgcctgctggtgtggtcttcttgctgcactctcactccttcttgatgccagcacagatgaagctgccactgagaatattttaaaagctgaactgactatggctgctctttgtggaagactgggccttgtaacttcaagagatgcctttataactgcaatatgcaaaggttccctgcctccccattatgctcttactgtattgaataccaccactgcagctacactttccaacaaatcatattccgttcagggccaaagtgttatgatgataagtccatcaagtgaatctcaccaacaagttgtggcagtgggtcaacctttagcagtccagcctcaagggacagtaatgctgacttccaaaaatatccagtgtatgaggactttacttaacttggcgcattgccatggggctgttcttggaacatcatggcaacttgtcttggcaactcttcagcatcttgtgtggattctgggattaaagcctagtagtggcggtgccttgaaacctgggagagctgtagaaggacccagtacagttctaacaacagcagtgatgacagatttaccagtgatttccaatatactttcaagattgtttgaaagctcacagtatcttgatgatgtatcactgcatcatttaataaatgcactttgctccttgtctctagaagcaatggatatggcctatggaaataataaggaaccatctctttttgctgttgccaaattgttagaaactggtttagttaatatgcaccgaatagaaattctgtggagacctctgactggccatctacttgaggtctgccagcatccaaactctcgaatgagagaatggggagcagaagctttaacttctcttattaaagcaggattaacatttaaccatgatcctccactctcacaaaaccagaggctgcagttgcttttattgaacccgttaaaggagatgtccaatattaatcatccagatattcgactcaagcagttagaatgcgtgttgcagattctgcagagtcagggagacagtcttgggcctggatggccattagtgcttggagtcatgggagcaatcagaaatgatcaaggagaatccttgatacgaactgcattccagtgtcttcagttggttgtgacagattttctaccaacaatgccttgtacttgcctgcaaatagttgtagatgttgcaggtagctttggcctccataaccaagaactcaatattagtttaacttcaataggtttattgtggaatatttcagattattttttccaaagaggggaaactattgaaaaagaactaaataaggaagaggcagcacagcaaaagcaggcagaagagaaaggagttgttttaaatcggccattccaccctgcaccgccatttgattgcttgtggttatgtctttatgcaaaattgggtgaactatgtgtggatccccgtcctgctgtcaggaagagtgcagggcaaactctgttttctacaattggtgcgcatggaactttattacagcattcaacctggcacactgttatctggaaggtattgtaaaatagattggactatcagcttttaatgagtcatgcttatatattaatactttttcagttaaacttatttcttttaatttttaaagaatttccatgcatttgtgtatttgacaaaacaggaaataactgtgtcatattgtaaattgtacctcataaagagcaaattaaatattaacagcctta

SEQ ID NO: 155283 - DNA, 6130 bp, Homo sapiens
  Payload ID: 10523
  Gene Symbol: MON2
  Gene Name: MON2 homolog, regulator of endosome-to-Golgi trafficking
  Uniprot ID: Q7Z3U7
  ENST ID: ENST00000546600
  CDS Start-End: 387-5414
gggcgactcggctaatggcgtcggcgagtcttaggggcctggggagctggcgctgaagcttcttgccaggttggctggtgacacccggtgtggctgggccccgcggcagcggagggacctgcccgccttgtgggtttctcggccagagtcggcggagcctagcgggacggtgcgactgcggggggcgcctccgagaaaagccagaggtgttgcggggaagctgctgggggacgctcgagcaggctccgggttcgcagcccagggcccaagaagcgggctgctgaaggaccagagacaccgggagggagctgcctgtggccctaaggagctgaccgtgccagagcttgtttgtacctctcggaaattggctgggaccttggaggatcatgtccggcaccagcagccccgaggcggtgaagaagctgctggagaatatgcagagcgacttgcgcgccttgtcactggagtgcaagaagaaattcccacctgtcaaagaggctgctgaatcaggaataataaaagttaaaacaattgctgcacgaaacactgaaattttggcagcactgaaagagaacagctcagaggttgtacagccttttttaatgggttgtggaaccaaggaaccgaagatcactcagctatgtttggctgctattcagagactcatgtcacatgaagtcgtgtctgagactgcagctggaaatataattaacatgctttggcagctaatggagaatagtcttgaagaacttaagctacttcaaacagttcttgttcttttaacaaccaatacagtagttcatgatgaggcactttctaaggcaatcgttctttgttttcgactacacttcacaaaagataatattacaaataatacagctgctgctacagtgcgacaagttgttactgttgtttttgagaggatggttgctgaagatgaacgacacagagatattatagaacaaccagtactggtacaaggaaatagtaacagaagatctgtcagtaccctcaaaccttgtgctaaagatgcatatatgcttttccaggatctttgtcagttggttaatgctgatgctccttattggctagtgggcatgacagaaatgactcggacgtttggcctcgaattacttgagtcagtcctcaatgattttccgcaggtctttttacaacaccaagaatttagtttcctcctcaaagaaagggtatgtcctcttgtgataaagctcttttctccaaatataaagttcagacaaggttccagcacctcatcttctccagcaccagttgaaaaaccatattttcctatctgcatgcgtttgctgagagtagtatctgttctgattaagcagttttacagtcttttggtaactgaatgtgagatatttctgtcacttctggtgaaatttctggatgcagataaaccacagtggctacgagctgttgcggtggaatcaatacacagattctgtgtgcagcctcaactattaaggtcattttgtcagtcctatgatatgaaacagcattctaccaaggtttttcgtgatattgtaaatgcactgggatcttttatacagtccttgtttcttgtcccccctactggaaatcctgcaacaagcaaccaagctggaaacaataatttaggtggctcagtctcagcaccagctaactcaggaatggtggggattggtggaggtgttactttgctaccagcatttgaatataggggaacctggatacctattctgacaatcacagttcaaggcagtgctaaagccacctacttagaaatgttggacaaagttgagcctccaactatacctgaaggttacgccatgtctgtggcattccattgtttgctagaccttgttcgtggaatcacaagtatgattgaaggagagctaggagagcttgaaacagaatgtcaaaccaccactgaagaaggttcttcaccaacacagtcgacagaacagcaggatttacagtcaacatcagaccaaatggataaggaaattgttagtagggctgtttgggaagaaatggtgaatgcctgctggtgtggtcttcttgctgcactctcactccttcttgatgccagcacagatgaagctgccactgagaatattttaaaagctgaactgactatggctgctctttgtggaagactgggccttgtaacttcaagagatgcctttataactgcaatatgcaaaggttccctgcctccccattatgctcttactgtattgaataccaccactgcagctacactttccaacaaatcatattccgttcagggccaaagtgttatgatgataagtccatcaagtgaatctcaccaacaagttgtggcagtgggtcaacctttagcagtccagcctcaagggacagtaatgctgacttccaaaaatatccagtgtatgaggactttacttaacttggcgcattgccatggggctgttcttggaacatcatggcaacttgtcttggcaactcttcagcatcttgtgtggattctgggattaaagcctagtagtggcggtgccttgaaacctgggagagctgtagaaggacccagtacagttctaacaacagcagtgatgacagatttaccagtgatttccaatatactttcaagattgtttgaaagctcacagtatcttgatgatgtatcactgcatcatttaataaatgcactttgctccttgtctctagaagcaatggatatggcctatggaaataataaggaaccatctctttttgctgttgccaaattgttagaaactggtttagttaatatgcaccgaatagaaattctgtggagacctctgactggccatctacttgaggtctgccagcatccaaactctcgaatgagagaatggggagcagaagctttaacttctcttattaaagcaggattaacatttaaccatgatcctccactctcacaaaaccagaggctgcagttgcttttattgaacccgttaaaggagatgtccaatattaatcatccagatattcgactcaagcagttagaatgcgtgttgcagattctgcagagtcagggagacagtcttgggcctggatggccattagtgcttggagtcatgggagcaatcagaaatgatcaaggagaatccttgatacgaactgcattccagtgtcttcagttggttgtgacagattttctaccaacaatgccttgtacttgcctgcaaatagttgtagatgttgcaggtagctttggcctccataaccaagaactcaatattagtttaacttcaataggtttattgtggaatatttcagattattttttccaaagaggggaaactattgaaaaagaactaaataaggaagaggcagcacagcaaaagcaggcagaagagaaaggagttgttttaaatcggccattccaccctgcaccgccatttgattgcttgtggttatgtctttatgcaaaattgggtgaactatgtgtggatccccgtcctgctgtcaggaagagtgcagggcaaactctgttttctacaattggtgcgcatggaactttattacagcattcaacctggcacactgttatctggaaggtactctttcatctactggacagagttcgagagtcctctaccactgcagacaaagaaaagattgagtctggaggtggcaatattctcattcatcattcaagggacaccgccgagaagcaatgggctgagacgtgggtattaacattggctggagtagcaaggatcttcaacactagaagatatttgctgcagcctttaggagatttttcaagagcttgggatgttcttcttgaccatatacagtcagcagcactcagcaaaaacaatgaagtatctctggctgctctgaaaagcttccaggaaattttacagattgtgtcccctgtcagagactcagataagcctgagacaccacctgtagttaatgtacctgtgcctgttcttatagggcccatatcaggcatgagcaggccatttgtaagaacagattccattggagaaaaactaggaagatatagtagctctgagccacccattgttactgatgagcttgaagatttgaatctatggtgggctgcgtggaatacctggtatagaattggatctgaaagtactaagcctcctattacttttgataaactaacttttattcctagccagccttttcttacagctttaattcagatatttccagctctctaccaacacataaaaactggtttcaatatggatgacttgcaaaagttgggagtcatattgcacagtgctatttcagtcccaataagttcagatgcatccccttttattcttccatcttataccgaagcagttttgacaagtttacaggaagctgtacttacagctttagatgttctccaaaaggccatttgtgtaggaccagaaaacatgcagataatgtatccagctatatttgaccagttgttggcatttgtagaattttcctgtaaacctccacagtatggacagctggaaacaaagcacattgcaaatgcaaaatataatcagatccaactatttgcaccggcggaatgggtagccttgaattatgtgccgtttgctgaaaggtctttagaagtagttgtggatttataccaaaaaacagcgtgtcacaaagcagtggtgaatgagaaagtgctccagaatattattaagactcttagggttcctctcagtttgaagtattcctgcccttctgaaagcacatggaaactagcagtatcctctctcctcagagttctttctattgggctacctgttgcccggcagcatgcttcttctggaaaatttgacagtatgtggccagaactagccaatacttttgaagattttctctttactaaaagcatacctccagataatctctctattcaagagtttcaaagaaatgaaaatattgatgtcgaggtagttcaacttatcagcaatgagatactaccttatgccaattttattcctaaggaatttgttggtcaaataatgacaatgcttaacaagggctcaatacattctcagtcatcttcatttacagaagcagagattgatattcgtttgagagaggaattttctaaaatgtgttttgaaacattactccagttttccttcagtaataaagtcacaacacctcaagaaggctacatctcacgaatggcactctcagtgcttttaaagaggtcccaagatgtactacatcgctatatagaggatgaaagattaagtggtaaatgccctcttccaaggcaacaagtaacagaaattatatttgttttaaaagcagtcagtactcttattgattcacttaagaaaactcagcctgagaatgcttgtatcagcctatttggaataccaccctacttttaaaccttgtttttaatctcttaaagttgatggaaatacctgggcacaagtaattgccttatacccaactttagtagaatgcatcacctgttcttcttcagaagtctgttctgcacttaaagaggcactagttccttttaaggatttcatgcagccaccagcatccagagttcaaaatggagaatcttgaccggctacaatatatttgaaagcaggaagatagtctaaaaaatgtttgctcctaattgagtcttctgtgagaaggacatttcttactgcagataattcttggcagctgttgttggcctcctttaaattctacttacctgagttcagtaattcatattacaggcttgcacatcaacaaaggctcctgaatgaacagcagtgtaaggctttaataaattaaactgatgggagggataattaacactacagtatacatgctaccatatctccagttggtgatttaaagtgagcttatgtacagtttgtggtgtatgtgttaatgatgtactttttaaaaagaaagaagagatatttcaattcagtcagatttattagtctggtgtttttgcaccctttttcaagtacaaaatcgtactagaattttatgcaagatggtactgtaacattccatattatctataaccagcctttgttaacaaagggaactgatatacttgtgtgtataataaatggtacagttctgtataaaa

SEQ ID NO: 155284 - DNA, 5543 bp, Homo sapiens
  Payload ID: 10523
  Gene Symbol: MON2
  Gene Name: MON2 homolog, regulator of endosome-to-Golgi trafficking
  Uniprot ID: Q7Z3U7
  ENST ID: ENST00000552738
  CDS Start-End: 361-5427
agtcttaggggcctggggagctggcgctgaagcttcttgccaggttggctggtgacacccggtgtggctgggccccgcggcagcggagggacctgcccgccttgtgggtttctcggccagagtcggcggagcctagcgggacggtgcgactgcggggggcgcctccgagaaaagccagaggtgttgcggggaagctgctgggggacgctcgagcaggctccgggttcgcagcccagggcccaagaagcgggctgctgaaggaccagagacaccgggagggagctgcctgtggccctaaggagctgaccgtgccagagcttgtttgtacctctcggaaattggctgggaccttggaggatcatgtccggcaccagcagccccgaggcggtgaagaagctgctggagaatatgcagagcgacttgcgcgccttgtcactggagtgcaagaagaaattcccacctgtcaaagaggctgctgaatcaggaataataaaagttaaaacaattgctgcacgaaacactgaaattttggcagcactgaaagagaacagctcagaggttgtacagccttttttaatgggttgtggaaccaaggaaccgaagatcactcagctatgtttggctgctattcagagactcatgtcacatgaagtcgtgtctgagactgcagctggaaatataattaacatgctttggcagctaatggagaatagtcttgaagaacttaagctacttcaaacagttcttgttcttttaacaaccaatacagtagttcatgatgaggcactttctaaggcaatcgttctttgttttcgactacacttcacaaaagataatattacaaataatacagctgctgctacagtgcgacaagttgttactgttgtttttgagaggatggttgctgaagatgaacgacacagagatattatagaacaaccagtactggtacaaggaaatagtaacagaagatctgtcagtaccctcaaaccttgtgctaaagatgcatatatgcttttccaggatctttgtcagttggttaatgctgatgctccttattggctagtgggcatgacagaaatgactcggacgtttggcctcgaattacttgagtcagtcctcaatgattttccgcaggtctttttacaacaccaagaatttagtttcctcctcaaagaaagggtatgtcctcttgtgataaagctcttttctccaaatataaagttcagacaaggttccagcacctcatcttctccagcaccagttgaaaaaccatattttcctatctgcatgcgtttgctgagagtagtatctgttctgattaagcagttttacagtcttttggtaactgaatgtgagatatttctgtcacttctggtgaaatttctggatgcagataaaccacagtggctacgagctgttgcggtggaatcaatacacagattctgtgtgcagcctcaactattaaggtcattttgtcagtcctatgatatgaaacagcattctaccaaggtttttcgtgatattgtaaatgcactgggatcttttatacagtccttgtttcttgtcccccctactggaaatcctgcaacaagcaaccaagctggaaacaataatttaggtggctcagtctcagcaccagctaactcaggaatggtggggattggtggaggtgttactttgctaccagcatttgaatataggggaacctggatacctattctgacaatcacagttcaaggcagtgctaaagccacctacttagaaatgttggacaaagttgagcctccaactatacctgaaggttacgccatgtctgtggcattccattgtttgctagaccttgttcgtggaatcacaagtatgattgaaggagagctaggagagcttgaaacagaatgtcaaaccaccactgaagaaggttcttcaccaacacagtcgacagaacagcaggatttacagtcaacatcagaccaaatggataaggaaattgttagtagggctgtttgggaagaaatggtgaatgcctgctggtgtggtcttcttgctgcactctcactccttcttgatgccagcacagatgaagctgccactgagaatattttaaaagctgaactgactatggctgctctttgtggaagactgggccttgtaacttcaagagatgcctttataactgcaatatgcaaagcatattccgttcagggccaaagtgttatgatgataagtccatcaagtgaatctcaccaacaagttgtggcagtgggtcaacctttagcagtccagcctcaagggacagtaatgctgacttccaaaaatatccagtgtatgaggactttacttaacttggcgcattgccatggggctgttcttggaacatcatggcaacttgtcttggcaactcttcagcatcttgtgtggattctgggattaaagcctagtagtggcggtgccttgaaacctgggagagctgtagaaggacccagtacagttctaacaacagcagtgatgacagatttaccagtgatttccaatatactttcaagattgtttgaaagctcacagtatcttgatgatgtatcactgcatcatttaataaatgcactttgctccttgtctctagaagcaatggatatggcctatggaaataataaggaaccatctctttttgctgttgccaaattgttagaaactggtttagttaatatgcaccgaatagaaattctgtggagacctctgactggccatctacttgaggtctgccagcatccaaactctcgaatgagagaatggggagcagaagctttaacttctcttattaaagcaggattaacatttaaccatgatcctccactctcacaaaaccagaggctgcagttgcttttattgaacccgttaaaggagatgtccaatattaatcatccagatattcgactcaagcagttagaatgcgtgttgcagattctgcagagtcagggagacagtcttgggcctggatggccattagtgcttggagtcatgggagcaatcagaaatgatcaaggagaatccttgatacgaactgcattccagtgtcttcagttggttgtgacagattttctaccaacaatgccttgtacttgcctgcaaatagttgtagatgttgcaggtagctttggcctccataaccaagaactcaatattagtttaacttcaataggtttattgtggaatatttcagattattttttccaaagaggggaaactattgaaaaagaactaaataaggaagaggcagcacagcaaaagcaggcagaagagaaaggagttgttttaaatcggccattccaccctgcaccgccatttgattgcttgtggttatgtctttatgcaaaattgggtgaactatgtgtggatccccgtcctgctgtcaggaagagtgcagggcaaactctgttttctacaattggtgcgcatggaactttattacagcattcaacctggcacactgttatctggaaggtactctttcatctactggacagagttcgagagtcctctaccactgcagacaaagaaaagattgagtctggaggtggcaatattctcattcatcattcaagggacaccgccgagaagcaatgggctgagacgtgggtattaacattggctggagtagcaaggatcttcaacactagaagatatttgctgcagcctttaggagatttttcaagagcttgggatgttcttcttgaccatatacagtcagcagcactcagcaaaaacaatgaagtatctctggctgctctgaaaagcttccaggaaattttacagattgtgtcccctgtcagagactcagataagcctgagacaccacctgtagttaatgtacctgtgcctgttcttatagggcccatatcaggcatgagcaggccatttgtaagaacagattccattggagaaaaactaggaagatatagtagctctgagccacccattgttactgatgagcttgaagatttgaatctatggtgggctgcgtggaatacctggtatagaattggatctgaaagtactaagcctcctattacttttgataaactaacttttattcctagccagccttttcttacagctttaattcagatatttccagctctctaccaacacataaaaactggtttcaatatggatgacttgcaaaagttgggagtcatattgcacagtgctatttcagtcccaataagttcagatgcatccccttttattcttccatcttataccgaagcagttttgacaagtttacaggaagctgtacttacagctttagatgttctccaaaaggccatttgtgtaggaccagaaaacatgcagataatgtatccagctatatttgaccagttgttggcatttgtagaattttcctgtaaacctccacagtatggacagctggaaacaaagcacattgcaaatgcaaaatataatcaggcggaatgggtagccttgaattatgtgccgtttgctgaaaggtctttagaagtagttgtggatttataccaaaaaacagcgtgtcacaaagcagtggtgaatgagaaagtgctccagaatattattaagactcttagggttcctctcagtttgaagtattcctgcccttctgaaagcacatggaaactagcagtatcctctctcctcagagttctttctattgggctacctgttgcccggcagcatgcttcttctggaaaatttgacagtatgtggccagaactagccaatacttttgaagattttctctttactaaaagcatacctccagataatctctctattcaagagtttcaaagaaatgaaaatattgatgtcgaggtagttcaacttatcagcaatgagatactaccttatgccaattttattcctaaggaatttgttggtcaaataatgacaatgcttaacaagggctcaatacattctcagtcatcttcatttacagaagcagagattgatattcgtttgagagaggaattttctaaaatgtgttttgaaacattactccagttttccttcagtaataaagtcacaacacctcaagaaggctacatctcacgaatggcactctcagtgcttttaaagaggtcccaagatgtactacatcgctatatagaggatgaaagattaagtggtaaatgccctcttccaaggcaacaagtaacagaaattatatttgttttaaaagcagtcagtactcttattgattcacttaagaaaactcagcctgagaatgttgatggaaatacctgggcacaagtaattgccttatacccaactttagtagaatgcatcacctgttcttcttcagaagtctgttctgcacttaaagaggcactagttccttttaaggatttcatgcagccaccagcatccagagttcaaaatggagaatcttgaccggctacaatatatttgaaagcaggaagatagtctaaaaaatgtttgctcctaattgagtcttctgtgagaaggacatttcttactgcagataattcttggcagctgttgttggc

SEQ ID NO: 155285 - DNA, 424 bp, Homo sapiens
  Payload ID: 10523
  Gene Symbol: MON2
  Gene Name: MON2 homolog, regulator of endosome-to-Golgi trafficking
  ENST ID: ENST00000549286
  CDS Start-End: 147-326
aggctccgggttcgcagcccagggcccaagaagcgggctgctgaaggaccagagacaccgggagggagctgcctgtggccctaaggagctgaccgtgccagagcttgtttgtacctctcggaaattggctgggaccttggaggatcatgtccggcaccagcagccccgaggcggtgaagaagctgctggagaatatgcagagcgacttgcgcgccttgtcactggagtgcaagaagaaattcccacctgtcaaagaggctgctgaatcaggaataataaaagttaaaacaattgctgcacgaaacactgaaattttggcaggataaaaactgcaattatgcagtgaaactgctcagagcaaggaaacccctaggatatggggacctggtggacctttttcagcactgaaagagaacagctcaga

SEQ ID NO: 155286 - DNA, 1048 bp, Homo sapiens
  Payload ID: 10524
  Gene Symbol: MOGAT1
  Gene Name: monoacylglycerol O-acyltransferase 1
  Uniprot ID: Q96PD6
  ENST ID: ENST00000446656
  CDS Start-End: 1-1008
atgaaggtagagtttgcaccgctcaacatccagctggcgcggcggctgcagacggtggccgtgctgcagtgggtcctgaaatacctgctgctcgggccgatgtccattggaatcactgtgatgctgatcatacacaactatttgttcctttacatcccttatttgatgtggctttactttgactggcataccccagagcgaggaggcaggagatccagctggatcaaaaattggactctttggaaacactttaaggactattttccaattcatcttatcaaaactcaagatttggatccaagtcacaactatatatttgggtttcacccccatggaataatggcagttggagcctttgggaatttttctgtaaattattctgacttcaaggacctgtttcctggctttacttcatatcttcacgtgctgccactttggttctggtgtcctgtctttcgagaatatgtgatgagtgttgggctggtttcagtttccaagaaaagtgtgtcctacatggtaagcaaggagggaggtggaaacatctctgtcattgtccttgggggtgcaaaagaatcactggatgctcatcctggaaagttcactctgttcatccgccagcggaaaggatttgttaaaattgctttgacccatggcgcctctctggtcccagtggtttcttttggtgaaaatgaactgtttaaacaaactgacaaccctgaaggatcatggattagaactgttcagaataaactgcagaagatcatggggtttgctttgcccctgtttcatgccaggggagtttttcagtacaattttggcctaatgacctataggaaagccatccacactgttgttggccgcccgatccctgttcgtcagactctgaacccgacccaggagcagattgaggagttacatcagacctatatggaggaacttaggaaattgtttgaggaacacaaaggaaagtatggcattccagagcacgagactcttgttttaaaatgacttgactataaaaaaaaattaaaaaataaaaataaatgac

SEQ ID NO: 155287 - DNA, 1404 bp, Homo sapiens
  Payload ID: 10525
  Gene Symbol: MOGAT2
  Gene Name: monoacylglycerol O-acyltransferase 2
  Uniprot ID: Q3SYC2
  ENST ID: ENST00000198801
  CDS Start-End: 71-1075
aaaaacctgtgggtgcctcagaccacagcagagctcacagaacctgcgggagccaggctgacccgccagcatggtagagttcgcgcccttgtttatgccgtgggagcgcaggctgcagacacttgctgtcctacagtttgtcttctccttcttggcactggccgagatctgcactgtgggcttcatagccctcctgtttacaagattctggctcctcactgtcctgtatgcggcctggtggtatctggaccgagacaagccacggcaggggggccggcacatccaggccatcaggtgctggactatatggaagtacatgaaggactatttccccatctcgctggtcaagactgctgagctggacccctctcggaactacattgcgggcttccacccccatggagtcctggcagtcggagcctttgccaacctgtgcactgagagcacaggcttctcttcgatcttccccggtatccgcccccatctgatgatgctgaccttgtggttccgggcccccttcttcagagattacatcatgtctgcagggttggtcacatcagaaaaggagagtgctgctcacattctgaacaggaagggtggcggaaacttgctgggcatcattgtagggggtgcccaggaggccctggatgccaggcctggatccttcacgctgttactgcggaaccgaaagggcttcgtcaggctcgccctgacacacggggcacccctggtgccaatcttctccttcggggagaatgacctatttgaccagattcccaactcttctggctcctggttacgctatatccagaatcggttgcagaagatcatgggcatctccctcccactctttcatggccgtggtgtcttccagtacagctttggtttaataccctaccgccggcccatcaccactgtggtggggaagcccatcgaggtacagaagacgctgcatccctcggaggaggaggtgaaccagctgcaccagcgttatatcaaagagctgtgcaacctcttcgaggcccacaaacttaagttcaacatccctgctgaccagcacttggagttctgctgagcccaaagggcagggccaacattagggagcccagcaggaggtgctgtgctgagaagacttcctggaggtgtttgttgaacatatctgcagagccttcccagactcctgcaaatccaacccatatcaggctgtaagtcagagcaggcaatgcagaagaggagaccagaccaaggggtcagctggggctaggacagtgagggctgctagaggggctgggcctctctttgcacatggacactgggcccctctctatattgagtggtctgttaacattcattggtggctgattccaaaagatgagagccaaagctgcacggactcgagtccta

SEQ ID NO: 155288 - DNA, 3204 bp, Homo sapiens
  Payload ID: 10525
  Gene Symbol: MOGAT2
  Gene Name: monoacylglycerol O-acyltransferase 2
  Uniprot ID: Q3SYC2
  ENST ID: ENST00000526712
  CDS Start-End: 774-1532
actgtgtagttcagagtggccacagacaagaggcaggagcgggagggacagggccagctctggggctcctggaggccaggctgagctacttggactgtgcccaaagttatggggaagtcatgaagggcttgaataaggggaggcacctggctggatttatctctgggaaaatggggcagaggatgaacagaaagagagcaggaaagggtctccctttgctctgagatcccaaaagatggaaactagaacagtttatccaaccagttgtccccattgattgagcacttaatgagtacaaacaactctcctggggagaaggaggacaggcaggggatggagtgaattaggcggcctggtgcagtgggagaaagtgagctttggagttaggcctacctaggctcaacgcgtgctcccagtgacactgggctggccgtagtccctctcagggactttgtctcctctttgaatgccccggaagctgctgtcttcctcctgggcccgaggattggacaggacagtgctgctagtgccaggcctatgggcagagttcagtctgagcaatctcacctgccttcctctcagacccctgtccctgacagctccttcttccctccccagccgagatctgcactgtgggcttcatagccctcctgtttacaagattctggctcctcactgtcctgtatgcggcctggtggtatctggaccgagacaagccacggcaggggggccggcacatccaggccatcaggtgctggactatatggaagtacatgaaggactatttccccatctcgctggtcaagactgctgagctggacccctctcggaactacattgcgggcttccacccccatggagtcctggcagtcggagcctttgccaacctgtgcactgagagcacaggcttctcttcgatcttccccggtatccgcccccatctgatgatgctgaccttgtggttccgggcccccttcttcagagattacatcatgtctgcagggttggtcacatcagaaaaggagagtgctgctcacattctgaacaggaagggtggcggaaacttgctgggcatcattgtagggggtgcccaggaggccctggatgccaggcctggatccttcacgctgttactgcggaaccgaaagggcttcgtcaggctcgccctgacacacggggcacccctggtgccaatcttctccttcggggagaatgacctatttgaccagattcccaactcttctggctcctggttacgctatatccagaatcggttgcagaagatcatgggcatctccctcccactctttcatggccgtggtgtcttccagtacagctttggtttaataccctaccgccggcccatcaccactgtggtggggaagcccatcgaggtacagaagacgctgcatccctcggaggaggaggtgaaccagctgcaccagcgttatatcaaagagctgtgcaacctcttcgaggcccacaaacttaagttcaacatccctgctgaccagcacttggagttctgctgagcccaaagggcagggccaacattagggagcccagcaggaggtgctgtgctgagaagacttcctggaggtgtttgttgaacatatctgcagagccttcccagactcctgcaaatccaacccatatcaggctgtaagtcagagcaggcaatgcagaagaggagaccagaccaaggggtcagctggggctaggacagtgagggctgctagaggggctgggcctctctttgcacatggacactgggcccctctctatattgagtggtctgttaacattcattggtggctgattccaaaagatgagagccaaagctgcacggactcgagtcctaggctgcacacctcacaagcatctcttctactgcattctgttggtcgaagcaagtcacaacccagcagattcaaggagtaaggaataggatccccctctggatgggaggagcagcaatgtcatattacaaaagggtgtggacacatgcagggattcttactgccgtctttgcaaacaatccaccaaaacttaaaaactaaaagcctgaagcacaagcactctccaccccaggcacacacaccctggaattccctgtgtgaccatggtaccaccactgtgtgtcccgaggatcccagctcagctttgcatcgctgccctatctccctctcgctctcccctgttgatccctcatgcacagccacagcgagctgtctaaaacacaaagctgaccgcgccatttcctactcagcatccttccatgaccctccattgctcctaggatagggtttggaccagtctgaatccagaggatcaggatccagcaggaaccagaggataatttgaggagggtttaaaaaggaaccattttttgaggtgtgtgcactgtttccaccctgaggcctggaaggatgaatggaagcagcagttcctgaaccaggaagactcatgtgtgggggccattgctggtcaaggggcacgaacaggtctggtgaccctgcaagggaggagccaggagcaagcattcccacttcaccttcctccattcagtctgctgccaagttccccactgcctgagcccaactagaagctggagggaaggagggcctgtggctgcagtccaggcatgtaggcctcctgggaaagggagaatggcaaagacaggcagagtggatctggaggggtcaacggaagacggaacatgtccacttccaggcccgagcttctcagcctgccgtttgccactctccagcatctggcccagcctgtccatcctcatctctcttcctcccttactccgtgctcccatcactcggaaccatttgcatttctttgtctcagctatattgtctcacctctgagtttttgcccatgatgttggatgccatggaatgccatatcctccccattatctcccccttgtctggataattcctactcatcctacaatactgattttatctgtgcaaagaagtcttccccagtgcctctggttgacaggggtttcctctggcttctccagactttctgttcctccaccacagcccttagcaccctggggaggaggtgttgctgtccaggtaaatgctgcgccaatgcccctgcctctagtgcactccctccagcctacccacaaacaggacctgcatcctgtctcacaaataaaactgaactcttgaaatggtg

SEQ ID NO: 155289 - DNA, 1650 bp, Homo sapiens
  Payload ID: 10525
  Gene Symbol: MOGAT2
  Gene Name: monoacylglycerol O-acyltransferase 2
  Uniprot ID: Q3SYC2
  ENST ID: ENST00000525093
  CDS Start-End: 1-855
atggtagagttcgcgcccttgtttatgccgtgggagcgcaggctgcagacacttgctgtcctacagtttgtcttctccttcttggcactggccgagatctgcactgtgggcttcatagccctcctgtttacaagattctggctcctcactgtcctgtatgcggcctggtggtatctggaccgagacaagccacggcaggggggccggcacatccaggccatcaggtgctggactatatggaagtacatgaaggactatttccccatctcgctggtcaagactgctgagctggacccctctcggaactacattgcgggcttccacccccatggagtcctggcagtcggagcctttgccaacctgtgcactgagagcacaggcttctcttcgatcttccccggtatccgcccccatctgatgatgctgaccttgtggttccgggcccccttcttcagagattacatcatgtctgcagggttggtcacatcagaaaaggagagtgctgctcacattctgaacaggaagggtggcggaaacttgctgggcatcattgtagggggtgcccaggaggccctggatgccaggcctggatccttcacgctgttactgcggaaccgaaagggcttcgtcaggctcgccctgacacacgggtatcaagcctctgggaagagcactctgggttcagttggcaattggcaaggattttattttggtgggaagatggcagagacgaatgcagattctattttggtagagattttcagtccattcacaattaagattatattttggtgtcttatgcccaaatacctagaaaagtttccacaacggagactcagtgatctaagaaactaggtggcaatgaacatattccacaaagctggcatttgatctgagatctgtggtatctagaagagtgatatttggggtacatttcagagctgttctccctccttggggtgaagcatccttgagaaacatgagccagctgaggtgggagatatttttctaggaaaaacaatgcagatttttatatctgggaggactctctgaagcattctggtctacctctcatggtgcaactgggaagttgtggccctgcaagggacctgcccaaggtcagagaatggggctgtgaaggtctgggagataacccaggcctccacctccagcccaggtggctgacctctgctccatttcttggtcactgagtccctgcaggaagctaaagggcctttcagctcgtgccttctctggggcctcccacatgccctctttcctctatttgtctccagggcacccctggtgccaatcttctccttcggggagaatgacctatttgaccagattcccaactcttctggctcctggttacgctatatccagaatcggttgcagaagatcatgggcatctccctcccactctttcatggccgtggtgtcttccagtacagctttggtttaataccctaccgccggcccatcaccactgtggtggggaagcccatcgaggtacagaagacgctgcatccctcggaggaggaggtgaaccagctgcaccagcgttatatcaaagagctgtgcaacctcttcgaggcccacaaacttaagttcaacatccctgctgaccagcacttggagttctgctga

SEQ ID NO: 155290 - DNA, 2132 bp, Homo sapiens
  Payload ID: 10526
  Gene Symbol: MOGAT3
  Gene Name: monoacylglycerol O-acyltransferase 3
  Uniprot ID: Q86VF5
  ENST ID: ENST00000223114
  CDS Start-End: 168-1193
cactcacacacctacggacacacgctactctgggaggtgatttgcgacttagccaggcccccaaagctgggctcctgtagggagaaagtctgcccaggtccacatccaagccttcatcgtttgtcctccgggttctgggatcctgctggaagaggggagcttctgcaatgggagttgccacaaccctgcagcccccaaccacttccaaaaccttgcagaagcagcatctagaagcagtgggcgcctaccaatatgtgctcactttcctcttcatgggccctttcttctcccttcttgtctttgtcctcctcttcacgtcactctggcccttctctgttttttacttggtgtggctctatgtggactgggacacacccaaccaaggtggaaggcgttcggagtggataaggaaccgggcaatttggagacaactaagggattattatcctgtcaagctggtgaaaacagcagagctgcccccggatcggaactacgtgctgggcgcccaccctcatgggatcatgtgtacaggcttcctctgtaatttctccaccgagagcaatggcttctcccagctcttcccggggctccggccctggttagccgtgctggctggcctcttctacctcccggtctatcgcgactacatcatgtcctttggactctgtccggtgagccgccagagcctggacttcatcctgtcccagccccagctcgggcaggccgtggtcatcatggtggggggtgcgcacgaggccctgtattcagtccccggggagcactgccttacgctccagaagcgcaaaggcttcgtgcgcctggcgctgaggcacggggcgtccctggtgcccgtgtactcctttggggagaatgacatctttagacttaaggcttttgccacaggctcctggcagcattggtgccagctcaccttcaagaagctcatgggcttctctccttgcatcttctggggtcgcggtctcttctcagccacctcctggggcctgctgccctttgctgtgcccatcaccactgtggtgggccgccccatccccgtcccccagcgcctccaccccaccgaggaggaagtcaatcactatcacgccctctacatgacggccctggagcagctcttcgaggagcacaaggaaagctgtggggtccccgcttccacctgcctcaccttcatctaggcctggccgcggcctttcgctgagcccctgagcccaaggcactgagacctccacccactgtggactccatgcctccaataaaaggtagttctgggcccagcgcagtgcctcatgcctgtaatcccagcactttgggaggccaaggtgggaggatcgtttgagcccaggagttgaagaccagcctgggcaacacagtgagacttcatttctacaaaaattaaaaaataatgttgttaattagccgggcatggtggcatgtgcctgtaatcccagctatttgggaggctgaggcaggagacttgcttaaacccaggaggcggaggttgcagtgagctgagatcacaccacagtactccagcctgggcaacacagcgagactcaatctcaaaaaaaaaaaaaaaaaaaaaaaaaagactgttaaagctgtagtaggctgggcgtggtggctcatgcccataatcccaacactttgggaagccgaggcaggtggatcaactgaggtcaggagttcaagaccagcctggccaaaatggcaaaaccccctctctactaaaactacaaaaattagccgggcatggtggctcatgcctataatcccagctactccggaggctgaggcaggagaatcgcttgaacccaggaggcagaggttgcagtgagccgagatcacaccactgcactccagtctgggcaacagagcgagattccatctcaaaaaaaaaaaaatgttgttaaagctataatcgttctggaagtgaacatggccaggcatgacctgcccccatcctgatgtgctacaaagctgctgccttagattgggtatcaggaccctgaactgtcctcccagtgagagttcagtctgtggcatgaccttggacaagcctcttccttttgcctgtttacttctttgtctgtaaataaaggcatctgcttagcaaa

SEQ ID NO: 155291 - DNA, 933 bp, Homo sapiens
  Payload ID: 10526
  Gene Symbol: MOGAT3
  Gene Name: monoacylglycerol O-acyltransferase 3
  Uniprot ID: Q86VF5
  ENST ID: ENST00000379423
  CDS Start-End: 62-907
caagccttcatcgtttgtcctccgggttctgggatcctgctggaagaggggagcttctgcaatgggagttgccacaaccctgcagcccccaaccacttccaaaaccttgcagaagcagcatctagaagcagtgggcgcctaccaatatgtgctcactttcctcttcatgggccctttcttctcccttcttgtctttgtcctcctcttcacgtcactctggcccttctctgttttttacttggtgtggctctatgtggactgggacacacccaaccaaggtggaaggcgttcggagtggataaggaaccgggcaatttggagacaactaagggattattatcctgtcaagctggtgaaaacagcagagctgcccccggatcggaactacgtgctgggcgcccaccctcatgggatcatgtgtacaggcttcctctgtaatttctccaccgagagcaatggcttctcccagctcttcccggggctccggccctggttagccgtgctggctggcctcttctacctcccggtctatcgcgactacatcatgtcctttggactctgtccggtgagccgccagagcctggacttcatcctgtcccagccccagctcgggcaggccgtggtcatcatggtggggggtgcgcacgaggccctgtattcagtccccggggagcactgccttacgctccagaagcgcaaaggcttcgtgcgcctggcgctgaggcacggtgggccgccccatccccgtcccccagcgcctccaccccaccgaggaggaagtcaatcactatcacgccctctacatgacggccctggagcagctcttcgaggagcacaaggaaagctgtggggtccccgcttccacctgcctcaccttcatctaggcctggccgcggcctttcgctgagcccctgagcccaaggcactgagacc

SEQ ID NO: 155292 - DNA, 1219 bp, Homo sapiens
  Payload ID: 10526
  Gene Symbol: MOGAT3
  Gene Name: monoacylglycerol O-acyltransferase 3
  Uniprot ID: Q86VF5
  ENST ID: ENST00000440203
  CDS Start-End: 59-1093
gccttcatcgtttgtcctccgggttctgggatcctgctggaagaggggagcttctgcaatgggagttgccacaaccctgcagcccccaaccacttccaaaaccttgcagaagcagcatctagaagcagtgggcgcctaccaatatgtgctcactttcctcttcatgggccctttcttctcccttcttgtctttgtcctcctcttcacgtcactctggcccttctctgttttttacttggtgtggctctatgtggactgggacacacccaaccaaggtggaaggcgttcggagtggataaggaaccgggcaatttggagacaactaagggattattatcctgtcaagctggtgaaaacagcagagctgcccccggatcggaactacgtgctgggcgcccaccctcatgggatcatgtgtacaggcttcctctgtaatttctccaccgagagcaatggcttctcccagctcttcccggggctccggccctggttagccgtgctggctggcctcttctacctcccggtctatcgcgactacatcatgtcctttggactctgtccggtgagccgccagagcctggacttcatcctgtcccagccccagctcgggcaggccgtggtcatcatggtggggggtgcgcacgaggccctgtattcagtccccggggagcactgccttacgctccagaagcgcaaaggcttcgtgcgcctggcgctgaggcacggggcgtccctggtgcccgtgtactcctttggggagaatgacatctttagacttaaggcttttgccacaggctcctggcagcattggtgccagctcaccttcaagaagctcatgggcttctctccttgcatcttctggggtcgcggtctcttctcagccacctcctggggcctgctgccctttgctgtgcccatcaccactgtgggtgagtgcccacctccggggggacggccaccagcagctgcgtgggcatcagggatccctcgcccacctgtctccctctccctgcagtgggccgccccatccccgtcccccagcgcctccaccccaccgaggaggaagtcaatcactatcacgccctctacatgacggccctggagcagctcttcgaggagcacaaggaaagctgtggggtccccgcttccacctgcctcaccttcatctaggcctggccgcggcctttcgctgagcccctgagcccaaggcactgagacc

SEQ ID NO: 155293 - DNA, 4015 bp, Homo sapiens
  Payload ID: 10527
  Gene Symbol: MAOA
  Gene Name: monoamine oxidase A
  Uniprot ID: P21397
  ENST ID: ENST00000338702
  CDS Start-End: 124-1707
cgggtatcaaaagaaggatcggctccgcccccgggctccccgggggagttgatagaagggtccttcccaccctttgccgtccccactcctgtgcctacgacccaggagcgtgtcagccaaagcatggagaatcaagagaaggcgagtatcgcgggccacatgttcgacgtagtcgtgatcggaggtggcatttcaggactatctgctgccaaactcttgactgaatatggcgttagtgttttggttttagaagctcgggacagggttggaggaagaacatatactataaggaatgagcatgttgattacgtagatgttggtggagcttatgtgggaccaacccaaaacagaatcttacgcttgtctaaggagctgggcatagagacttacaaagtgaatgtcagtgagcgtctcgttcaatatgtcaaggggaaaacatatccatttcggggcgcctttccaccagtatggaatcccattgcatatttggattacaataatctgtggaggacaatagataacatggggaaggagattccaactgatgcaccctgggaggctcaacatgctgacaaatgggacaaaatgaccatgaaagagctcattgacaaaatctgctggacaaagactgctaggcggtttgcttatctttttgtgaatatcaatgtgacctctgagcctcacgaagtgtctgccctgtggttcttgtggtatgtgaagcagtgcgggggcaccactcggatattctctgtcaccaatggtggccaggaacggaagtttgtaggtggatctggtcaagtgagcgaacggataatggacctcctcggagaccaagtgaagctgaaccatcctgtcactcacgttgaccagtcaagtgacaacatcatcatagagacgctgaaccatgaacattatgagtgcaaatacgtaattaatgcgatccctccgaccttgactgccaagattcacttcagaccagagcttccagcagagagaaaccagttaattcagcggcttccaatgggagctgtcattaagtgcatgatgtattacaaggaggccttctggaagaagaaggattactgtggctgcatgatcattgaagatgaagatgctccaatttcaataaccttggatgacaccaagccagatgggtcactgcctgccatcatgggcttcattcttgcccggaaagctgatcgacttgctaagctacataaggaaataaggaagaagaaaatctgtgagctctatgccaaagtgctgggatcccaagaagctttacatccagtgcattatgaagagaagaactggtgtgaggagcagtactctgggggctgctacacggcctacttccctcctgggatcatgactcaatatggaagggtgattcgtcaacccgtgggcaggattttctttgcgggcacagagactgccacaaagtggagcggctacatggaaggggcagttgaggctggagaacgagcagctagggaggtcttaaatggtctcgggaaggtgaccgagaaagatatctgggtacaagaacctgaatcaaaggacgttccagcggtagaaatcacccacaccttctgggaaaggaacctgccctctgtttctggcctgctgaagatcattggattttccacatcagtaactgccctggggtttgtgctgtacaaatacaagctcctgccacggtcttgaagttctgttcttatgctctctgctcactggttttcaataccaccaagaggaaaatattgacaagtttaaaggctgtgtcattgggccatgtttaagtgtactggatttaactacctttggcttaattccaatcattgttaaagtaaaaacaattcaaagaatcacctaattaatttcagtaagatcaagctccatcttatttgtcagtgtagatcaactcatgttaattgatagaataaagccttgtgatcactttctgaaattcacaaagttaaacgtgatgtgctcatcagaaacaatttctgtgtcctgtttttattcccttcaatgcaaaatacatgatgatttcagaaacaaagcatttgactttctgtctgtggaggtggagtaggtgaaggcccagcctgtaactgtcctttttcttcccttaggcaatggtgaactgtcattacagagcctagaggctcacagcctcctggaggaagcagcctccactttggatcaggaaatagtaaaggaaagcagtgttgggggtagcggcatgcagaccctcagaccagaatggggacatcttgtggtctgctgcctcaggaatctcctgaccacttgtagtccctccgacttctctagacatctagtctcagtgctagcttatttgtatttttcctctttcacttcttatggaggagagtgtttaactgagttagaatgttgaaactgacttgctgtgacttatgtgcagctttccagttgagcagaggaaaatagtggcaggactgtcccccaggaggactccctgcttagctctgtgggagaccaactacgactggcatcttctcttccccctggaaggcagctagacaccaatggatccttgtcagttgtaacattctatttcaacttcaggaaagcagcagttttcttttaatttttcctatgaccataaaattagacatacctctcaacttacatatgtcttcaacatggttacctctgcataaatattagcaaagcatgccaatttctcttaagtactgaaatacatatgataaatttgactgttatttgttgagactatcaaacagaaaagaaattagggctctaatttccttaaagcaagctcacttgctttagttgttaagttttataaaagacatgaaattgagtcattttatatatgaaaactaagttctctatcttaggagtaatgtcggcccacaagggtgcccacctcttgttttccccttttaaaaactcagatttttaaaagccctttccaaaggtttcaactgtaaaatacttctttttacaatgtatcaacatatttttatttaaggggaattaacaattgccagggaaaccagccaacccaagtttattatatcattaaccttatcataaattcaaacctaagttgctggaccctggtgtgaggacataaatcttccaaagttttgcctatcctaagagctgcatttttctactgctctttaccttgcattttagctaatttaggagttttgagaatgtattggatacgctccagtacataaggagttgccgcatattatatcagactgctttgagaaatctcatccctagtctattgcagttgtttctattagcttactgattaactcagtcctgacacaccttttgggaaatgctgatttaaacttcttaactggcaacagttggaacagtaatcagtttgctaacatatttaaagtcttgaatgttgaagaactcatgtgatttacccttttcaactttttggaaaacgatttaatttattctaattagattaaccctattaatctatggattgggtatcaaaatgaatgccagtccagatgtgcctagacacgaaattggagctgaggactctcacgatatgcaagttcatccaacgtgaagataccataagctttttctctgaaccagagaaatgaaagtcagtttaagaggctgatagatcttggccctgttaaggcatccacttcacagttctgaaggctgagtcagccccactccacagttaggccaagaattagattttaaaacttcatctgtctgtcccagttaactgttaaataaggcctcatcctccactgaagagtatggattgaaggattgtgaactatgtttagtgtgattgtgaacttggtgcctaatgttccatgtctgaagtttgccccagtgctacacgttggagtatacctatgtgtgtgctttgccactgaagtaagattttgcctgtatggtactgttttgtttgttaataaagtgcactgccacccccaatgca

SEQ ID NO: 155294 - DNA, 5438 bp, Homo sapiens
  Payload ID: 10527
  Gene Symbol: MAOA
  Gene Name: monoamine oxidase A
  Uniprot ID: P21397
  ENST ID: ENST00000542639
  CDS Start-End: 1943-3127
ggcggagccaggccggcctagagtcacttctccccgcccctgactgggccgggagcccggggctggtctctaagagtgggtaccgagaacagcctgaccgtggagaagggctgcgggaagcagaacaccgcccccagcgcccagcgtgctccagaaacatgagcacaaacgcctcagcctccttccccggcggcaccggcaccggcaccagtacccgcaccagtaccggcaccggcaccagtacccgcaccagtaccggcaccggcaccagtacccgcaccagtaccggcaccggcaccgagcgcaaggcggagggcccgcccgaagccgggggcacaactgcccaggtcccgaacccggactccagcttggacgacacctcctacagcctgtccgaatggagcgtccgttctgagtggcggtccgtctcggatccgctagccagttcccagtggagcacgtcctcaactgccgaggccgcctcctggagctccagcatacactccccaatcagcactaccggtcttagcgagagtactgactccgactccaagagtggcctccggggtttcagcgcttacaacccgagcagtcggatccccaagtctaccaccagctcgaactcctccgatggggccgtcacagcctccaatcaggacaccggcattccctgggtattagtaacaggacctaccccgcccgtaaactcccccgtagagtcattgcaagggtctgccttctcctcagggttcagcaccccacggggtttggtaaaaggaccgaccctgcccccggattccaacctgacctcagtgtccgactacacttggatatttgtacggggacctcctatacccaatgacctttcgcaagtgtcaatacaagcacctcctacacccagtaacacccccgagtgtcagtacaagggtctgccgcatcctcagtgtccagcttcccctggggtttggtaccaggaccacctctacccaataacatttccccagtgtcgccacaagcacctcctgcaccccataacatccccccagtgtcaaggcaggcgtctacccccacctcagtgcctgacactccgcggggttcaatacaagaacctcctgcacccagtaatcctttccagctgccgacacaaggacattctaaacctaataactctcgccgagtgtcagtacaagggtccgccccgctctcagtgcccagctccccccgggtatcagctgaaacatcagctccgcccctgggcgctcccggagtatcagcaaaagggttcgccccgcccacagtgcccggctccccccgggtatcaaaagaaggatcggctccgcccccgggctccccgggggagttgatagaagggtccttcccaccctttgccgtccccactcctgtgcctacgacccaggagcgtgtcagccaaagcatggagaatcaagagaaggcgagtatcgcgggccacatgttcgacgtagtcgtgatcggaggtggcatttcaggccaagagaagagattggcatgaactgttgctttgccagttccagccagtaccagcaaaaacatacatgtatgttggagcatcagaggaaagcagctcctggtggagagactatctgctgccaaactcttgactgaatatggcgttagtgttttggttttagaagctcgggacagggttggaggaagaacatatactataaggaatgagcatgttgattacgtagatgttggtggagcttatgtgggaccaacccaaaacagaatcttacgcttgtctaaggagctgggcatagagacttacaaagtgaatgtcagtgagcgtctcgttcaatatgtcaaggggaaaacatatccatttcggggcgcctttccaccagtatggaatcccattgcatatttggattacaataatctgtggaggacaatagataacatggggaaggagattccaactgatgcaccctgggaggctcaacatgctgacaaatgggacaaaatgaccatgaaagagctcattgacaaaatctgctggacaaagactgctaggcggtttgcttatctttttgtgaatatcaatgtgacctctgagcctcacgaagtgtctgccctgtggttcttgtggtatgtgaagcagtgcgggggcaccactcggatattctctgtcaccaatggtggccaggaacggaagtttgtaggtggatctggtcaagtgagcgaacggataatggacctcctcggagaccaagtgaagctgaaccatcctgtcactcacgttgaccagtcaagtgacaacatcatcatagagacgctgaaccatgaacattatgagtgcaaatacgtaattaatgcgatccctccgaccttgactgccaagattcacttcagaccagagcttccagcagagagaaaccagttaattcagcggcttccaatgggagctgtcattaagtgcatgatgtattacaaggaggccttctggaagaagaaggattactgtggctgcatgatcattgaagatgaagatgctccaatttcaataaccttggatgacaccaagccagatgggtcactgcctgccatcatgggcttcattcttgcccggaaagctgatcgacttgctaagctacataaggaaataaggaagaagaaaatctgtgagctctatgccaaagtgctgggatcccaagaagctttacatccagtgcattatgaagagaagaactggtgtgaggagcagtactctgggggctgctacacggcctacttccctcctgggatcatgactcaatatggaagggtgattcgtcaacccgtgggcaggattttctttgcgggcacagagactgccacaaagtggagcggctacatggaaggggcagttgaggctggagaacgagcagctagggaggtcttaaatggtctcgggaaggtgaccgagaaagatatctgggtacaagaacctgaatcaaaggacgttccagcggtagaaatcacccacaccttctgggaaaggaacctgccctctgtttctggcctgctgaagatcattggattttccacatcagtaactgccctggggtttgtgctgtacaaatacaagctcctgccacggtcttgaagttctgttcttatgctctctgctcactggttttcaataccaccaagaggaaaatattgacaagtttaaaggctgtgtcattgggccatgtttaagtgtactggatttaactacctttggcttaattccaatcattgttaaagtaaaaacaattcaaagaatcacctaattaatttcagtaagatcaagctccatcttatttgtcagtgtagatcaactcatgttaattgatagaataaagccttgtgatcactttctgaaattcacaaagttaaacgtgatgtgctcatcagaaacaatttctgtgtcctgtttttattcccttcaatgcaaaatacatgatgatttcagaaacaaagcatttgactttctgtctgtggaggtggagtaggtgaaggcccagcctgtaactgtcctttttcttcccttaggcaatggtgaactgtcattacagagcctagaggctcacagcctcctggaggaagcagcctccactttggatcaggaaatagtaaaggaaagcagtgttgggggtagcggcatgcagaccctcagaccagaatggggacatcttgtggtctgctgcctcaggaatctcctgaccacttgtagtccctccgacttctctagacatctagtctcagtgctagcttatttgtatttttcctctttcacttcttatggaggagagtgtttaactgagttagaatgttgaaactgacttgctgtgacttatgtgcagctttccagttgagcagaggaaaatagtggcaggactgtcccccaggaggactccctgcttagctctgtgggagaccaactacgactggcatcttctcttccccctggaaggcagctagacaccaatggatccttgtcagttgtaacattctatttcaacttcaggaaagcagcagttttcttttaatttttcctatgaccataaaattagacatacctctcaacttacatatgtcttcaacatggttacctctgcataaatattagcaaagcatgccaatttctcttaagtactgaaatacatatgataaatttgactgttatttgttgagactatcaaacagaaaagaaattagggctctaatttccttaaagcaagctcacttgctttagttgttaagttttataaaagacatgaaattgagtcattttatatatgaaaactaagttctctatcttaggagtaatgtcggcccacaagggtgcccacctcttgttttccccttttaaaaactcagatttttaaaagccctttccaaaggtttcaactgtaaaatacttctttttacaatgtatcaacatatttttatttaaggggaattaacaattgccagggaaaccagccaacccaagtttattatatcattaaccttatcataaattcaaacctaagttgctggaccctggtgtgaggacataaatcttccaaagttttgcctatcctaagagctgcatttttctactgctctttaccttgcattttagctaatttaggagttttgagaatgtattggatacgctccagtacataaggagttgccgcatattatatcagactgctttgagaaatctcatccctagtctattgcagttgtttctattagcttactgattaactcagtcctgacacaccttttgggaaatgctgatttaaacttcttaactggcaacagttggaacagtaatcagtttgctaacatatttaaagtcttgaatgttgaagaactcatgtgatttacccttttcaactttttggaaaacgatttaatttattctaattagattaaccctattaatctatggattgggtatcaaaatgaatgccagtccagatgtgcctagacacgaaattggagctgaggactctcacgatatgcaagttcatccaacgtgaagataccataagctttttctctgaaccagagaaatgaaagtcagtttaagaggctgatagatcttggccctgttaaggcatccacttcacagttctgaaggctgagtcagccccactccacagttaggccaagaattagattttaaaacttcatctgtctgtcccagttaactgttaaataaggcctcatcctccactgaagagtatggattgaaggattgtgaactatgtttagtgtgattgtgaacttggtgcctaatgttccatgtctgaagtttgccccagtgctacacgttggagtatacctatgtgtgtgctttgccactgaagtaagattttgcctgtatggtactgttttgtttgttaataaagtgcactgccacccccaatgcagac

SEQ ID NO: 155295 - DNA, 2566 bp, Homo sapiens
  Payload ID: 10528
  Gene Symbol: MAOB
  Gene Name: monoamine oxidase B
  Uniprot ID: P27338
  ENST ID: ENST00000378069
  CDS Start-End: 149-1711
atagcggctcgccgaggcgctggtgcacgggggcagcgcgcagcaggccggcgggcaggcgggcgggctggctggcaggcaggactgggatcgaggcccagaaaacggagcagcgggcaccagggaggcctggaacggggcgagcgccatgagcaacaaatgcgacgtggtcgtggtggggggcggcatctcaggtatggcagcagccaaacttctgcatgactctggactgaatgtggttgttctggaagcccgggaccgtgtgggaggcaggacttacactcttaggaaccaaaaggttaaatatgtggaccttggaggatcctatgttggaccaacccagaatcgtatcttgagattagccaaggagctaggattggagacctacaaagtgaatgaggttgagcgtctgatccaccatgtaaagggcaaatcataccccttcagggggccattcccacctgtatggaatccaattacctacttagatcataacaacttttggaggacaatggatgacatggggcgagagattccgagtgatgccccatggaaggctccccttgcagaagagtgggacaacatgacaatgaaggagctactggacaagctctgctggactgaatctgcaaagcagcttgccactctctttgtgaacctgtgtgtcactgcagagacccatgaggtctctgctctctggttcctgtggtatgtgaagcagtgtggaggcacaacaagaatcatctcgacaacaaatggaggacaggagaggaaatttgtgggcggatctggtcaagtgagtgagcggataatggacctccttggagaccgagtgaagctggagaggcctgtgatctacattgaccagacaagagaaaatgtccttgtggagaccctaaaccatgagatgtatgaggctaaatatgtgattagtgctattcctcctactctgggcatgaagattcacttcaatccccctctgccaatgatgagaaaccagatgatcactcgtgtgcctttgggttcagtcatcaagtgtatagtttattataaagagcctttctggaggaaaaaggattactgtggaaccatgattattgatggagaagaagctccagttgcctacacgttggatgataccaaacctgaaggcaactatgctgccataatgggatttatcctggcccacaaagccagaaaactggcacgtcttaccaaagaggaaaggttgaagaaactttgtgaactctatgccaaggttctgggttccctagaagctctggagccagtgcattatgaagaaaagaactggtgtgaggagcagtactctgggggctgctacacaacttatttcccccctgggatcctgactcaatatggaagggttctacgccagccagtggacaggatttactttgcaggcaccgagactgccacacactggagcggctacatggagggggctgtagaggccggggagagagcagcccgagagatcctgcatgccatggggaagattccagaggatgaaatctggcagtcagaaccagagtctgtggatgtccctgcacagcccatcaccaccacctttttggagagacatttgccctccgtgccaggcctgctcaggctgattggattgaccaccatcttttcagcaacggctcttggcttcctggcccacaaaagggggctacttgtgagagtctaaagagagagggtgtctgtaatcacactctcttcttactgtatttgggatatgagtttggggaaagagttgcagtaaagttccatgaagacaaatagtgtggagtgaggcggggagcatgaagataaatccaactctgactgtaaaatacatggtatctctttctccgttgtggcccctgcttagtgtcccttacctggcttagcgttctgtttcaccagtttccaagtttattgccctcaaaatctttagaatagttaaattggcttgtttaaggttcttgctgccccacaacacaccttgcccatgcacaaggaatgaattttttcctaccattatggctttgtgcttgttcttcctcttacctgtaatagcctcaccttccctagttctttgcattcgtccttagaatactgtattgttacagctgaaagacagtaaagaccatttagtcctcaccttctgttttagagttgagcaaactgaagcccacagaggtggaacttaattacctaagagccacaataagccactggtatctgggggactagaacacaaatccaacgcttttcccacctctttggatgttttccccaattatcctccttcactccctgtcatagttaccgatggtgtcccgttgtgtgggtttactctgtgctaagttgtcttacacttctcaaatgctactcagtatatagccttaagtcttactgttttgtgcggtgtgtctccagctgattttaacttttttgatggtagaaattttatctcttcttccttttgtatcctccattgtatcttcatacaaaggacagtacacacttgggtaattaaaaataaaagttgattgaccat

SEQ ID NO: 155296 - DNA, 2735 bp, Homo sapiens
  Payload ID: 10529
  Gene Symbol: MMD
  Gene Name: monocyte to macrophage differentiation-associated
  Uniprot ID: Q15546
  ENST ID: ENST00000262065
  CDS Start-End: 298-1014
agccgggctccggggcggggcgcaggagccccggggcggaggagccggggaggcgggaggcgggaggcgggaggtgttggggccgttgaagcggcctccctcccgcccccagccgcccggtctggccccagccctgtcccgacccccggcctggcccactccgaccctacccggccgaagggttccgctggacacgcaggcggcctccggagcagcccaagcccatgagggccgcgcgcccggccgccggtgctgacgagacggagctcctggcccccgaggaggagcagaggatcaatgcggttcaagaatcgattccagcggttcatgaaccatcgagctccagccaatggccgctacaagccaacttgctatgaacatgctgctaactgttacacacacgcattcctcattgttccggccatcgtgggcagtgccctcctccatcggctgtctgatgactgctgggaaaagataacagcatggatttatggaatgggactctgtgccctcttcatcgtttctacagtatttcacattgtatcatggaaaaagagccacttaaggacagtggagcattgttttcacatgtgtgatagaatggttatctatttcttcattgctgcttcttatgctccatggttaaatcttcgtgaacttggacccctggcatctcatatgcgttggtttatctggctcatggcagctggaggaaccatttatgtatttctctaccatgaaaaatataaggtggttgaactctttttctatctcacaatgggattctctccagccttggtggtgacatcaatgaacaacaccgatggacttcaggaacttgcctgtgggggcttaatttattgcttgggagttgtgttcttcaagagtgatggcatcattccatttgcccacgccatctggcacctgtttgtggccacggcagctgcagtgcattactacgccatttggaaatacctttaccgaagtcctacggactttatgcggcatttatgaccaatctgtactaattctccaaaccagtattatttcaattatggcacttgggagtggggtgagagctaaacattgcacagggaaagaaaaaaaataactgcactgactttatatcttttgaatataattactgtgaaagtataaaggctgtgttctggaattttctgcctcacagcaaataaataaggtagtgaattaattattcattccattccactatcatgaaggactctgaatagacttggccaactgatgtttacaaaccagacttttatattttaattttacagattttactacatgatttttctaaattactatgtcaggttgtaaaagtcagtgcaataacaaaccttcctttttaagaagaaaattgtttctattactttcccattcactaggtaaagaatcatggacagaacttacactactttttaccatgtttcatcttggcataacatggttcttttttaaatagaaactttagttttttgtaaatttttaaaaaaatatttcattgatatgcatctctgcaggtcctcattcatgttgtaaatttttgcagcaagcagtcaacattccacaaacgaacaaacattatacctcttctgatagttttattaagcatggagaaattgccaatttttaaaaactgcagttttccaaacttttctgccaacctcttactctgaattcagtgctgctttgggacatatacttgacctagcttggtttaccagtgatggaaaagtattttgatatcattaactttttcaaaagatccaactttttctctatgcctttgccacattctcttcagggtctctttccacagtggataaatgttttttctgtattatgacagtattgttgtgatggccatctgctggaaactcctgaagagcattatgtattacagtgagcagttgtattgcctgtttggtgcccaatggttaagtcattgtcacttagctttatattgtcagtttgatatttattttaaattgtggaactagatgcataaattcacatttctgcctttcctttgcatcttctcatatattgtgtttttttttttttttcctagaaaaaatatttaaagcattgtttgacaggtagaaactcatgtatctgtagtccatgagttatatcctggctcagtggagtgatatttatgtattatttttacttttctctcagtgtcttatattaagattaacatgttgttaatagttgctttgttgattaatctctcttgttggtgttttaataaatgaaataggcttgcctttagatcgggtgctgatattgcctgtttcctagtaatgggctgatcaaatgatcagtggaattcttggtttgatgataaccttattaattgaaattttttactgatgtggctttaaaagaggtttattttgtatatgtttagaactctctgattttgatgaattatatgggaatgagaaacagaagaagtggtatttgctggcgagttaaataggcaaggtacccagtgataacaccaaccaaaccactcctatctgcatgattctgaacatctggatgcctgttgttttactgtgtatattttatttttaatatattaactttgtggattcatttaaggtctactcaaaagtaacactgtcaaaaccactaatatgtatgtaaaaattgtgctgtatactacaataaagttgttacttggatttgttcca

SEQ ID NO: 155297 - DNA, 670 bp, Homo sapiens
  Payload ID: 10529
  Gene Symbol: MMD
  Gene Name: monocyte to macrophage differentiation-associated
  ENST ID: ENST00000571578
  CDS Start-End: 230-670
gggaggtgttggggccgttgaagcggcctccctcccgcccccagccgcccggtctggccccagccctgtcccgacccccggcctggcccactccgaccctacccggccgaagggttccgctggacacgcaggcggcctccggagcagcccaagcccatgagggccgcgcgcccggccgccggtgctgacgagacggagctcctggcccccgaggaggagcagaggatcaatgcggttcaagaatcgattccagcggttcatgaaccatcgagctccagccaatggccgctacaagccaacttgctatgaacatgctgctaactgttacacacacgcattcctcattgttccggccatcgtgggcagtgccctcctccatcggctgtctgatgactgctgggaaaagataacagcatggatttatggaatgggactctgtgccctcttcatcgtttctacagtatttcacattgtatcatggaaaaagagccacttaaggttaaatcttcgtgaacttggacccctggcatctcatatgcgttggtttatctggctcatggcagctggaggaaccatttatgtatttctctaccatgaaaaatataaggtggttgaactctttttctatctcacaatgggattctctccagccttggtggtgacatcaatg

SEQ ID NO: 155298 - DNA, 2335 bp, Homo sapiens
  Payload ID: 10530
  Gene Symbol: MMD2
  Gene Name: monocyte to macrophage differentiation-associated 2
  Uniprot ID: Q8IY49
  ENST ID: ENST00000401401
  CDS Start-End: 197-937
gctcgggatttggcgtcggcggctccgggcgcctccagctccggctcgggctccggctccggctccgggcgccgaccaggtccccttggcccccgccgcgcgccctccaacctgctgctgccgccgccgcgccccccaggctctgccagctacccgcgctctgagcccggggccagattcccatggaagcgccgcgatgttcgccccccggctgctggatttccagaagacgaaatacgcgaggttcatgaaccaccgagtccctgcccacaagaggtaccagcccacagagtatgaacatgcggccaactgtgccacccatgctttctggatcatccccagcatcctgggcagctccaacctctacttcctgtcggacgatgactgggagaccatctctgcctggatctacggcctcggcctctgcggcctcttcgtggtgtccactgtgtttcacaccatctcctggaagaagagccacctcaggatggtggaacactgtctacacatgttcgaccggatggtcatctatttcttcatagcggcttcctacgcaccctggctgaaccttcgggagctgggcccctgggcctcccacatgcgctggctggtctggattatggcttccgtgggcaccatctatgtcttcttcttccatgagcggtacaagcttgtggagcttctctgctacgtcgtaatgggcttcttccccgccctggtcatcctctccatgcccaacaccgagggcatctgggagctggtgaccggaggggtcttctactgcctgggcatggtcttcttcaagagtgacgggaggatcccctttgcccacgccatctggcatctctttgtagcatttggtgctggtacccactactatgccatctggaggtacctctatctgcccagcaccctgcagaccaaggtgtccaaatgaggtgacccagacttgagaggtcgtttgggctttaggagtggagcacgtttctgtgaacgttaacccagagcacagcgccaaggcctgtcttccctttattgggtagagttcttgatggctccaaggtgacttctggtgacagccagatcatccctcgagtccccagcgagaaagaaagcatttagccattcttacagaggagaaattaaccctgtaatgtgtttctattttagatgagtgtttcctaatacaagcaacattaacatcttcagaaaaggaagcaggcatggtcctggaaaattggggaatgacgggccaatctgtgtttcctaaggtcctgaagaatctggcaaagagtcctgtgggttgtttatacctgggtggccagggcctccctctctgttaccaaagtccaggctggcgaattgtctctggttcagggaaaggggacagcccagcttgaagatgagggatggtgaatggctgtgaccatggcagacatcaccaatcaagtgcagcacatgggtgatgtcagaattcttcccagcacagtgttctgggcagccagtaccaatcaatttggcactcatgatgggacctctttgcccttcctgtctggtgtgctctgaaatgggataatggccagagtagctgaaaatctccaaatgggcatttgcatgcctatctcctcatctccccctcccttttgggaaactcctggagtaggcagtttgggggcggtagagggaaactgaggcgcacacccatgcagcccctgatgttctgttccaccgtagttgattctcagtagagttgggaatgaggatgctgttacttggccatttcttcccatctccaaaaatccagagacattacgagagctattcattcataagatggggcaaacagcccccaggcacttgctccctgctccatacttaaggtttgtgatgccaacatttggattctctcttggtgccaatcagtggctgttagaggctactcaggtgtaccccaaacagaaggcacatggatctggggcgactgttccaggtcctcccaacctctgaagtgctcagtagcccaacaacaaggctgctgggggcctgttcttcagcccccgtcagggcggggccagcctctctgtccaatgctgcctggacatttactggggaggtgagtagcaggcccagctccaggatctgaattggaatctcagattctctggataaagaatctgtctcaagtcaggaggtcctcattctgcgactcccaaccagggtggagtgggcacagacaggatgccttatgcttatctctagcacattccagggggttccagggttcctgcacctggaatccagtgtgtccaagccagtattaaattatctcaacaca

SEQ ID NO: 155299 - DNA, 2415 bp, Homo sapiens
  Payload ID: 10530
  Gene Symbol: MMD2
  Gene Name: monocyte to macrophage differentiation-associated 2
  Uniprot ID: Q8IY49
  ENST ID: ENST00000404774
  CDS Start-End: 196-1008
ctcgggatttggcgtcggcggctccgggcgcctccagctccggctcgggctccggctccggctccgggcgccgaccaggtccccttggcccccgccgcgcgccctccaacctgctgctgccgccgccgcgccccccaggctctgccagctacccgcgctctgagcccggggccagattcccatggaagcgccgcgatgttcgccccccggctgctggatttccagaagacgaaatacgcgaggttcatgaaccaccgagtccctgcccacaagaggtaccagcccacagagtatgaacatgcggccaactgtgccacccatgctttctggatcatccccagcatcctgggcagctccaacctctacttcctgtcggacgatgactgggagaccatctctgcctggatctacggcctcggcctctgcggcctcttcgtggtgtccactgtgtttcacaccatctcctggaagaagagccacctcaggatggtggaacactgtctacacatgttcgaccggatggtcatctatttcttcatagcggcttcctacgcaccctggctgaaccttcgggagctgggcccctgggcctcccacatgcgctggctggtctggattatggcttccgtgggcaccatctatgtcttcttcttccatgagcgaacagggagctgtgtgcagtttcttcgtggggaggcatgtcctaaggccggcacggcttgtcttcctgccaggtacaagcttgtggagcttctctgctacgtcgtaatgggcttcttccccgccctggtcatcctctccatgcccaacaccgagggcatctgggagctggtgaccggaggggtcttctactgcctgggcatggtcttcttcaagagtgacgggaggatcccctttgcccacgccatctggcatctctttgtagcatttggtgctggtacccactactatgccatctggaggtacctctatctgcccagcaccctgcagaccaaggtgtccaaatgaggtgacccagacttgagaggtcgtttgggctttaggagtggagcacgtttctgtgaacgttaacccagagcacagcgccaaggcctgtcttccctttattgggtagagttcttgatggctccaaggtgacttctggtgacagccagatcatccctcgagtccccagcgagaaagaaagcatttagccattcttacagaggagaaattaaccctgtaatgtgtttctattttagatgagtgtttcctaatacaagcaacattaacatcttcagaaaaggaagcaggcatggtcctggaaaattggggaatgacgggccaatctgtgtttcctaaggtcctgaagaatctggcaaagagtcctgtgggttgtttatacctgggtggccagggcctccctctctgttaccaaagtccaggctggcgaattgtctctggttcagggaaaggggacagcccagcttgaagatgagggatggtgaatggctgtgaccatggcagacatcaccaatcaagtgcagcacatgggtgatgtcagaattcttcccagcacagtgttctgggcagccagtaccaatcaatttggcactcatgatgggacctctttgcccttcctgtctggtgtgctctgaaatgggataatggccagagtagctgaaaatctccaaatgggcatttgcatgcctatctcctcatctccccctcccttttgggaaactcctggagtaggcagtttgggggcggtagagggaaactgaggcgcacacccatgcagcccctgatgttctgttccaccgtagttgattctcagtagagttgggaatgaggatgctgttacttggccatttcttcccatctccaaaaatccagagacattacgagagctattcattcataagatggggcaaacagcccccaggcacttgctccctgctccatacttaaggtttgtgatgccaacatttggattctctcttggtgccaatcagtggctgttagaggctactcaggtgtaccccaaacagaaggcacatggatctggggcgactgttccaggtcctcccaacctctgaagtgctcagtagcccaacaacaaggctgctgggggcctgttcttcagcccccgtcagggcggggccagcctctctgtccaatgctgcctggacatttactggggaggtgagtagcaggcccagctccaggatctgaattggaatctcagattctctggataaagaatctgtctcaagtcaggaggtcctcattctgcgactcccaaccagggtggagtgggcacagacaggatgccttatgcttatctctagcacattccagggggttccagggttcctgcacctggaatccagtgtgtccaagccagtattaaattatctcaacacattccacaga

SEQ ID NO: 155300 - DNA, 2372 bp, Homo sapiens
  Payload ID: 10530
  Gene Symbol: MMD2
  Gene Name: monocyte to macrophage differentiation-associated 2
  Uniprot ID: Q8IY49
  ENST ID: ENST00000406755
  CDS Start-End: 175-756
ctccgggcgcctccagctccggctcgggctccggctccggctccgggcgccgaccaggtccccttggcccccgccgcgcgccctccaacctgctgctgccgccgccgcgccccccaggctctgccagctacccgcgctctgagcccggggccagattcccatggaagcgccgcgatgttcgccccccggctgctggatttccagaagacgaaatacgcgaggttcatgaaccaccgagtccctgcccacaagaggtaccagcccacagagtatgaacatgcggccaactgtgccacccatgctttctggatcatccccagcatcctgggcagctccaacctctacttcctgtcggacgatgactgggagaccatctctgcctggatctacggcctcggcctctgcggcctcttcgtggtgtccactgtgtttcacaccatctcctggaagaagagccacctcaggatggtggaacactgtctacacatgttcgaccggatggtcatctatttcttcatagcggcttcctacgcaccctggctgaaccttcgggagctgggcccctgggcctcccacatgcgctggctggtctggattatggcttccgtgggcaccatctatgtcttcttcttccatgagcggtacaagcttgtggagcttctctgctacgtcgtaatgggcttcttccccgccctggtcatcctctccatggcggggaaactgaggcctggcatgacttgtctaaagaggcagtaggccagcccaacaccgagggcatctgggagctggtgaccggaggggtcttctactgcctgggcatggtcttcttcaagagtgacgggaggatcccctttgcccacgccatctggcatctctttgtagcatttggtgctggtacccactactatgccatctggaggtacctctatctgcccagcaccctgcagaccaaggtgtccaaatgaggtgacccagacttgagaggtcgtttgggctttaggagtggagcacgtttctgtgaacgttaacccagagcacagcgccaaggcctgtcttccctttattgggtagagttcttgatggctccaaggtgacttctggtgacagccagatcatccctcgagtccccagcgagaaagaaagcatttagccattcttacagaggagaaattaaccctgtaatgtgtttctattttagatgagtgtttcctaatacaagcaacattaacatcttcagaaaaggaagcaggcatggtcctggaaaattggggaatgacgggccaatctgtgtttcctaaggtcctgaagaatctggcaaagagtcctgtgggttgtttatacctgggtggccagggcctccctctctgttaccaaagtccaggctggcgaattgtctctggttcagggaaaggggacagcccagcttgaagatgagggatggtgaatggctgtgaccatggcagacatcaccaatcaagtgcagcacatgggtgatgtcagaattcttcccagcacagtgttctgggcagccagtaccaatcaatttggcactcatgatgggacctctttgcccttcctgtctggtgtgctctgaaatgggataatggccagagtagctgaaaatctccaaatgggcatttgcatgcctatctcctcatctccccctcccttttgggaaactcctggagtaggcagtttgggggcggtagagggaaactgaggcgcacacccatgcagcccctgatgttctgttccaccgtagttgattctcagtagagttgggaatgaggatgctgttacttggccatttcttcccatctccaaaaatccagagacattacgagagctattcattcataagatggggcaaacagcccccaggcacttgctccctgctccatacttaaggtttgtgatgccaacatttggattctctcttggtgccaatcagtggctgttagaggctactcaggtgtaccccaaacagaaggcacatggatctggggcgactgttccaggtcctcccaacctctgaagtgctcagtagcccaacaacaaggctgctgggggcctgttcttcagcccccgtcagggcggggccagcctctctgtccaatgctgcctggacatttactggggaggtgagtagcaggcccagctccaggatctgaattggaatctcagattctctggataaagaatctgtctcaagtcaggaggtcctcattctgcgactcccaaccagggtggagtgggcacagacaggatgccttatgcttatctctagcacattccagggggttccagggttcctgcacctggaatccagtgtgtccaagccagtattaaattatctcaacacattccacaga

SEQ ID NO: 155301 - DNA, 778 bp, Homo sapiens
  Payload ID: 10530
  Gene Symbol: MMD2
  Gene Name: monocyte to macrophage differentiation-associated 2
  Uniprot ID: Q8IY49
  ENST ID: ENST00000612910
  CDS Start-End: 197-778
gctcgggatttggcgtcggcggctccgggcgcctccagctccggctcgggctccggctccggctccgggcgccgaccaggtccccttggcccccgccgcgcgccctccaacctgctgctgccgccgccgcgccccccaggctctgccagctacccgcgctctgagcccggggccagattcccatggaagcgccgcgatgttcgccccccggctgctggatttccagaagacgaaatacgcgaggttcatgaaccaccgagtccctgcccacaagaggtaccagcccacagagtatgaacatgcggccaactgtgccacccatgctttctggatcatccccagcatcctgggcagctccaacctctacttcctgtcggacgatgactgggagaccatctctgcctggatctacggcctcggcctctgcggcctcttcgtggtgtccactgtgtttcacaccatctcctggaagaagagccacctcaggatggtggaacactgtctacacatgttcgaccggatggtcatctatttcttcatagcggcttcctacgcaccctggctgaaccttcgggagctgggcccctgggcctcccacatgcgctggctggtctggattatggcttccgtgggcaccatctatgtcttcttcttccatgagcggtacaagcttgtggagcttctctgctacgtcgtaatgggcttcttccccgccctggtcatcctctccatggcggggaaactgaggcctggcatgacttgtctaaagaggcagtag

SEQ ID NO: 155302 - DNA, 4642 bp, Homo sapiens
  Payload ID: 10531
  Gene Symbol: MGLL
  Gene Name: monoglyceride lipase
  ENST ID: ENST00000265052
  CDS Start-End: 565-1506
cccaaaccaacttgtccccatcaactccatctttctagtccccaccttccccggtgcagacacccggcgaagcccacccggttttcccagcggcatttccgatgacagcttcggggctacgtgtcctgtgctgtcggagacgcacaggaagcaaagtttgtgagaagccttgggggcgactttgccttgggcacccgcatttgtgcgtctgcgaggtgcctcggtgtgcgcggagctagtttcccagtttcccgggcccctcccttctccgagcccctctagcgatttgtttaggaaaagtgatgacatgaactagtagtggagaatcgcagcgccgctccccgccctggggagggaggggagccccggagagcctgccggtgggagctggaagcaggctcccggctgagcgccccagcccgaaaggcagggtctgggtgcgggaagagggctcggagctgccttcctgctgccttggggccgcccagatgagggaacagcccgatttgcctggttctgattctccaggctgtcgtggttgtggaatgcaaacgccagcacataatggaaacaggacctgaagacccttccagcatgccagaggaaagttcccccaggcggaccccgcagagcattccctaccaggacctccctcacctggtcaatgcagacggacagtacctcttctgcaggtactggaaacccacaggcacacccaaggccctcatctttgtgtcccatggagccggagagcacagtggccgctatgaagagctggctcggatgctgatggggctggacctgctggtgttcgcccacgaccatgttggccacggacagagcgaaggggagaggatggtagtgtctgacttccacgttttcgtcagggatgtgttgcagcatgtggattccatgcagaaagactaccctgggcttcctgtcttccttctgggccactccatgggaggcgccatcgccatcctcacggccgcagagaggccgggccacttcgccggcatggtactcatttcgcctctggttcttgccaatcctgaatctgcaacaactttcaaggtccttgctgcgaaagtgctcaaccttgtgctgccaaacttgtccctcgggcccatcgactccagcgtgctctctcggaataagacagaggtcgacatttataactcagaccccctgatctgccgggcagggctgaaggtgtgcttcggcatccaactgctgaatgccgtctcacgggtggagcgcgccctccccaagctgactgtgcccttcctgctgctccagggctctgccgatcgcctatgtgacagcaaaggggcctacctgctcatggagttagccaagagccaggacaagactctcaagatttatgaaggtgcctaccatgttctccacaaggagcttcctgaagtcaccaactccgtcttccatgaaataaacatgtgggtctctcaaaggacagccacggcaggaactgcgtccccaccctgaatgcattggccggtgcccggctcatggtctgggggatgcaggcaggggaagggcagagatggcttctcagatatggcttgccaaaaaaaaaaaaaaaaaaaaatcagaaattggagaaatccttagcacaattttctaaaaaataacagacatttttgttatacattagactatcagacactggacctaccttaatggttagacactttatgcaaaaaaagagaaaggtcccaggtgattttccacaaagaatgtgctaaaatgtccactgaaaacaaagccaagcctctgccctgcctctcccagctcccacaagggttccaggaattcctggtgttcccaggacaccagactgcaataactggaggcgcctccttcctgcccacccttcgctcacgccccagcgccctctctgaccagcctccgcttggtggccttcctctggccgtgtgatgaggtggttgctgtctccataggggccagctccccagggcagactcacgtgcccctctgaggctcagaaaatgcccagcccttcctcaaaatgagcagccacccatgactttgtgggctccttgttagcctgagaccaggctttgcagaggggcggggggtgaggcttagcccagaaggagaactgagcaggaaaccaaggctcttctctgtcccctgcccttcccctcctgccagggggaggctcaggttggtccccgagtgccgcctgtactcacaaaggctgcctttcctctagagtcactaattttacctgatgctatgagagaatcatattgaagatgaaatgtctaatatataatgtatattttaaagcagagactattttggtggataggtgggagggagcaaggggagtttgagggaatcagagcttgatgctactgtacagaactggacaggttgggccggcagtggtggggccagagggctctgtgctctaggagctaagccagcagcccccgagaggggacttggctgggcctttcctatgggcaaggcccagtgctcttcctgcccaccagggaccatggagcagtggcaccctatggggctatgatccctaggcctgggcctgggcctgcctatggcccagagctaccctgggagtgtcagtgctagcagcacagctacctctggtggcaggagaagagaggcccagcacagcagcaggccaggccttcctgtccaggtctgcatggagcactcggtgacccagagcagggactggaggcacccccagccctgccccaggccacagcaggacaggccgggacaggcctcacccaaggccaaggctggcatcagccaatcattcagagctgaggccctgggcctagcctgcccttctcaggtgccaataccaccccagccctgcccttggcctcactttttcccagcaataagtggggttcaccacccgcctcgggaatactttccccttctaaatgggacttgctgttacctcaggaggctccttagtgcaaatatgaccctggtcagggctttgccaccgttgaagccctgcagaaggtgcaatgtaggggttctggggccacagaggagaggccacttcccaccaggacccccaacatgaagtctaggcctcaggggctcccgcccttcttcctccagcagcgggaactgccactgctctcccaggccctgttctggaggctaaccttggttcctggagagtgtgcccctccaccctccctccagcagccctgatcacaccatgagagccaggaacgggtcaccctgctgaagatcactctgtgccctgggggaggagccaagccctcaccccacaaggggcaggtgggggcttggttgctgacccggcccaagtccccacagagcaccttctgtagctccagcttgtctccctggcttctctttgaaggagaaaaatgtaaaatatgcactgagaaagccagccccgcctgcttagtcagccccggcagcagggcagccatgggaactcaggaaaagcaggaaccctttccaaaagcccagagatgccctgggctcagatctgtaattctcccaggagctgtgatagagcaggccacacaaagtccctacgcctccctgctgcctcccccagatgcatgtggtggcatcaccattccccaaattgaatatcagcatgcggcctgaccagggactctttagatgcatgaatttatttatatgaaggctctcacagagacacacacagcacttcagtagcatttgcattcctggttaaagaatcaccaatatttaaaataaaaactttcctgaaattgggactgtcatgttatccagaagggctggtacatccgcccaccatgtccccctgctgggtcaggagccaacacaggaccctgcgtgtgagcgtgcctgacatctcacgcacggccactccagagccggtccctgtccttggaaagctgtgaagccttgcgttgagttccttctcgatactgacggctccgtgctgacattctgagctctggagtcacaccagcgcaggggcgtggaggaactgaggtttggaaggaatgccaggtctcgcacagcttggcctcgagaaggtgagaggaaggcaaaggccagggaggggacccagagaggcctggcacacaaggcccaagcaccaccgtcaacacagcccagtccatacagaaatgggtttcatgcctgaaaagctttttacagaaagatgccgcctgtagccagtgacagccgcaaccctacaggcctcagttccttgcagaggtgaggggtagagagtcagcctccctcccttccagcagcgacccagcttccctccacttccaggtggtgctgggctcaccgagggagcactggtgggtgctctgaaaacccacaggatcccacctccaggcccacctgggtcccatctcactctcttcttctttcaccaattgctaacatagaccttgttgggatcacgatggcttcacaagccagctgttgggtttgctatgtcactgtggctcagtcacatccctgcgtgtatactgtctgcggggcacatatgtatccatttagagctaaaggaatcagtgtacactacagctaatcctaataaatccgatgttttcggaatggc

SEQ ID NO: 155303 - DNA, 1414 bp, Homo sapiens
  Payload ID: 10531
  Gene Symbol: MGLL
  Gene Name: monoglyceride lipase
  ENST ID: ENST00000398101
  CDS Start-End: 500-1333
ggatcctgacttcagctgtttttagttgcttatcacccaggctttctaaaagtttcacttcttgttaaaaaatatagtatctcacatcctagagtaatgaacgtccatttttttaaagcaatttgcttttcctcatgcaatcttctttgttttttaaagtgatacttaacaataatttcagcagaagtgaaacttgggttgccaggtgtctgtacttttattaggtttgactgaccctgagctccaaacaatggaactagcactgtttgggaacttctgtaatctcacagaggacaacagatctaactgaatgttttcaagggaaaataaaaaggtctgttccatgttaaacctgggagcttttagcgtgaaggaactgagccgaaagatggtttaacgcttgcactctaagagagccaggattctaactgaaggtgcagaccagctgccccatctctttgcagagctgaacaggagaaaatccttgtaagtgggagagatgcagactagattcagaaggatcttcccctggaaggatgcgagcaccaagagaatgccagaatttatacatttttctcctctgaaaccatacaaagggagggaatgggagaaggcggggagcgagcacgtgctggaaacccaccttttgccagttggccacggacagagcgaaggggagaggatggtagtgtctgacttccacgttttcgtcagggatgtgttgcagcatgtggattccatgcagaaagactaccctgggcttcctgtcttccttctgggccactccatgggaggcgccatcgccatcctcacggccgcagagaggccgggccacttcgccggcatggtactcatttcgcctctggttcttgccaatcctgaatctgcaacaactttcaaggtccttgctgcgaaagtgctcaaccttgtgctgccaaacttgtccctcgggcccatcgactccagcgtgctctctcggaataagacagaggtcgacatttataactcagaccccctgatctgccgggcagggctgaaggtgtgcttcggcatccaactgctgaatgccgtctcacgggtggagcgcgccctccccaagctgactgtgcccttcctgctgctccagggctctgccgatcgcctatgtgacagcaaaggggcctacctgctcatggagttagccaagagccaggacaagactctcaagatttatgaaggtgcctaccatgttctccacaaggagcttcctgaagtcaccaactccgtcttccatgaaataaacatgtgggtctctcaaaggacagccacggcaggaactgcgtccccaccctgaatgcattggccggtgcccggctcatggtctgggggatgcaggcaggggaagggcagagatggcttctcagatatggcttgc

SEQ ID NO: 155304 - DNA, 4235 bp, Homo sapiens
  Payload ID: 10531
  Gene Symbol: MGLL
  Gene Name: monoglyceride lipase
  Uniprot ID: Q99685
  ENST ID: ENST00000398104
  CDS Start-End: 188-1099
acctcgggccgcccccgccgccgagccggcccagggataaagtggcggcgcagacgccgcaccctgtcgccgcgaagccggtcgcgcgcagctcgtcccggccctggcccgccgcaaacgaggatccgctgcgctcggggaacgcgacagcggcgctcgtggccccggacctgaagacccttccagcatgccagaggaaagttcccccaggcggaccccgcagagcattccctaccaggacctccctcacctggtcaatgcagacggacagtacctcttctgcaggtactggaaacccacaggcacacccaaggccctcatctttgtgtcccatggagccggagagcacagtggccgctatgaagagctggctcggatgctgatggggctggacctgctggtgttcgcccacgaccatgttggccacggacagagcgaaggggagaggatggtagtgtctgacttccacgttttcgtcagggatgtgttgcagcatgtggattccatgcagaaagactaccctgggcttcctgtcttccttctgggccactccatgggaggcgccatcgccatcctcacggccgcagagaggccgggccacttcgccggcatggtactcatttcgcctctggttcttgccaatcctgaatctgcaacaactttcaaggtccttgctgcgaaagtgctcaaccttgtgctgccaaacttgtccctcgggcccatcgactccagcgtgctctctcggaataagacagaggtcgacatttataactcagaccccctgatctgccgggcagggctgaaggtgtgcttcggcatccaactgctgaatgccgtctcacgggtggagcgcgccctccccaagctgactgtgcccttcctgctgctccagggctctgccgatcgcctatgtgacagcaaaggggcctacctgctcatggagttagccaagagccaggacaagactctcaagatttatgaaggtgcctaccatgttctccacaaggagcttcctgaagtcaccaactccgtcttccatgaaataaacatgtgggtctctcaaaggacagccacggcaggaactgcgtccccaccctgaatgcattggccggtgcccggctcatggtctgggggatgcaggcaggggaagggcagagatggcttctcagatatggcttgccaaaaaaaaaaaaaaaaaaaaatcagaaattggagaaatccttagcacaattttctaaaaaataacagacatttttgttatacattagactatcagacactggacctaccttaatggttagacactttatgcaaaaaaagagaaaggtcccaggtgattttccacaaagaatgtgctaaaatgtccactgaaaacaaagccaagcctctgccctgcctctcccagctcccacaagggttccaggaattcctggtgttcccaggacaccagactgcaataactggaggcgcctccttcctgcccacccttcgctcacgccccagcgccctctctgaccagcctccgcttggtggccttcctctggccgtgtgatgaggtggttgctgtctccataggggccagctccccagggcagactcacgtgcccctctgaggctcagaaaatgcccagcccttcctcaaaatgagcagccacccatgactttgtgggctccttgttagcctgagaccaggctttgcagaggggcggggggtgaggcttagcccagaaggagaactgagcaggaaaccaaggctcttctctgtcccctgcccttcccctcctgccagggggaggctcaggttggtccccgagtgccgcctgtactcacaaaggctgcctttcctctagagtcactaattttacctgatgctatgagagaatcatattgaagatgaaatgtctaatatataatgtatattttaaagcagagactattttggtggataggtgggagggagcaaggggagtttgagggaatcagagcttgatgctactgtacagaactggacaggttgggccggcagtggtggggccagagggctctgtgctctaggagctaagccagcagcccccgagaggggacttggctgggcctttcctatgggcaaggcccagtgctcttcctgcccaccagggaccatggagcagtggcaccctatggggctatgatccctaggcctgggcctgggcctgcctatggcccagagctaccctgggagtgtcagtgctagcagcacagctacctctggtggcaggagaagagaggcccagcacagcagcaggccaggccttcctgtccaggtctgcatggagcactcggtgacccagagcagggactggaggcacccccagccctgccccaggccacagcaggacaggccgggacaggcctcacccaaggccaaggctggcatcagccaatcattcagagctgaggccctgggcctagcctgcccttctcaggtgccaataccaccccagccctgcccttggcctcactttttcccagcaataagtggggttcaccacccgcctcgggaatactttccccttctaaatgggacttgctgttacctcaggaggctccttagtgcaaatatgaccctggtcagggctttgccaccgttgaagccctgcagaaggtgcaatgtaggggttctggggccacagaggagaggccacttcccaccaggacccccaacatgaagtctaggcctcaggggctcccgcccttcttcctccagcagcgggaactgccactgctctcccaggccctgttctggaggctaaccttggttcctggagagtgtgcccctccaccctccctccagcagccctgatcacaccatgagagccaggaacgggtcaccctgctgaagatcactctgtgccctgggggaggagccaagccctcaccccacaaggggcaggtgggggcttggttgctgacccggcccaagtccccacagagcaccttctgtagctccagcttgtctccctggcttctctttgaaggagaaaaatgtaaaatatgcactgagaaagccagccccgcctgcttagtcagccccggcagcagggcagccatgggaactcaggaaaagcaggaaccctttccaaaagcccagagatgccctgggctcagatctgtaattctcccaggagctgtgatagagcaggccacacaaagtccctacgcctccctgctgcctcccccagatgcatgtggtggcatcaccattccccaaattgaatatcagcatgcggcctgaccagggactctttagatgcatgaatttatttatatgaaggctctcacagagacacacacagcacttcagtagcatttgcattcctggttaaagaatcaccaatatttaaaataaaaactttcctgaaattgggactgtcatgttatccagaagggctggtacatccgcccaccatgtccccctgctgggtcaggagccaacacaggaccctgcgtgtgagcgtgcctgacatctcacgcacggccactccagagccggtccctgtccttggaaagctgtgaagccttgcgttgagttccttctcgatactgacggctccgtgctgacattctgagctctggagtcacaccagcgcaggggcgtggaggaactgaggtttggaaggaatgccaggtctcgcacagcttggcctcgagaaggtgagaggaaggcaaaggccagggaggggacccagagaggcctggcacacaaggcccaagcaccaccgtcaacacagcccagtccatacagaaatgggtttcatgcctgaaaagctttttacagaaagatgccgcctgtagccagtgacagccgcaaccctacaggcctcagttccttgcagaggtgaggggtagagagtcagcctccctcccttccagcagcgacccagcttccctccacttccaggtggtgctgggctcaccgagggagcactggtgggtgctctgaaaacccacaggatcccacctccaggcccacctgggtcccatctcactctcttcttctttcaccaattgctaacatagaccttgttgggatcacgatggcttcacaagccagctgttgggtttgctatgtcactgtggctcagtcacatccctgcgtgtatactgtctgcggggcacatatgtatccatttagagctaaaggaatcagtgtacactacagctaatcctaataaatccgatgttttcggaatggc

SEQ ID NO: 155305 - DNA, 4941 bp, Homo sapiens
  Payload ID: 10531
  Gene Symbol: MGLL
  Gene Name: monoglyceride lipase
  Uniprot ID: Q99685
  ENST ID: ENST00000434178
  CDS Start-End: 898-1809
gtcgccgcgaagccggtcgcgcgcagctcgtcccggccctggcccgccgcaaacgaggatccgctgcgctcggggaacgcgacagcggcgctcgtggccccggtaactgcctcccggcccctgccccagcccgccagtgccgccgtcaggggtggggagcagcactggggtcccggacacgcccggcgtgggctcccgctacccatgtgtgcgtgtgtgtgtgtgcacggtgtgtgtgcgcgcgtgtccgagtgtgcgcgcgtgtgcgcgcgcgcgcgccctccctgctccttcgcaccagcccccaaaccaacttgtccccatcaactccatctttctagtccccaccttccccggtgcagacacccggcgaagcccacccggttttcccagcggcatttccgatgacagcttcggggctacgtgtcctgtgctgtcggagacgcacaggaagcaaagtttgtgagaagccttgggggcgactttgccttgggcacccgcatttgtgcgtctgcgaggtgcctcggtgtgcgcggagctagtttcccagtttcccgggcccctcccttctccgagcccctctagcgatttgtttaggaaaagtgatgacatgaactagtagtggagaatcgcagcgccgctccccgccctggggagggaggggagccccggagagcctgccggtgggagctggaagcaggctcccggctgagcgccccagcccgaaaggcagggtctgggtgcgggaagagggctcggagctgccttcctgctgccttggggccgcccagatgagggaacagcccgatttgcctggttctgattctccaggctgtcgtggttgtggaatgcaaacgccagcacataatggaaacaggacctgaagacccttccagcatgccagaggaaagttcccccaggcggaccccgcagagcattccctaccaggacctccctcacctggtcaatgcagacggacagtacctcttctgcaggtactggaaacccacaggcacacccaaggccctcatctttgtgtcccatggagccggagagcacagtggccgctatgaagagctggctcggatgctgatggggctggacctgctggtgttcgcccacgaccatgttggccacggacagagcgaaggggagaggatggtagtgtctgacttccacgttttcgtcagggatgtgttgcagcatgtggattccatgcagaaagactaccctgggcttcctgtcttccttctgggccactccatgggaggcgccatcgccatcctcacggccgcagagaggccgggccacttcgccggcatggtactcatttcgcctctggttcttgccaatcctgaatctgcaacaactttcaaggtccttgctgcgaaagtgctcaaccttgtgctgccaaacttgtccctcgggcccatcgactccagcgtgctctctcggaataagacagaggtcgacatttataactcagaccccctgatctgccgggcagggctgaaggtgtgcttcggcatccaactgctgaatgccgtctcacgggtggagcgcgccctccccaagctgactgtgcccttcctgctgctccagggctctgccgatcgcctatgtgacagcaaaggggcctacctgctcatggagttagccaagagccaggacaagactctcaagatttatgaaggtgcctaccatgttctccacaaggagcttcctgaagtcaccaactccgtcttccatgaaataaacatgtgggtctctcaaaggacagccacggcaggaactgcgtccccaccctgaatgcattggccggtgcccggctcatggtctgggggatgcaggcaggggaagggcagagatggcttctcagatatggcttgccaaaaaaaaaaaaaaaaaaaaatcagaaattggagaaatccttagcacaattttctaaaaaataacagacatttttgttatacattagactatcagacactggacctaccttaatggttagacactttatgcaaaaaaagagaaaggtcccaggtgattttccacaaagaatgtgctaaaatgtccactgaaaacaaagccaagcctctgccctgcctctcccagctcccacaagggttccaggaattcctggtgttcccaggacaccagactgcaataactggaggcgcctccttcctgcccacccttcgctcacgccccagcgccctctctgaccagcctccgcttggtggccttcctctggccgtgtgatgaggtggttgctgtctccataggggccagctccccagggcagactcacgtgcccctctgaggctcagaaaatgcccagcccttcctcaaaatgagcagccacccatgactttgtgggctccttgttagcctgagaccaggctttgcagaggggcggggggtgaggcttagcccagaaggagaactgagcaggaaaccaaggctcttctctgtcccctgcccttcccctcctgccagggggaggctcaggttggtccccgagtgccgcctgtactcacaaaggctgcctttcctctagagtcactaattttacctgatgctatgagagaatcatattgaagatgaaatgtctaatatataatgtatattttaaagcagagactattttggtggataggtgggagggagcaaggggagtttgagggaatcagagcttgatgctactgtacagaactggacaggttgggccggcagtggtggggccagagggctctgtgctctaggagctaagccagcagcccccgagaggggacttggctgggcctttcctatgggcaaggcccagtgctcttcctgcccaccagggaccatggagcagtggcaccctatggggctatgatccctaggcctgggcctgggcctgcctatggcccagagctaccctgggagtgtcagtgctagcagcacagctacctctggtggcaggagaagagaggcccagcacagcagcaggccaggccttcctgtccaggtctgcatggagcactcggtgacccagagcagggactggaggcacccccagccctgccccaggccacagcaggacaggccgggacaggcctcacccaaggccaaggctggcatcagccaatcattcagagctgaggccctgggcctagcctgcccttctcaggtgccaataccaccccagccctgcccttggcctcactttttcccagcaataagtggggttcaccacccgcctcgggaatactttccccttctaaatgggacttgctgttacctcaggaggctccttagtgcaaatatgaccctggtcagggctttgccaccgttgaagccctgcagaaggtgcaatgtaggggttctggggccacagaggagaggccacttcccaccaggacccccaacatgaagtctaggcctcaggggctcccgcccttcttcctccagcagcgggaactgccactgctctcccaggccctgttctggaggctaaccttggttcctggagagtgtgcccctccaccctccctccagcagccctgatcacaccatgagagccaggaacgggtcaccctgctgaagatcactctgtgccctgggggaggagccaagccctcaccccacaaggggcaggtgggggcttggttgctgacccggcccaagtccccacagagcaccttctgtagctccagcttgtctccctggcttctctttgaaggagaaaaatgtaaaatatgcactgagaaagccagccccgcctgcttagtcagccccggcagcagggcagccatgggaactcaggaaaagcaggaaccctttccaaaagcccagagatgccctgggctcagatctgtaattctcccaggagctgtgatagagcaggccacacaaagtccctacgcctccctgctgcctcccccagatgcatgtggtggcatcaccattccccaaattgaatatcagcatgcggcctgaccagggactctttagatgcatgaatttatttatatgaaggctctcacagagacacacacagcacttcagtagcatttgcattcctggttaaagaatcaccaatatttaaaataaaaactttcctgaaattgggactgtcatgttatccagaagggctggtacatccgcccaccatgtccccctgctgggtcaggagccaacacaggaccctgcgtgtgagcgtgcctgacatctcacgcacggccactccagagccggtccctgtccttggaaagctgtgaagccttgcgttgagttccttctcgatactgacggctccgtgctgacattctgagctctggagtcacaccagcgcaggggcgtggaggaactgaggtttggaaggaatgccaggtctcgcacagcttggcctcgagaaggtgagaggaaggcaaaggccagggaggggacccagagaggcctggcacacaaggcccaagcaccaccgtcaacacagcccagtccatacagaaatgggtttcatgcctgaaaagctttttacagaaagatgccgcctgtagccagtgacagccgcaaccctacaggcctcagttccttgcagaggtgaggggtagagagtcagcctccctcccttccagcagcgacccagcttccctccacttccaggtggtgctgggctcaccgagggagcactggtgggtgctctgaaaacccacaggatcccacctccaggcccacctgggtcccatctcactctcttcttctttcaccaattgctaacatagaccttgttgggatcacgatggcttcacaagccagctgttgggtttgctatgtcactgtggctcagtcacatccctgcgtgtatactgtctgcggggcacatatgtatccatttagagctaaaggaatcagtgtacactacagctaatcctaataaatccgatgttttcggaa

SEQ ID NO: 155306 - DNA, 4552 bp, Homo sapiens
  Payload ID: 10531
  Gene Symbol: MGLL
  Gene Name: monoglyceride lipase
  Uniprot ID: Q99685
  ENST ID: ENST00000453507
  CDS Start-End: 565-1416
cccaaaccaacttgtccccatcaactccatctttctagtccccaccttccccggtgcagacacccggcgaagcccacccggttttcccagcggcatttccgatgacagcttcggggctacgtgtcctgtgctgtcggagacgcacaggaagcaaagtttgtgagaagccttgggggcgactttgccttgggcacccgcatttgtgcgtctgcgaggtgcctcggtgtgcgcggagctagtttcccagtttcccgggcccctcccttctccgagcccctctagcgatttgtttaggaaaagtgatgacatgaactagtagtggagaatcgcagcgccgctccccgccctggggagggaggggagccccggagagcctgccggtgggagctggaagcaggctcccggctgagcgccccagcccgaaaggcagggtctgggtgcgggaagagggctcggagctgccttcctgctgccttggggccgcccagatgagggaacagcccgatttgcctggttctgattctccaggctgtcgtggttgtggaatgcaaacgccagcacataatggaaacaggacctgaagacccttccagcatgccagaggaaagttcccccaggcggaccccgcagagcattccctaccaggacctccctcacctggtcaatgcagacggacagtacctcttctgcaggtactggaaacccacaggcacacccaaggccctcatctttgtgtcccatggagccggagagcacagtggccgctatgaagagctggctcggatgctgatggggctggacctgctggtgttcgcccacgaccatgttggccacggacagagcgaaggggagaggatggtagtgtctgacttccacgttttcgtcagggatgtgttgcagcatgtggattccatgcagaaagactaccctgggcttcctgtcttccttctgggccactccatgggaggcgccatcgccatcctcacggccgcagagaggccgggccacttcgccggcatggtactcatttcgcctctggttcttgccaatcctgaatctgcaacaactttcaaggtcgacatttataactcagaccccctgatctgccgggcagggctgaaggtgtgcttcggcatccaactgctgaatgccgtctcacgggtggagcgcgccctccccaagctgactgtgcccttcctgctgctccagggctctgccgatcgcctatgtgacagcaaaggggcctacctgctcatggagttagccaagagccaggacaagactctcaagatttatgaaggtgcctaccatgttctccacaaggagcttcctgaagtcaccaactccgtcttccatgaaataaacatgtgggtctctcaaaggacagccacggcaggaactgcgtccccaccctgaatgcattggccggtgcccggctcatggtctgggggatgcaggcaggggaagggcagagatggcttctcagatatggcttgccaaaaaaaaaaaaaaaaaaaaatcagaaattggagaaatccttagcacaattttctaaaaaataacagacatttttgttatacattagactatcagacactggacctaccttaatggttagacactttatgcaaaaaaagagaaaggtcccaggtgattttccacaaagaatgtgctaaaatgtccactgaaaacaaagccaagcctctgccctgcctctcccagctcccacaagggttccaggaattcctggtgttcccaggacaccagactgcaataactggaggcgcctccttcctgcccacccttcgctcacgccccagcgccctctctgaccagcctccgcttggtggccttcctctggccgtgtgatgaggtggttgctgtctccataggggccagctccccagggcagactcacgtgcccctctgaggctcagaaaatgcccagcccttcctcaaaatgagcagccacccatgactttgtgggctccttgttagcctgagaccaggctttgcagaggggcggggggtgaggcttagcccagaaggagaactgagcaggaaaccaaggctcttctctgtcccctgcccttcccctcctgccagggggaggctcaggttggtccccgagtgccgcctgtactcacaaaggctgcctttcctctagagtcactaattttacctgatgctatgagagaatcatattgaagatgaaatgtctaatatataatgtatattttaaagcagagactattttggtggataggtgggagggagcaaggggagtttgagggaatcagagcttgatgctactgtacagaactggacaggttgggccggcagtggtggggccagagggctctgtgctctaggagctaagccagcagcccccgagaggggacttggctgggcctttcctatgggcaaggcccagtgctcttcctgcccaccagggaccatggagcagtggcaccctatggggctatgatccctaggcctgggcctgggcctgcctatggcccagagctaccctgggagtgtcagtgctagcagcacagctacctctggtggcaggagaagagaggcccagcacagcagcaggccaggccttcctgtccaggtctgcatggagcactcggtgacccagagcagggactggaggcacccccagccctgccccaggccacagcaggacaggccgggacaggcctcacccaaggccaaggctggcatcagccaatcattcagagctgaggccctgggcctagcctgcccttctcaggtgccaataccaccccagccctgcccttggcctcactttttcccagcaataagtggggttcaccacccgcctcgggaatactttccccttctaaatgggacttgctgttacctcaggaggctccttagtgcaaatatgaccctggtcagggctttgccaccgttgaagccctgcagaaggtgcaatgtaggggttctggggccacagaggagaggccacttcccaccaggacccccaacatgaagtctaggcctcaggggctcccgcccttcttcctccagcagcgggaactgccactgctctcccaggccctgttctggaggctaaccttggttcctggagagtgtgcccctccaccctccctccagcagccctgatcacaccatgagagccaggaacgggtcaccctgctgaagatcactctgtgccctgggggaggagccaagccctcaccccacaaggggcaggtgggggcttggttgctgacccggcccaagtccccacagagcaccttctgtagctccagcttgtctccctggcttctctttgaaggagaaaaatgtaaaatatgcactgagaaagccagccccgcctgcttagtcagccccggcagcagggcagccatgggaactcaggaaaagcaggaaccctttccaaaagcccagagatgccctgggctcagatctgtaattctcccaggagctgtgatagagcaggccacacaaagtccctacgcctccctgctgcctcccccagatgcatgtggtggcatcaccattccccaaattgaatatcagcatgcggcctgaccagggactctttagatgcatgaatttatttatatgaaggctctcacagagacacacacagcacttcagtagcatttgcattcctggttaaagaatcaccaatatttaaaataaaaactttcctgaaattgggactgtcatgttatccagaagggctggtacatccgcccaccatgtccccctgctgggtcaggagccaacacaggaccctgcgtgtgagcgtgcctgacatctcacgcacggccactccagagccggtccctgtccttggaaagctgtgaagccttgcgttgagttccttctcgatactgacggctccgtgctgacattctgagctctggagtcacaccagcgcaggggcgtggaggaactgaggtttggaaggaatgccaggtctcgcacagcttggcctcgagaaggtgagaggaaggcaaaggccagggaggggacccagagaggcctggcacacaaggcccaagcaccaccgtcaacacagcccagtccatacagaaatgggtttcatgcctgaaaagctttttacagaaagatgccgcctgtagccagtgacagccgcaaccctacaggcctcagttccttgcagaggtgaggggtagagagtcagcctccctcccttccagcagcgacccagcttccctccacttccaggtggtgctgggctcaccgagggagcactggtgggtgctctgaaaacccacaggatcccacctccaggcccacctgggtcccatctcactctcttcttctttcaccaattgctaacatagaccttgttgggatcacgatggcttcacaagccagctgttgggtttgctatgtcactgtggctcagtcacatccctgcgtgtatactgtctgcggggcacatatgtatccatttagagctaaaggaatcagtgtacactacagctaatcctaataaatccgatgttttcggaatggc

SEQ ID NO: 155307 - DNA, 716 bp, Homo sapiens
  Payload ID: 10531
  Gene Symbol: MGLL
  Gene Name: monoglyceride lipase
  ENST ID: ENST00000496306
  CDS Start-End: 1-629
cattacagggaggcgccatcgccatcctcacggccgcagagaggccgggccacttcgccggcatggtactcatttcgcctctggttcttgccaatcctgaatctgcaacaactttcaaggactattcgaggattttgaaacacttgatggaaaaggcatcaagaatgttaaagttttggattccacgtcctttttgggtccttgctgcgaaagtgctcaaccttgtgctgccaaacttgtccctcgggcccatcgactccagcgtgctctctcggaataagacagaggtcgacatttataactcagaccccctgatctgccgggcagggctgaaggtgtgcttcggcatccaactgctgaatgccgtctcacgggtggagcgcgccctccccaagctgactgtgcccttcctgctgctccagggctctgccgatcgcctatgtgacagcaaaggggcctacctgctcatggagttagccaagagccaggacaagactctcaagatttatgaaggtgcctaccatgttctccacaaggagcttcctgaagtcaccaactccgtcttccatgaaataaacatgtgggtctctcaaaggacagccacggcaggaactgcgtccccaccctgaatgcattggccggtgcccggctcatggtctgggggatgcaggcaggggaagggcagagatggcttctcagatatggcttgccaaaaa

SEQ ID NO: 155308 - DNA, 410 bp, Homo sapiens
  Payload ID: 10531
  Gene Symbol: MGLL
  Gene Name: monoglyceride lipase
  ENST ID: ENST00000494830
  CDS Start-End: 179-410
acagctaaaatagtctttaagatgaagtttcctgaaatgatttaaaataaacacagatgggaagggggaaaaactgtaatgaggcacttaaaaaataaagtgagcattttcttaagaacaaatgggatttttcagtcttggagaggtttgcaagaaatgacctgaagacccttccagcatgccagaggaaagttcccccaggcggaccccgcagagcattccctaccaggacctccctcacctggtcaatgcagacggacagtacctcttctgcaggtactggaaacccacaggcacacccaaggccctcatctttgtgtcccatggagccggagagcacagtggccgctatgaagagctggctcggatgctgatggggctggacctgctggtgttcgcccacgaccatg

SEQ ID NO: 155309 - DNA, 556 bp, Homo sapiens
  Payload ID: 10531
  Gene Symbol: MGLL
  Gene Name: monoglyceride lipase
  ENST ID: ENST00000493611
  CDS Start-End: 289-556
tgatccagctcaacgacctgtctgtctgcattaacagtagcctgaattatgacagtagtggctgtgctcccaaagggggttaaagtacttgagctatcccttctggaagcacagccccttttgaagacagaagatgctgactaattagcagttccagccgtgctcctcagtagccaagggaaatgcaggaaagaaatcccatcagccaatcccagaaatatcagggccctcatctttgtgtcccatggagccggagagcacagtggccgctatgaagagctggctcggatgctgatggggctggacctgctggtgttcgcccacgaccatgttggccacggacagagcgaaggggagaggatggtagtgtctgacttccacgttttcgtcagggatgtgttgcagcatgtggattccatgcagaaagactaccctgggcttcctgtcttccttctgggccactccatgggaggcgccatcgccatcctcacggccgcagagaggccgggccacttcgccggcatggtactcatttcgcctctggttcttgccaatc

SEQ ID NO: 155310 - DNA, 653 bp, Homo sapiens
  Payload ID: 10531
  Gene Symbol: MGLL
  Gene Name: monoglyceride lipase
  ENST ID: ENST00000484451
  CDS Start-End: 1-594
ccagttggccacggacagagcgaaggggagaggatggtagtgtctgacttccacgttttcgtcagggatgtgttgcagcatgtggattccatgcagaaagactaccctgggcttcctgtcttccttctgggccactccatgggaggcgccatcgccatcctcacggccgcagagaggccgggccacttcgccggcatggtactcatttcgcctctggttcttgccaatcctgaatctgcaacaactttcaaggtcgacatttataactcagaccccctgatctgccgggcagggctgaaggtgtgcttcggcatccaactgctgaatgccgtctcacgggtggagcgcgccctccccaagctgactgtgcccttcctgctgctccagggctctgccgatcgcctatgtgacagcaaaggggcctacctgctcatggagttagccaagagccaggacaagactctcaagatttatgaaggtgcctaccatgttctccacaaggagcttcctgaagtcaccaactccgtcttccatgaaataaacatgtgggtctctcaaaggacagccacggcaggaactgcgtccccaccctgaatgcattggccggtgcccggctcatggtctgggggatgcaggcaggggaagggcagaga

SEQ ID NO: 155311 - DNA, 549 bp, Homo sapiens
  Payload ID: 10531
  Gene Symbol: MGLL
  Gene Name: monoglyceride lipase
  ENST ID: ENST00000487473
  CDS Start-End: 1-468
ccagttggccacggacagagcgaaggggagaggatggtagtgtctgacttccacgttttcgtcagggatgtgttgcagcatgtggattccatgcagaaagactaccctgggcttcctgtcttccttctgggccactccatgggaggcgccatcgccatcctcacggccgcagagaggccgggccacttcgccggcatggtactcatttcgcctctggttcttgccaatcctgaatctgcaacaactttcaaggtccttgctgcgaaagtgctcaaccttgtgctgccaaacttgtccctcgggcccatcgactccagcgtgctctctcggaataagacagagatttatgaaggtgcctaccatgttctccacaaggagcttcctgaagtcaccaactccgtcttccatgaaataaacatgtgggtctctcaaaggacagccacggcaggaactgcgtccccaccctgaatgcattggccggtgcccggctcatggtctgggggatgcaggcaggggaagggcagagatggcttctcagatatggcttgc

SEQ ID NO: 155312 - DNA, 2950 bp, Homo sapiens
  Payload ID: 10532
  Gene Symbol: MOXD1
  Gene Name: monooxygenase, DBH-like 1
  Uniprot ID: Q6UVY6
  ENST ID: ENST00000336749
  CDS Start-End: 229-1866
tttccaaggaaggaaaggcacacaatggtatcaaatgttcattcattccatctcttgatgctctacgatattatcagtctacactatgctttcctgaaaggccagaagttcaaagatggactagtttcccagggacctgattccccagttggaatactccagccccttggaaattcccgggatttataaaataactctagacaacaagactttgtctttaaaggtcctatgaattcttttctctctgtatttaggtatcctgatttttcttttccatattttccacaggattattttacaaatgcaaatagagagttgaaaaaagatgctcagcaagattaccatctagaatatgccatggaaaatagcacacacacaataattgaatttaccagagagctgcatacatgtgacataaatgacaagagtataacggatagcactgtgagagtgatctgggcctaccaccatgaagatgcaggagaagctggtcccaagtaccatgactccaataggggcaccaagagtttgcggttattgaatcctgagaaaactagtgtgctatctacagccttaccatactttgatctggtaaatcaggacgtccccatcccaaacaaagatacaacatattggtgccaaatgtttaagattcctgtgttccaagaaaagcatcatgtaataaaggttgagccagtgatacagagaggccatgagagtctggtgcaccacatcctgctctatcagtgcagcaacaactttaacgacagcgttctggagtccggccacgagtgctatcaccccaacatgcccgatgcattcctcacctgtgaaactgtgatttttgcctgggctattggtggagagggcttttcttatccacctcatgttggattatcccttggcactccattagatccgcattatgtgctcctagaagtccattatgataatcccacttatgaggaaggcttaatagataattctggactgaggttattttacacaatggatataaggaaatatgatgctggggtgattgaggctggcctctgggtgagcctcttccataccatccctccagggatgcctgagttccagtctgagggtcactgcactttggagtgcctggaagaggctctggaagccgaaaagccaagtggaattcatgtgtttgctgttcttctccatgctcacctggctggcagaggcatcaggctgcgtcattttcgaaaagggaaggaaatgaaattacttgcctatgatgatgattttgacttcaatttccaggagtttcagtatctaaaggaagaacaaacaatcttaccaggagataacctaattactgagtgtcgctacaacacgaaagatagagctgagatgacttggggaggactaagcaccaggagtgaaatgtgtctctcataccttctttattacccaagaattaatcttactcgatgtgcaagtattccagacattatggaacaacttcagttcattggggttaaggagatctacagaccagtcacgacctggcctttcattatcaaaagtcccaagcaatataaaaacctttctttcatggatgctatgaataagtttaaatggactaaaaaggaaggtctctccttcaacaagctggtcctcagcctgccagtgaatgtgagatgttccaagacagacaatgctgagtggtcgattcaaggaatgacagcattacctccagatatagaaagaccctataaagcagaacctttggtgtgtggcacgtcttcttcctcttccctgcacagagatttctccatcaacttgcttgtttgccttctgctactcagctgcacgctgagcaccaagagcttgtgatcaaaattctgttggacttgacaatgttttctatgatctgaacctgtcatttgaagtacaggttaaagactgtgtccactttgggcatgaagagtgtggagacttttcttccccattttccctccctcctttttcctttccatgttacatgagagacatcaatcaggttctcttctctttcttagaaatatctgatgttatatatacatggtcaataaaataaaactggcctgacttaagataaccattttaaaaaattgggctgtcatgtgggaataaaagaattctttctttcctactacattctgttttatttaaatactcattgttgctatttcactttttgacttgacttttatatttctttaaaaaattccttccttttaaaaaatataaaagggactactgttcattccagttttcttcttctttgttgttcttctagtgtgacttttcaagtgtaacagccattcttcctgactttaatattgtccagttctggtcttttctgtgaattaccactgggccccttacctcaatgctttttgttgatgcccactctggttcccttgtttatctgagtctgttggtaccccaaatgaccccacacccatcttaaagtactttttttcaccttccctgtttagtactggccagatgagttttttctagagctctgtcactatctgaaaagaaagaggctatgggaaacatagaaatggtatgtattaataactgatcataggctgaggagaaaaaatgtagctggctgcaaacccagtgctgtgaggtgacttatatgaggttccagatcaaagacaggccgtgtgagccagtccaggagggtgtaagttctgaatggttccttgctgactttgggtgacacatgtaccacatactggctcagtttaagtcatggttctattgtagatttatttttatattagttaataaatgactttaaattgtcaccaattgaaaatcttgtcactcttttggttttctttatatagctcagccaaatcttgttttatgtcctgtcctcatctcttaagctaaatctgtttggatcatattaataaac

SEQ ID NO: 155313 - DNA, 3059 bp, Homo sapiens
  Payload ID: 10532
  Gene Symbol: MOXD1
  Gene Name: monooxygenase, DBH-like 1
  Uniprot ID: Q6UVY6
  ENST ID: ENST00000367963
  CDS Start-End: 120-1961
gcgcggccggcccgaggggcggtccctgggctcccgctcgccgccgctgccgctcctcgttctgctcctcactccccagcggctggaggccggtaccggcgggcaggaggcgcccgaggatgtgctgctggccgctgctcctgctgtgggggctgctccccgggacggcggcggggggctcgggccgaacctatccgcaccggaccctcctggactcggagggcaagtactggctgggctggagccagcggggcagccagatcgccttccgcctccaggtgcgcactgcaggctacgtgggcttcggcttctcgcccaccggggccatggcgtccgccgacatcgtcgtgggcggggtggcccacgggcggccctacctccaggattattttacaaatgcaaatagagagttgaaaaaagatgctcagcaagattaccatctagaatatgccatggaaaatagcacacacacaataattgaatttaccagagagctgcatacatgtgacataaatgacaagagtataacggatagcactgtgagagtgatctgggcctaccaccatgaagatgcaggagaagctggtcccaagtaccatgactccaataggggcaccaagagtttgcggttattgaatcctgagaaaactagtgtgctatctacagccttaccatactttgatctggtaaatcaggacgtccccatcccaaacaaagatacaacatattggtgccaaatgtttaagattcctgtgttccaagaaaagcatcatgtaataaaggttgagccagtgatacagagaggccatgagagtctggtgcaccacatcctgctctatcagtgcagcaacaactttaacgacagcgttctggagtccggccacgagtgctatcaccccaacatgcccgatgcattcctcacctgtgaaactgtgatttttgcctgggctattggtggagagggcttttcttatccacctcatgttggattatcccttggcactccattagatccgcattatgtgctcctagaagtccattatgataatcccacttatgaggaaggcttaatagataattctggactgaggttattttacacaatggatataaggaaatatgatgctggggtgattgaggctggcctctgggtgagcctcttccataccatccctccagggatgcctgagttccagtctgagggtcactgcactttggagtgcctggaagaggctctggaagccgaaaagccaagtggaattcatgtgtttgctgttcttctccatgctcacctggctggcagaggcatcaggctgcgtcattttcgaaaagggaaggaaatgaaattacttgcctatgatgatgattttgacttcaatttccaggagtttcagtatctaaaggaagaacaaacaatcttaccaggagataacctaattactgagtgtcgctacaacacgaaagatagagctgagatgacttggggaggactaagcaccaggagtgaaatgtgtctctcataccttctttattacccaagaattaatcttactcgatgtgcaagtattccagacattatggaacaacttcagttcattggggttaaggagatctacagaccagtcacgacctggcctttcattatcaaaagtcccaagcaatataaaaacctttctttcatggatgctatgaataagtttaaatggactaaaaaggaaggtctctccttcaacaagctggtcctcagcctgccagtgaatgtgagatgttccaagacagacaatgctgagtggtcgattcaaggaatgacagcattacctccagatatagaaagaccctataaagcagaacctttggtgtgtggcacgtcttcttcctcttccctgcacagagatttctccatcaacttgcttgtttgccttctgctactcagctgcacgctgagcaccaagagcttgtgatcaaaattctgttggacttgacaatgttttctatgatctgaacctgtcatttgaagtacaggttaaagactgtgtccactttgggcatgaagagtgtggagacttttcttccccattttccctccctcctttttcctttccatgttacatgagagacatcaatcaggttctcttctctttcttagaaatatctgatgttatatatacatggtcaataaaataaaactggcctgacttaagataaccattttaaaaaattgggctgtcatgtgggaataaaagaattctttctttcctactacattctgttttatttaaatactcattgttgctatttcactttttgacttgacttttatatttctttaaaaaattccttccttttaaaaaatataaaagggactactgttcattccagttttcttcttctttgttgttcttctagtgtgacttttcaagtgtaacagccattcttcctgactttaatattgtccagttctggtcttttctgtgaattaccactgggccccttacctcaatgctttttgttgatgcccactctggttcccttgtttatctgagtctgttggtaccccaaatgaccccacacccatcttaaagtactttttttcaccttccctgtttagtactggccagatgagttttttctagagctctgtcactatctgaaaagaaagaggctatgggaaacatagaaatggtatgtattaataactgatcataggctgaggagaaaaaatgtagctggctgcaaacccagtgctgtgaggtgacttatatgaggttccagatcaaagacaggccgtgtgagccagtccaggagggtgtaagttctgaatggttccttgctgactttgggtgacacatgtaccacatactggctcagtttaagtcatggttctattgtagatttatttttatattagttaataaatgactttaaattgtcaccaattgaaaatcttgtcactcttttggttttctttatatagctcagccaaatcttgttttatgtcctgtcctcatctcttaagctaaatctgtttggatcatattaataaactaaatgaaattaca

SEQ ID NO: 155314 - DNA, 2191 bp, Homo sapiens
  Payload ID: 10532
  Gene Symbol: MOXD1
  Gene Name: monooxygenase, DBH-like 1
  ENST ID: ENST00000392401
  CDS Start-End: 50-397
actccccagcggctggaggccggtaccggcgggcaggaggcgcccgaggatgtgctgctggccgctgctcctgctgtgggggctgctccccgggacggcggcggggggctcgggccgaacctatccgcaccggaccctcctggactcggagggcaagtactggctgggctggagccagcggggcagccagatcgccttccgcctccaggtgcgcactgcaggctacgtgggcttcggcttctcgcccaccggggccatggcgtccgccgacatcgtcgtgggcggggtggcccacgggcggccctacctccagccttgcttgcttgtctcaaaaactgaggcctgtgatgcgaagtgtcttcagcagcagggtaattgctgccgggccacttgctgaggaagtgcttggaactgatttgaaatcacagaaaacagtgagcattctttgtggttaacgatgtgcttcttttaagcacaccccagccaacggcgacaaagaaatgtttggaaagcaaattgaaaggctgtaagggagagatgaagagagtgtgcaaccctgacacagctcagctggtgctttgttaagagatatttataagtcttcagattatgccccccaatttccaggcaacgaagagacttctccaagtgtcgtgctttgtgcattagtaataaggacacatgctccacagtaatgctggaacacaggatgatgctcttcagctgtgtgcttcttcctggcggagcagatgatttcataattagcctgaggaaacaggcagacctaacagccaaggaaacaatgcacctgaattgacaaacgaagttcaaggctttaggcaaccaatggcatatttctagagtgttggaaggagaggcaagagtctacttcaaagaaactgaatggtggtttattgatttttcatttgtaatagagccatattaaaataaagttactggtgaaggggatgaattcattacacattgtcatgtttctggaagtatttgatccatacgtaatacaaaaaaactgcgtatggatgactcacaatgctttttattgtaacttaaaaaaaactggtaaagaacttttaaacaggaaaaacatttctccaggaagcttcttctaaatctatttctttttaacttgttaaatttcagtagaaaaaaaaagctgttcataaggacaccatatagcatatacgcaaaaatgtctgcaaaaataatttcaaatggataatttttattaactgtaagctagggattgtatatctgagtatcatacaaataatgtatagatcagatttaatttattatgaaggtctatcttattcatctaatttagccaaacattgtgagaaaatcttgacgccattctttcttttatgagctaaatattgatttttgcatatttactcgctgcctcttaagagctcatatttcggttgattcccctcaaacctcctactcttccttgcctctcccctcaatgtttcaggtgagaaaactaaaccttaggtaactattaaatggcgtattgggccatacagatcagcagcctggatttattcctctgagtcccagtttggtactcttcttctcctgaaagcaaactgtagcttacataaaaacatatgttaattttcctcctaaatagtgaaagaacatgtataatcagatacattttaaacaaattgataaaatgaaatcatggcatttctcttactgcttttattccactataaatggcacactgacacatttccataatatgatttttatgatttttcattcatcatatgccataccttgtgataagtccttacagtgtgttctcatgcaattctcgtgatagtcctgtgaggtcaatatcttattactctcattttgtaggtgtataaatgtgggccttcatgtcacaaagcatggaaattgtctgtggctgtcatatgactgtttcaggaaagtactcagaatgttggaatgttcatttactgaatattcactgaatgtttattgaacacttcgagatgctggggacacaacattgaatgagataaaaccattggtatcacggagcccgtattgtggtggtgggggtagcattaaacaaataaataagcaagagaaacatcagaaagtactaagtgctaagtgctgtgcagataattaaaacggagtgatgtgataa

SEQ ID NO: 155315 - DNA, 3764 bp, Homo sapiens
  Payload ID: 10533
  Gene Symbol: MORC1
  Gene Name: MORC family CW-type zinc finger 1
  Uniprot ID: Q86VD1
  ENST ID: ENST00000232603
  CDS Start-End: 84-3038
gtgggagtgggcgcgggcgcaggcgaacggctgccggtcaggtgtccttgtccccttgagttgcgcgggtcgtgttcgagggcatggacgacaggtaccctgcgcttcagcgggcccagctgcgtctggatttcatccacgccaactccaccactcacagtttcctttttggagcactggctgaattgctggacaatgcaagagatgcaggggctgaaagacttgatgtcttttcagtggataatgaaaaactgcaggggggattcatgttgtgtttcctggatgatggatgtggcatgagccctgaggaagcttcagacatcatttactttggacgatccaaaaaacggctgtcaaccttgaagttcatagggcaatacggcaatggtcttaaaagtgggtccatgagaattggaaaagactttattctttttacgaagaaggaagaaacgatgacctgtgtgtttttttctcagacattctgtgaagaagaaagtcttagtgaggttgtagttccaatgccctcatggttaataagaaccagagaatctgtcacagatgatccccagaaatttgcaatggaattatctataatttataaatactccccatttaaaactgaagcagaattgatgcagcagtttgatgtgatctatggaaaatgtggtactttgctggttatttataacttgaagcttctgcttaatggagaaccagagttggatgttaaaactgacaaagaagatatactgatggctggagctctggaggatttcccagcgaggtggtcattcagagcctacacatctgttctgtattttaacccatggatgagaatattcattcaagccaagagagttaaaactaaacatctttgctattgcctctacagacccagaaagtatctttatgtcacatcttcttttaaaggagcatttaaagatgaagttaaaaaggcagaagaagcagtaaagattgctgaatccatattgaaagaagcacaaatcaaagtaaaccagtgtgacagaacctctttatcttctgccaaggatgtattacagagagctttggaagatgtagaagcaaagcaaaagaatcttaaagagaaacaaagagaattaaaaacagcaagaacgctctccctgttctatggagtgaacgtagaaaaccgaagccaagctggaatgttcatttacagtaataaccgtttgatcaaaatgcatgaaaaagtgggctcacagttgaaactgaagtccttacttggcgcaggcgtggttggaattgttaatatacccttggaggtcatggaaccatcccataataaacaggaatttctcaatgtccaagagtataatcatctactaaaagtcatgggacagtacttggtccagtactgtaaggacaccggcatcaataatagaaatttaacattgttttgcaatgaatttggataccagaatgacatcgatgtggagaaacctttaaattcttttcaatatcaaagaagacaagccatgggtatcccattcatcatacaatgtgatctttgtcttaaatggagagtcttgccttcctctactaattatcaggaaaaagaattttttgacatttggatttgtgctaataatcccaaccgcttggaaaacagttgtcatcaggtagaatgtctaccttccatcccactgggcaccatgagcacaatatcaccatcaaaaaatgagaaagagaagcaacttagagagtcggtcataaagtatcaaaatagactggcagaacagcagccacagcctcaatttataccagtggacgaaatcactgtcacttccacctgcctaacttcagcacataaggaaaataccaaaacccagaaaatcaggcttttgggcgatgacttgaagcatgaatctctttcatcctttgagctttcagcgagccgtagaggacagaaaagaaacatagaagagacagactctgatgtagagtatatttcagaaacaaaaattatgaaaaagtctatggaggagaaaatgaactctcaacagcagagaattccagtagctctgccagaaaatgtcaaactagctgagagatcccagagaagtcagattgctaatattaccactgtctggagagctcaaccaactgaagggtgcctgaagaatgcccaggccgcttcttgggaaatgaaaaggaagcagagtctgaactttgtagaggaatgtaaggtattgactgaagatgagaacacgagtgattcagatataatcctggtttcagataaaagcaacactgatgtttcattgaaacaagaaaaaaaggaaattcctcttttaaaccaagaaaaacaggagctgtgcaatgatgttctagcaatgaaaagaagctcttcattacctagctggaaaagcttgctcaatgtgccgatggaagatgtgaatctaagttctggacacatagccagagtttctgtgagtggcagttgtaaagttgcttcttcgccagcgtcttctcaaagcacacctgtcaaggaaacagtgagaaaactgaagtctaagttaagggagattcttctgtatttttttcctgagcatcagctaccatcagaattggaagaacctgcattaagttgtgagctggagcagtgcccagagcagatgaacaaaaagctgaaaatgtgtttcaaccagatacagaatacttacatggtccaatatgaaaaaaaaataaagaggaaattgcagtccattatctatgattcaaatacaagaggaatacataatgaaatctctctggggcaatgtgaaaataaaagaaaaatctctgaggataagctgaagaatcttcgtataaaactggcactattgttgcagaaactccaactgggtggtccagaaggtgacctggagcagactgacacttatttagaagctttgcttaaagaagataatcttctcttccagaacaatttaaataaagtaactatagatgcaagacatagactccctttagaaaaaaatgaaaagacttcggaaaattaagtcagagatggtattaccttttaaaaaatgctaataagaaaattggaagattcttttaaaaatttttcttttttgttgttgttactgtaaagtctattctgtttaacaataagaaataagaaataatttttttcaaataagaaaattgtgtactctagaaatggagaccgatttacaatttatgtattccctaatccaattatctaaatcttccttttctttcagaaatattaataatatctagagttctctaattttcatgtgagctactgaaaaaaatgaaaatgtcactcaagcttaacttttgttattccttaaaagattgttattgtaattttgttattccttaaaaacatttaaaagcagattttttcaaaatcgatatgtgaaggactacagaatcacctcctcttgaagatattgaaaaagaaagacattatgccctttctccactatagccaacactcagtcaagcagaaaatacaaatccccccaaaactttgagacatagcttatataattttattatttagtcatagtaaaagaataaatctcctaagcataatatgtatacatattacacatatgtaaaaattgttgttttacatttacatatacgtaaagaagtatgtttttacacttttcttgataagtgttttttttttgtttagaaatgtctgaaactttagacaaaaacagtaaaacatttaatattcatttgtgaaa

SEQ ID NO: 155316 - DNA, 3056 bp, Homo sapiens
  Payload ID: 10533
  Gene Symbol: MORC1
  Gene Name: MORC family CW-type zinc finger 1
  Uniprot ID: Q86VD1
  ENST ID: ENST00000483760
  CDS Start-End: 45-2936
aggtgtccttgtccccttgagttgcgcgggtcgtgttcgagggcatggacgacaggtaccctgcgcttcagcgggcccagctgcgtctggatttcatccacgccaactccaccactcacagtttcctttttggagcactggctgaattgctggacaatgcaagagatgcaggggctgaaagacttgatgtcttttcagtggataatgaaaaactgcaggggggattcatgttgtgtttcctggatgatggatgtggcatgagccctgaggaagcttcagacatcatttactttggacgatccaaaaaacggctgtcaaccttgaagttcatagggcaatacggcaatggtcttaaaagtgggtccatgagaattggaaaagactttattctttttacgaagaaggaagaaacgatgacctgtgtgtttttttctcagacattctgtgaagaagaaagtcttagtgaggttgtagttccaatgccctcatggttaataagaaccagagaatctgtcacagatgatccccagaaatttgcaatggaattatctataatttataaatactccccatttaaaactgaagcagaattgatgcagcagtttgatgtgatctatggaaaatgtggtactttgctggttatttataacttgaagcttctgcttaatggagaaccagagttggatgttaaaactgacaaagaagatatactgatggctggagctctggaggatttcccagcgaggtggtcattcagagcctacacatctgttctgtattttaacccatggatgagaatattcattcaagccaagagagttaaaactaaacatctttgctattgcctctacagacccagaaagtatctttatgtcacatcttcttttaaaggagcatttaaagatgaagttaaaaaggcagaagaagcagtaaagattgctgaatccatattgaaagaagcacaaatcaaagtaaaccagtgtgacagaacctctttatcttctgccaaggatgtattacagagagctttggaagatgtagaagcaaagcaaaagaatcttaaagagaaacaaagagaattaaaaacagcaagaacgctctccctgttctatggagtgaacgtagaaaaccgaagccaagctggaatgttcatttacagtaataaccgtttgatcaaaatgcatgaaaaagtgggctcacagttgaaactgaagtccttacttggcgcaggcgtggttggaattgttaatatacccttggaggtcatggaaccatcccataataaacaggaatttctcaatgtccaagagtataatcatctactaaaagtcatgggacagtacttggtccagtactgtaaggacaccggcatcaataatagaaatttaacattgttttgcaatgaatttggataccagaatgacatcgatgtggagaaacctttaaattcttttcaatatcaaagaagacaagccatgggtatcccattcatcatacaatgtgatctttgtcttaaatggagagtcttgccttcctctactaattatcaggaaaaagaattttttgacatttggatttgtgctaataatcccaaccgcttggaaaacagttgtcatcaggtagaatgtctaccttccatcccactgggcaccatgagcacaatatcaccatcaaaaaatgagaaagagaagcaacttagagagtcggtcataaagtatcaaaatagactggcagaacagcagccacaggaaaataccaaaacccagaaaatcaggcttttgggcgatgacttgaagcatgaatctctttcatcctttgagctttcagcgagccgtagaggacagaaaagaaacatagaagagacagactctgatgtagagtatatttcagaaacaaaaattatgaaaaagtctatggaggagaaaatgaactctcaacagcagagaattccagtagctctgccagaaaatgtcaaactagctgagagatcccagagaagtcagattgctaatattaccactgtctggagagctcaaccaactgaagggtgcctgaagaatgcccaggccgcttcttgggaaatgaaaaggaagcagagtctgaactttgtagaggaatgtaaggtattgactgaagatgagaacacgagtgattcagatataatcctggtttcagataaaagcaacactgatgtttcattgaaacaagaaaaaaaggaaattcctcttttaaaccaagaaaaacaggagctgtgcaatgatgttctagcaatgaaaagaagctcttcattacctagctggaaaagcttgctcaatgtgccgatggaagatgtgaatctaagttctggacacatagccagagtttctgtgagtggcagttgtaaagttgcttcttcgccagcgtcttctcaaagcacacctgtcaaggaaacagtgagaaaactgaagtctaagttaagggagattcttctgtatttttttcctgagcatcagctaccatcagaattggaagaacctgcattaagttgtgagctggagcagtgcccagagcagatgaacaaaaagctgaaaatgtgtttcaaccagatacagaatacttacatggtccaatatgaaaaaaaaataaagaggaaattgcagtccattatctatgattcaaatacaagaggaatacataatgaaatctctctggggcaatgtgaaaataaaagaaaaatctctgaggataagctgaagaatcttcgtataaaactggcactattgttgcagaaactccaactgggtggtccagaaggtgacctggagcagactgacacttatttagaagctttgcttaaagaagataatcttctcttccagaacaatttaaataaagtaactatagatgcaagacatagactccctttagaaaaaaatgaaaagacttcggaaaattaagtcagagatggtattaccttttaaaaaatgctaataagaaaattggaagattcttttaaaaatttttcttttttgttgttgttactgtaaagtctattctgtttaacaataagaaataag

SEQ ID NO: 155317 - DNA, 4469 bp, Homo sapiens
  Payload ID: 10534
  Gene Symbol: MORC2
  Gene Name: MORC family CW-type zinc finger 2
  Uniprot ID: Q9Y6X9
  ENST ID: ENST00000215862
  CDS Start-End: 1365-4277
cgagactcagattgtctgaattgagctatcgcaacttaatgctaaaagctccttaaagctacagatttatgacatagttccttccaaaatattacatcataaatcattgagaagattaaaaaaaaacacttgaagaaattgtagttttaaacatctctgcatatattttggatagctactaggttactttaactgtcattaaggagcacagacttactgaagctttactggacagaatcctgggaaatcgatatcattataaggttatatttcccagttagcgggtgaagggctggagaccttattgcagtcatggctttcacaaattacagcagtctgaatcgagctcagctaacctttgaatatctgcacacaaattcgtaagtatcctctaggtgccactgaggtaaccagtaactcgttccttgatattatatggaaatcgtttccccagaaaattttgctttttcactttttgagatgtatcccactggagtgaaatgtgtcactggatatcttgagctctgtattgaagaactgagatcagtgaaatacttgttgctaatccagaagaatctgatttttgtttattggatcaaaattttctaaatgcaaactttagttatttgaagtcaatatgttgagttgtttcattcaagtgtttataggaatccaacaaatactgctctattggatcgccaaatgttggactattttagtatcaaccgtttcccctctgtagtgacaacgtcctaaacagttaggtttataacaagtgtttactttctaacaagaaaacagaagacatttaaatgacaactttcaagaagaaaatttttattttttcagaagttggcattatcttcctggcagattgctcacatccaatattatttgtatatgctaaacaggaaacggcaacttgtttatatctctatttagatagtctttccccaaaatttccacagaaacatacagtgttcatggttcttgagttcatgaaggagtaatctaatcactccaacatggtctggaatgtttcaggtttaatccatatgcccactctcttggaggctgtccagtagcgtcaaaactttagtgttttaatacattcacctgttacttttgagatgaagttcacctttcttggatcacatgcaaaggatgtttaggtctgtgaagaaaagaatttctaggccgggtgctgtggctcacgcctgtaatcccagcactttgggaggccgagaaccactcacgaattcttgtttggtgcccttgctgaactggttgataatgcaagagatgctgatgccaccagaatagatatttatgcagaaagacgagaggaccttcgaggaggatttatgctttgctttttggatgatggagcaggaatggatccaagtgatgctgccagtgtgatccagtttgggaagtcggccaagcgaacacctgagtctactcagattgggcagtacgggaatgggttaaaatcgggctcaatgcgcattgggaaggattttatcctgttcaccaagaaggaagacaccatgacctgcctcttcctgtctcgcacgtttcatgaggaagaaggcattgatgaagtgatagtcccactgcccacctggaatgctcggacccgggaacctgtcacagacaatgtagagaaatttgccattgagacagaactcatctataagtactctccattccgcactgaggaggaagtgatgacccagtttatgaagattcctggggacagcggaacattggtgatcatcttcaatctcaaactcatggataatggagagccagaactagacataatctcaaatccaagagatatccagatggcagagacgtccccagagggcacgaagccagagcggcgctcgttccgtgcctatgccgctgtgctctatattgatccccggatgaggatcttcatccatgggcacaaggtgcagaccaagaggctctcctgctgcctgtacaagcccaggatgtacaagtacacgtcaagccgtttcaagacccgtgcggagcaggaggtgaagaaagcagagcacgtagcaaggattgctgaagagaaggcgcgggaggcagagagcaaagctcggacattagaagtacgcctaggtggagacctcacgcgggactccagggtgatgttgcgacaggtccagaacagagccatcactctgcgcagagaagccgatgtcaagaagaggatcaaggaggccaagcagcgagcacttaaagaacctaaggaactgaattttgtttttggtgtcaacattgaacaccgggatctggatggcatgttcatctacaactgtagccgactgatcaaaatgtatgagaaagtgggcccacagctggaagggggcatggcatgtggcggggttgttggggttgttgatgtgccctacctggtcctggagcctacacacaacaaacaggactttgctgatgccaaggagtaccggcacctgctccgagcaatgggggagcacctggcgcagtattggaaggatattgccatcgcccagaggggaatcatcaagttctgggatgagtttggctacctctctgccaactggaaccagcccccatccagtgagctgcgttacaaacgccggagagctatggaaatccccaccaccatccagtgcgatttgtgtctgaaatggagaaccctccccttccagctgagttctgtggaaaaagattaccctgacacctgggtttgctccatgaaccctgatcctgaacaggaccggtgtgaggcttctgaacaaaagcagaaggttcccctgggaacattcagaaaggacatgaagacgcaggaagagaagcagaaacaactgacagagaaaattcgccagcagcaggagaagctggaggcccttcagaaaaccacacccatccgctcccaagcagacctgaagaaattgcccttggaagtgaccaccagaccttccactgaggaacctgtgcgtagacctcagcgtcctcggtcgccccctttacctgctgtgatcaggaacgcccccagcagacccccttctttgccaactcctagaccagccagccagccccgaaaggctcctgtcatcagcagtaccccaaagctccctgctttggcagcccgggaggaggccagcacatctaggctgctccagccacctgaggcaccccgaaagcctgccaacactctcgtcaagactgcatcccgacctgcccctctggtgcagcaactgtcaccatctttactgcccaactccaagagccctcgggaggttccttctcccaaagtcatcaagactccagtggtgaagaagacagagtcacccatcaaactctccccggctacccctagtcggaagcggagtgtcgcagtttctgatgaggaagaagttgaggaggaagctgagaggaggaaggagaggtgcaagcggggcagatttgttgtgaaggaggaaaagaaggactcgaatgagctctcagacagtgctggggaagaggactcggctgacctcaagagagctcagaaagataaagggctgcacgtggaggtgcgtgtgaacagggagtggtacacgggccgtgtcacagccgtggaggtgggcaagcatgtggtgcggtggaaggtgaagtttgactacgtgcccacagacacgacaccaagagaccgctgggtggagaaaggcagtgaggatgtgcggctgatgaaacccccttctccggaacatcagagccttgatacacaacaggagggcggggaggaggaggtgggccctgtggcccagcaggccatagctgtcgcagagccctccacttccgaatgcctccgcattgagcctgacaccactgccctgagcaccaatcacgagaccatcgacctgcttgtccagatcctccggaattgtttacggtacttcctgcctccaagtttccccatctccaagaagcagctgagtgctatgaattcagatgagctaatatcttttcctctgaaggagtacttcaagcaatatgaagtagggctccaaaacctgtgcaattcctaccagagccgtgctgactcccgggccaaggcctccgaggaaagcctgcgcacctccgagaggaagctccgcgagacggaggagaagctgcagaagctgaggaccaacatcgtggcactcctgcaaaaggtgcaggaggacatagacatcaacacagatgatgagctggacgcctacattgaggacctcatcaccaagggggactgaaggcaggagagagagcagctcccctgcccacctgcccctcaaccctgtagctgcagggggaggggacttcattcatgggttggtggtcgcaccttggtttgacttacacgggacatttgtgtttttggaggaaaagataccctgattctttgaatcttccttaagtttataaatatttattttttaaaagaa

SEQ ID NO: 155318 - DNA, 5181 bp, Homo sapiens
  Payload ID: 10534
  Gene Symbol: MORC2
  Gene Name: MORC family CW-type zinc finger 2
  Uniprot ID: Q9Y6X9
  ENST ID: ENST00000397641
  CDS Start-End: 410-3508
aggaaatttcggggaaccaaaaaaggctggaagaacatgaagatggagcagtcataaaccacccactcaaggaccatctccttcaggaccatccacacgagactcagattgtctgaattgagctatcgcaacttaatgctaaaagctccttaaagctacagatttatgacatagttccttccaaaatattacatcataaatcattgagaagattaaaaaaaaacacttgaagaaattgtagttttaaacatctctgcatatattttggatagctactaggttactttaactgtcattaaggagcacagacttactgaagctttactggacagaatcctgggaaatcgatatcattataaggttatatttcccagttagcgggtgaagggctggagaccttattgcagtcatggctttcacaaattacagcagtctgaatcgagctcagctaacctttgaatatctgcacacaaattcaaccactcacgaattcttgtttggtgcccttgctgaactggttgataatgcaagagatgctgatgccaccagaatagatatttatgcagaaagacgagaggaccttcgaggaggatttatgctttgctttttggatgatggagcaggaatggatccaagtgatgctgccagtgtgatccagtttgggaagtcggccaagcgaacacctgagtctactcagattgggcagtacgggaatgggttaaaatcgggctcaatgcgcattgggaaggattttatcctgttcaccaagaaggaagacaccatgacctgcctcttcctgtctcgcacgtttcatgaggaagaaggcattgatgaagtgatagtcccactgcccacctggaatgctcggacccgggaacctgtcacagacaatgtagagaaatttgccattgagacagaactcatctataagtactctccattccgcactgaggaggaagtgatgacccagtttatgaagattcctggggacagcggaacattggtgatcatcttcaatctcaaactcatggataatggagagccagaactagacataatctcaaatccaagagatatccagatggcagagacgtccccagagggcacgaagccagagcggcgctcgttccgtgcctatgccgctgtgctctatattgatccccggatgaggatcttcatccatgggcacaaggtgcagaccaagaggctctcctgctgcctgtacaagcccaggatgtacaagtacacgtcaagccgtttcaagacccgtgcggagcaggaggtgaagaaagcagagcacgtagcaaggattgctgaagagaaggcgcgggaggcagagagcaaagctcggacattagaagtacgcctaggtggagacctcacgcgggactccagggtgatgttgcgacaggtccagaacagagccatcactctgcgcagagaagccgatgtcaagaagaggatcaaggaggccaagcagcgagcacttaaagaacctaaggaactgaattttgtttttggtgtcaacattgaacaccgggatctggatggcatgttcatctacaactgtagccgactgatcaaaatgtatgagaaagtgggcccacagctggaagggggcatggcatgtggcggggttgttggggttgttgatgtgccctacctggtcctggagcctacacacaacaaacaggactttgctgatgccaaggagtaccggcacctgctccgagcaatgggggagcacctggcgcagtattggaaggatattgccatcgcccagaggggaatcatcaagttctgggatgagtttggctacctctctgccaactggaaccagcccccatccagtgagctgcgttacaaacgccggagagctatggaaatccccaccaccatccagtgcgatttgtgtctgaaatggagaaccctccccttccagctgagttctgtggaaaaagattaccctgacacctgggtttgctccatgaaccctgatcctgaacaggaccggtgtgaggcttctgaacaaaagcagaaggttcccctgggaacattcagaaaggacatgaagacgcaggaagagaagcagaaacaactgacagagaaaattcgccagcagcaggagaagctggaggcccttcagaaaaccacacccatccgctcccaagcagacctgaagaaattgcccttggaagtgaccaccagaccttccactgaggaacctgtgcgtagacctcagcgtcctcggtcgccccctttacctgctgtgatcaggaacgcccccagcagacccccttctttgccaactcctagaccagccagccagccccgaaaggctcctgtcatcagcagtaccccaaagctccctgctttggcagcccgggaggaggccagcacatctaggctgctccagccacctgaggcaccccgaaagcctgccaacactctcgtcaagactgcatcccgacctgcccctctggtgcagcaactgtcaccatctttactgcccaactccaagagccctcgggaggttccttctcccaaagtcatcaagactccagtggtgaagaagacagagtcacccatcaaactctccccggctacccctagtcggaagcggagtgtcgcagtttctgatgaggaagaagttgaggaggaagctgagaggaggaaggagaggtgcaagcggggcagatttgttgtgaaggaggaaaagaaggactcgaatgagctctcagacagtgctggggaagaggactcggctgacctcaagagagctcagaaagataaagggctgcacgtggaggtgcgtgtgaacagggagtggtacacgggccgtgtcacagccgtggaggtgggcaagcatgtggtgcggtggaaggtgaagtttgactacgtgcccacagacacgacaccaagagaccgctgggtggagaaaggcagtgaggatgtgcggctgatgaaacccccttctccggaacatcagagccttgatacacaacaggagggcggggaggaggaggtgggccctgtggcccagcaggccatagctgtcgcagagccctccacttccgaatgcctccgcattgagcctgacaccactgccctgagcaccaatcacgagaccatcgacctgcttgtccagatcctccggaattgtttacggtacttcctgcctccaagtttccccatctccaagaagcagctgagtgctatgaattcagatgagctaatatcttttcctctgaaggagtacttcaagcaatatgaagtagggctccaaaacctgtgcaattcctaccagagccgtgctgactcccgggccaaggcctccgaggaaagcctgcgcacctccgagaggaagctccgcgagacggaggagaagctgcagaagctgaggaccaacatcgtggcactcctgcaaaaggtgcaggaggacatagacatcaacacagatgatgagctggacgcctacattgaggacctcatcaccaagggggactgaaggcaggagagagagcagctcccctgcccacctgcccctcaaccctgtagctgcagggggaggggacttcattcatgggttggtggtcgcaccttggtttgacttacacgggacatttgtgtttttggaggaaaagataccctgattctttgaatcttccttaagtttataaatatttattttttaaaagaagatgctgtgcctgtgagaccatacttttttttttttttttttttttttttttttttttttggtgactgcaaaggacagagaacctttccactttggccatactgggttgctaagccggagccatttcagctcctggctcctcaagataacggcgagtccagtgccatcttggagaagctccaggggcagggctgacttttctcctacaggaggaacaatgtggggatctgagggatgggagggagacttccccctagagtggtggtcctgctgggggctcatatccagggacccaaaaggggggctgtgtaggaggttccacattggaggggctctctctctcgcagctgtcagagttggtcctggctgtggcgtccaaacagcttgagggaaaaagatcctgtctaaccacctcatctactactcaagttctttctgaaggagggatttcttcagttaaccatggacagtgaggtttctcaccacagtaacttgagtccaggttgagggggagacagatctgtggtaaatctctgacttgggcagcacactgagtgtggaaccccacaggactccttagggaaggagcttgtgtgtgaaagaacccctggggctgagctggtgacctccatgtgtgggtgcagcagggccttggatggtgccaattgatctggacagcctgttgatgcttttctacttccacccttcggcctggccccactgagccccatcaaggtgcctgaagagggggccagtgagatcccgtggccacagggactccagaggcatctctgcaggaagcacaccatgccttccctccatgttccatcacggcgccacaatctgtgtcccttaacttctcagggtcaaagacaaaggcaagcgttgctgaattttctctttaatggccattggaagagtctggttcagtttttcccaactctcttcccactcgtatttggggcctctgggttttctgaaggcacaaggactgtgactttgtaccactaacctgtggttcaaacctgggtgtgtttctggcatctccctaacccagatcagcaatggccaccctgctcctctgaggtcagcagaagactgggaagcagaggtgagggatgcaggccacactggaatgggaagtcttttccccactggatgtgcctgtctggtgggttttggaccttcccagactacatctctaggagaggcctgtttggagtagtacactgagagaccctggcctcttctgctggaagactgtccaagtcttggggtttcttgagctggtgattcctctgccatcctgctctctctcttcatctcaggcagcatggggtccacttttgtccccaaacctaatgttttaatccaaatgcaaattggttccacatttttactggagggtaatcagtttttaaaattcacacacatgtaatcgaaacgcaatactataaagttctactggtgagactcctgaa

SEQ ID NO: 155319 - DNA, 766 bp, Homo sapiens
  Payload ID: 10534
  Gene Symbol: MORC2
  Gene Name: MORC family CW-type zinc finger 2
  ENST ID: ENST00000445980
  CDS Start-End: 1-574
ccgctgggtggagaaaggcagtgaggatgtgcggctgatgaaacccccttctccggaacatcagagccttgatacacaacaggagggcggggaggaggaggtgggccctgtggcccagcaggccatagctgtcgcagagccctccacttccgaatgcctccgcattgagcctgacaccactgccctgagcaccaatcacgagaccatcgacctgcttgtccagatcctccggaattgtttacggtacttcctgcctccaagtttccccatctccaagaagcagctgagtgctatgaattcagatgagctaatatcttttcctctgaaggagtacttcaagcaatatgaagtagggctccaaaacctgtgcaattcctaccagagccgtgctgactcccgggccaaggcctccgaggaaagcctgcgcacctccgagaggaagctccgcgagacggaggagaagctgcagaagctgaggaccaacatcgtggcactcctgcaaaaggacatagacatcaacacagatgatgagctggacgcctacattgaggacctcatcaccaagggggactgaaggcaggagagagagcagctcccctgcccacctgcccctcaaccctgtagctgcagggggaggggacttcattcatgggttggtggtcgcaccttggtttgacttacacgggacatttgtgtttttggaggaaaagataccctgattctttgaatcttccttaagtttataaatatttattttttaaaagaa

SEQ ID NO: 155320 - DNA, 462 bp, Homo sapiens
  Payload ID: 10534
  Gene Symbol: MORC2
  Gene Name: MORC family CW-type zinc finger 2
  ENST ID: ENST00000429468
  CDS Start-End: 1-270
ctcttgctctgctcccaacagaaggagtacttcaagcaatatgaagtagggctccaaaacctgtgcaattcctaccagagccgtgctgactcccgggccaaggcctccgaggaaagcctgcgcacctccgagaggaagctccgcgagacggaggagaagctgcagaagctgaggaccaacatcgtggcactcctgcaaaaggacatagacatcaacacagatgatgagctggacgcctacattgaggacctcatcaccaagggggactgaaggcaggagagagagcagctcccctgcccacctgcccctcaaccctgtagctgcagggggaggggacttcattcatgggttggtggtcgcaccttggtttgacttacacgggacatttgtgtttttggaggaaaagataccctgattctttgaatcttccttaagtttataaatatttattttttaaaagaa

SEQ ID NO: 155321 - DNA, 4246 bp, Homo sapiens
  Payload ID: 10535
  Gene Symbol: MORC3
  Gene Name: MORC family CW-type zinc finger 3
  Uniprot ID: Q14149
  ENST ID: ENST00000400485
  CDS Start-End: 77-2896
agggctccacagtcgttccgccacctcccagtcgggttgcggcggaggccgttcctggctttgtagctcgctcaagatggcggcgcagccaccccgcgggatacgcctcagcgcgctttgcccgaagtttttacatacaaattctactagtcacacctggccattcagtgcagttgctgaattaatagataatgcttatgatcctgatgtgaacgctaaacaaatatggattgacaaaacagtgataaatgaccatatatgcttgacattcaccgacaatgggaatggtatgacttctgataaattacataaaatgctaagctttggcttcagtgacaaagtcaccatgaatggtcatgtcccagttggattatatgggaatggcttcaagtcgggttctatgcgtctgggtaaagacgcaatcgtttttaccaaaaatggagaaagcatgagcgtgggccttttgtctcagacctacttggaagtcataaaagcggagcatgttgttgttccaatagtggcattcaacaagcaccgacagatgattaatttagcagaatcaaaagccagccttgctgcaattctggaacattctctgttttccacggaacagaagttactggcagaacttgatgctattataggcaagaaggggacgaggatcatcatttggaatcttagaagctacaaaaatgcaacagagttcgattttgaaaaggataaatatgatatcagaattcccgaggatttagatgagataacagggaagaaggggtacaagaagcaggaaaggatggaccagattgcccctgagagtgactattccctgagggcttattgcagtatattatatctaaagccaagaatgcagatcatcctacgtggacagaaagtgaagacacagctggtttcgaagagtcttgcctacatcgaacgtgatgtttatcgaccaaaatttttatctaaaacagtgagaattacctttggattcaactgcagaaataaagatcattatgggataatgatgtatcacagaaatagactcatcaaagcttatgaaaaagttggatgtcagttaagggcaaacaacatgggtgttggagtggttggaattatagagtgtaatttccttaagccaactcataataaacaagatttcgactatactaatgagtacagacttacaataacagcactaggagaaaagctgaatgattactggaatgaaatgaaagtgaagaaaaatacagaatatcctctaaatttgccagttgaagatatacagaagcgtcctgatcagacatgggttcagtgtgatgcctgtctaaagtggcggaaattacctgatgggatggatcaacttcctgaaaaatggtattgctccaataaccctgacccacagttcagaaattgtgaggttccagaagaacctgaagatgaggatttggtacatcccacttatgaaaaaacctacaaaaagaccaacaaggaaaaattcaggatcagacaaccggaaatgatccctcggattaatgctgaactgttgtttcggccaactgctctttcaactccaagcttttcttctcctaaggaaagtgttccaagaagacatctttcagaaggaacaaattcttatgcgacaagacttctaaataatcatcaagttccacctcagtctgaacctgagagcaacagcttgaaacggagactttctactcgttcctcaattttgaatgcaaagaatcggagattgagtagtcagtttgaaaattcagtttataaaggtgatgatgatgatgaagatgtcatcatcttagaagaaaacagtacccccaaacctgcagtagatcatgatattgacatgaaatcagaacagagtcacgttgagcaaggtggtgttcaggttgagtttgtgggtgacagtgaaccttgtggccagactggttcaacaagcacctcatcatcccgatgcgaccagggaaatactgcagctacccagactgaagtaccaagtttagttgttaaaaaagaagaaactgttgaagacgagatagacgtaagaaatgatgcagtgattctgccctcctgtgtagaagctgaagcaaagatacatgaaacccaggaaaccaccgataaatctgcagatgatgcaggctgccaattacaagaactgagaaaccagctactccttgtcactgaggaaaaagagaattataaaagacagtgtcatatgtttactgatcaaatcaaagtgttacaacagaggatactagaaatgaatgacaagtatgttaagaaagaaacttgccatcagtccactgaaaccgatgctgtatttttacttgaaagtattaatggcaaatctgaaagtccagaccatatggtatctcagtatcagcaagctttggaagaaatagaaaggctgaaaaaacaatgtagtgctttgcaacatgtaaaggctgaatgcagccagtgttccaataatgagagtaaaagtgaaatggatgagatggctgtgcagcttgacgatgtgtttagacaactggacaaatgcagtattgagagggaccagtataaaagtgaggttgaattgctggaaatggaaaagtcacaaatccgttcacagtgtgaagaactcaaaactgaagtagaacagttaaaatctacaaatcaacagacggcaacagatgtttcaacatcaagtaacattgaggagtctgtaaatcatatggatggagaaagcctcaaactccgatctcttcgagttaacgtaggacaactgctggctatgattgtgcctgatcttgatcttcagcaagtgaattacgatgttgatgtagttgatgagattttaggacaagttgttgaacaaatgagtgaaatcagtagtacttaaagtatatgttatgtaagataaaatatttgctcaattcttttggttgtacagctttcaaaatataattaattttgttttatagatatgataggcaacagactgaaaaccataatctttactgtattctatgcattcaaatgtggtcacaaatattgtggacacattatcttatgttttgaaatacctgtgaattgttggcattgagcagctgaagctaactcatgactctgttttgaatgtaaatatttgtaattaagcctgcacatatttttttattgccctagagtactcaagtgtttttcaccaagagcttttcaggttgcccctaagctttgtgcaattttttctggttccccaaagtgtatttttctctaagtcgagggctatgccataatacaaatggaaatgttacctttgattttcttataaaggagtttaaataggatttttaaataatgtagtaacactcctgatacaactctggttataagtgaattgagcattaatgtttcttttgtataaattcctgtcctgaaatattttattcatgaaaataaggtaagcaaaaaccaactccattttgccaggattttgttgtgctgagattgccaatcacggttaaacacaaagtgtttttatagaatgaagaaacagtctttaacagaaaaaaggtattgaaatattaaatggccaccaagtttactttgaagcccatttttggctgtttagtcagcatgaagtgggcatgataattttttaatatttctttttgtgaaatttcctgtacagccttttgtaggattactacaggttaatgtgagttgaggaagacagtctttctcaaacaatactacataccttttattatattacaaacctaagtgttttatatcctagagtcaaggaacaaatttccttaggattatagtattacatgccataaaatactatgctttattggtcccatgttttgtgcaattttaaagagatggctttctattaagtataaactatgtatatataagaaccatattttccacaactaaaatgtgcattattttttccaaagttttatcattgctatttatttttacctttgtttttgaacattcaatccgttcattttgtatgtatgcttaatacgtgtcggtcatatacagtattgaatttttactgtatagtaattctggaaagagcaaataaatgaagattgtttttatttgcctgataaagtaattgaaagtgtatttttggtatgaagctggttttctgtcacaattgtaatttcccaaattttaaaatatcttataataaaataaaaatatatgatggctaactgttcaaatgcta

SEQ ID NO: 155322 - DNA, 934 bp, Homo sapiens
  Payload ID: 10535
  Gene Symbol: MORC3
  Gene Name: MORC family CW-type zinc finger 3
  ENST ID: ENST00000549948
  CDS Start-End: 3-578
ctgaaaccgatgctgtatttttacttgaaagtattaatggcaaatctgaaagtccagaccatatggtatctcagtatcagcaagctttggaagaaatagaaaggctgaaaaaacaatgtagtgctttgcaacatgtaaaggctgaatgcagccagtgttccaataatgagagtaaaagtgaaatggatgagatggctgtgcagcttgacgatgtgtttagacaactggacaaatgcagtattgagagggaccagtataaaagtgaggttgaattgctggaaatggaaaagtcacaaatccgttcacagtgtgaagaactcaaaactgaagtagaacagttaaaatctacaaatcaacagacggcaacagatgtttcaacatcaagtaacattgaggagtctgtaaatcatatggatggagaaagcctcaaactccgatctcttcgagttaacgtaggacaactgctggctatgattgtgcctgatcttgatcttcagcaagtgaattacgatgttgatgtagttgatgagattttaggacaagttgttgaacaaatgagtgaaatcagtagtacttaaagtatatgttatatattgaagtattgccaagatatgagacttcgaaaatgtggctcacagttgcagacagaacaactgttgtttaacagaacaacgtgggctttcatgatgctcgagtagcagtggcgcgatcacagctcactacagccgcaatctcccgggctcagtaaaagcagcgcatccagaggtacttgtttcctggccttctgcgaagcccacagataaattaggtctcatttggaaacgtcccatttcgaaaagcctgagcattttgcagctttctcctgtcttgaagaagtagaacggtgcccgagaaacgtttttccccttcgagactcaggaggatgaaagtcatc

SEQ ID NO: 155323 - DNA, 867 bp, Homo sapiens
  Payload ID: 10535
  Gene Symbol: MORC3
  Gene Name: MORC family CW-type zinc finger 3
  ENST ID: ENST00000551788
  CDS Start-End: 3-578
ctgaaaccgatgctgtatttttacttgaaagtattaatggcaaatctgaaagtccagaccatatggtatctcagtatcagcaagctttggaagaaatagaaaggctgaaaaaacaatgtagtgctttgcaacatgtaaaggctgaatgcagccagtgttccaataatgagagtaaaagtgaaatggatgagatggctgtgcagcttgacgatgtgtttagacaactggacaaatgcagtattgagagggaccagtataaaagtgaggttgaattgctggaaatggaaaagtcacaaatccgttcacagtgtgaagaactcaaaactgaagtagaacagttaaaatctacaaatcaacagacggcaacagatgtttcaacatcaagtaacattgaggagtctgtaaatcatatggatggagaaagcctcaaactccgatctcttcgagttaacgtaggacaactgctggctatgattgtgcctgatcttgatcttcagcaagtgaattacgatgttgatgtagttgatgagattttaggacaagttgttgaacaaatgagtgaaatcagtagtacttaaagtatatgttatgagtcaagtcttcctaatctcccatggggttcctgttggaagtgaggctcttggtttgtactgtgatctgaaccatgactgaattaagtaaaagcagcgcatccagaggtacttgtttcctggccttctgcgaagcccacagataaattaggtctcatttggaaacgtcccatttcgaaaagcctgagcattttgcagctttctcctgtcttgaagaagtagaacggtgcccgagaaacgtttttccccttcgagactcaggaggatgaaagtcatc

SEQ ID NO: 155324 - DNA, 1028 bp, Homo sapiens
  Payload ID: 10535
  Gene Symbol: MORC3
  Gene Name: MORC family CW-type zinc finger 3
  ENST ID: ENST00000546482
  CDS Start-End: 3-578
ctgaaaccgatgctgtatttttacttgaaagtattaatggcaaatctgaaagtccagaccatatggtatctcagtatcagcaagctttggaagaaatagaaaggctgaaaaaacaatgtagtgctttgcaacatgtaaaggctgaatgcagccagtgttccaataatgagagtaaaagtgaaatggatgagatggctgtgcagcttgacgatgtgtttagacaactggacaaatgcagtattgagagggaccagtataaaagtgaggttgaattgctggaaatggaaaagtcacaaatccgttcacagtgtgaagaactcaaaactgaagtagaacagttaaaatctacaaatcaacagacggcaacagatgtttcaacatcaagtaacattgaggagtctgtaaatcatatggatggagaaagcctcaaactccgatctcttcgagttaacgtaggacaactgctggctatgattgtgcctgatcttgatcttcagcaagtgaattacgatgttgatgtagttgatgagattttaggacaagttgttgaacaaatgagtgaaatcagtagtacttaaagtatatgttatgagtcaagtcttcctaatctcccatggggttcctgttggaagtgaggctcttggtttgtactgtgatctgaaccatgactgaattaagactcaacaggttggatgatgccccagatactgcccaggttggtgagggcggatcttctgtactcagtctactgattcaaatgctaaagtcttccagaaacaccctcatagtcagaagtaatgttgaccacctatcggttcagagtcgtgacacttcaagagtaaaagcagcgcatccagaggtacttgtttcctggccttctgcgaagcccacagataaattaggtctcatttggaaacgtcccatttcgaaaagcctgagcattttgcagctttctcctgtcttgaagaagtagaacggtgcccgagaaacgtttttccccttcgagactcaggaggatgaaagtcatc

SEQ ID NO: 155325 - DNA, 875 bp, Homo sapiens
  Payload ID: 10535
  Gene Symbol: MORC3
  Gene Name: MORC family CW-type zinc finger 3
  ENST ID: ENST00000552581
  CDS Start-End: 1-680
ctgaaaccgatgctgtatttttacttgaaagtattaatggcaaatctgaaagtccagaccatatggtatctcagtatcagcaagctttggaagaaatagaaaggctgaaaaaacaatgtagtgctttgcaacatgtaaaggctgaatgcagccagtgttccaataatgagagtaaaagtgaaatggatgagatggctgtgcagcttgacgatgtgtttagacaactggacaaatgcagtattgagagggaccagtataaaagtgaggttgaattgctggaaatggaaaagtcacaaatccgttcacagtgtgaagaactcaaaactgaagtagaacagttaaaatctacaaatcaacagacggcaacagatgtttcaacatcaagtaacattgaggagtctgtaaatcatatggatggagaaagcctcaaactccgatctcttcgagttaacgtaggacaactgctggctatgattgtgcctgatcttgatcttcagcaaatattgaagtattgccaagatatgagacttcgaaaatgtggctcacagttgcagacagaacaactgttgtttaacagaacaacgtgggctttcatgatgagtcaagtcttcctaatctcccatggggttcctgttggaagtgaggctcttggtttgtactgtgatctgaaccatgactgaattaagtaaaagcagcgcatccagaggtacttgtttcctggccttctgcgaagcccacagataaattaggtctcatttggaaacgtcccatttcgaaaagcctgagcattttgcagctttctcctgtcttgaagaagtagaacggtgcccgagaaacgtttttccccttcgagactcaggaggatgaaagtcatc

SEQ ID NO: 155326 - DNA, 2940 bp, Homo sapiens
  Payload ID: 10536
  Gene Symbol: MORC4
  Gene Name: MORC family CW-type zinc finger 4
  Uniprot ID: Q8TE76
  ENST ID: ENST00000255495
  CDS Start-End: 110-2812
ggtcccggacggtcgccgccagctgcgagtggaagtgagcgagggctagtcccggaccgccgggccaggggtccggcggcagcagacgggtaccgtggcggccaaaaaaatgctcctgtaccgaggggcccccgccggccctggcgcgccgggctgcgggctggcccggcccggcggcggcccgcaggccttcgggatccgcctgagcacgatgagcccccgctacctccagagcaactccagcagccacacgcgacccttcagtgccatcgcggagctgctagataatgctgtagatccagatgtatctgccaggacggtctttatagatgttgaggaggtcaagaataaatcttgtttgacctttaccgatgatggatgtgggatgacacctcataaactacaccgaatgctcagctttggctttacagataaagtaataaagaagagccagtgtcccattggggtctttggtaatggtttcaagtcaggctccatgcggctaggaaaggacgcccttgtcttcaccaagaatgggggtactctcactgttggacttctatcacagacctatctggaatgtgtccaggcccaggcagttattgtaccaattgttccattcaaccagcaaaacaaaaaaatgattattaccgaggattcattgcccagcctagaagccatcttgaactattccattttcaaccgtgaaaatgacctgctggcccagtttgatgccatcccaggcaaaaaaggcactcgtgttctcatttggaacatccgcagaaataaaaatggaaaatctgagttggactttgatacagatcaatatgacatcctggtatcagactttgacacagaagaaaaaatgactggcggtgttacctctgagctaccagaaacagaatattctttaagggcattttgtggtattctatacatgaagccacgcatgaaaatttttctgcgtcaaaagaaggtgactacccagatgattgccaagagcctggccaatgtagaatatgatacatataaacctaccttcacaaataagcaggtgagaatcacctttgggttctcttgcaagaatagtaaccagtttggaataatgatgtatcataacaaccgactcataaaatcttttgagaaggtggggtgccaggtgaagccaactcgtggagaaggtgtaggagtaattggagtcattgagtgcaatttcctaaaacctgcctacaacaaacaagactttgagtataccaaggagtaccggctaacaataaatgcccttgcccagaagctcaatgcttactggaaggaaaaaacatctcaagataattttgagacctcaactgtagccaggccaataccgaaggttcctgaccagacatgggttcagtgtgatgagtgtcttaaatggagaaagcttcctgggaagattgatccatccatgttacctgcaagatggttttgttattataattcccatccaaagtacaggagatgctctgttccagaggaacaagaactcactgatgaagacctgtgcttgagcaaagctaagaaacaagaacaaactgttgaggagaagaagaagatgcctatggaaaatgagaaccaccaggtattcagtaatccaccaaagatccttactgttcaagaaatggctggattgaataacaagacaattggatatgagggaattcatagccctagtgtgcttccttctggtggagaagaaagcagatcaccatctcttcaacttaagcctctggattccagtgttttacagttttccagtaagtacaaatggatcctaggtgaagaaccggtggagaaacgaagaaggctccagaatgagatgacaacaccttctctagattattccatgcctgctccttacaggagggtagaagcacctgttgcctacccagaaggggagaacagccatgataaatcgagttctgagagaagtacaccaccataccttttcccagaatacccagaagcaagcaagaatacaggtcagaatagggaggtttcaattctgtatccaggggccaaagaccaacgccaggggtccctgcttcctgaagaattagaagatcagatgccaagattggtggcagaagaatctaacagaggtagcacaaccataaacaaagaagaagtcaacaagggaccttttgtagctgttgtgggtgttgccaaaggtgttagagattcaggagctcccattcagctgatcccttttaacagagaggagcttgctgagagacgaaaagcagttgaatcctggaacccagtgccttattctgtggcctctgctgcaatccctgctgcagccattggggagaaagcaagaggctatgaggagagcgaaggtcataatacaccaaagttgaagaaccagagagagctggaagaattgaagagaaccacagaaaaattggaacgtgttttggctgaaaggaatttgttccagcaaaaggtggaggagctggaacaggagaggaatcactggcagtctgaattcaagaaagtccaacatgaattggtgatctacagtacccaggaggcggaaggcttgtactggagcaagaaacacatgggttatcgccaagctgaattccagattctgaaagctgagctggaaagaaccaaagaggaaaagcaagagttaaaagagaaactgaaggaaacagagacacacctggaaatgctgcagaaggctcagggctttggcaaagcttacgcggctacgtatccacgtcagctatctccttacttctgtcctccctcacttggagcttcgtgagatcgggtatgactcagaacaagtggatgggatcctgtacacggtgctggaggcaaatcacatactggattgagcaccagactgtatacccttctcttctcttatcttctgtctgttctcttttctct

SEQ ID NO: 155327 - DNA, 3834 bp, Homo sapiens
  Payload ID: 10536
  Gene Symbol: MORC4
  Gene Name: MORC family CW-type zinc finger 4
  Uniprot ID: Q8TE76
  ENST ID: ENST00000355610
  CDS Start-End: 276-3089
atatttctgtacggcccagaggcagcccgggcagtcgccgggtcggtagaggtgctgacagggcggagccgccgcttgcctcagccggcctcacccctcccgcccgggacaggtggctggagcgcgctccgcctccgccagctgcgagtgggagcgagggagggccggtcccggacggtcgccgccagctgcgagtggaagtgagcgagggctagtcccggaccgccgggccaggggtccggcggcagcagacgggtaccgtggcggccaaaaaaatgctcctgtaccgaggggcccccgccggccctggcgcgccgggctgcgggctggcccggcccggcggcggcccgcaggccttcgggatccgcctgagcacgatgagcccccgctacctccagagcaactccagcagccacacgcgacccttcagtgccatcgcggagctgctagataatgctgtagatccagatgtatctgccaggacggtctttatagatgttgaggaggtcaagaataaatcttgtttgacctttaccgatgatggatgtgggatgacacctcataaactacaccgaatgctcagctttggctttacagataaagtaataaagaagagccagtgtcccattggggtctttggtaatggtttcaagtcaggctccatgcggctaggaaaggacgcccttgtcttcaccaagaatgggggtactctcactgttggacttctatcacagacctatctggaatgtgtccaggcccaggcagttattgtaccaattgttccattcaaccagcaaaacaaaaaaatgattattaccgaggattcattgcccagcctagaagccatcttgaactattccattttcaaccgtgaaaatgacctgctggcccagtttgatgccatcccaggcaaaaaaggcactcgtgttctcatttggaacatccgcagaaataaaaatggaaaatctgagttggactttgatacagatcaatatgacatcctggtatcagactttgacacagaagaaaaaatgactggcggtgttacctctgagctaccagaaacagaatattctttaagggcattttgtggtattctatacatgaagccacgcatgaaaatttttctgcgtcaaaagaaggtgactacccagatgattgccaagagcctggccaatgtagaatatgatacatataaacctaccttcacaaataagcaggtgagaatcacctttgggttctcttgcaagaatagtaaccagtttggaataatgatgtatcataacaaccgactcataaaatcttttgagaaggtggggtgccaggtgaagccaactcgtggagaaggtgtaggagtaattggagtcattgagtgcaatttcctaaaacctgcctacaacaaacaagactttgagtataccaaggagtaccggctaacaataaatgcccttgcccagaagctcaatgcttactggaaggaaaaaacatctcaagataattttgagacctcaactgtagccaggccaataccgaaggttcctgaccagacatgggttcagtgtgatgagtgtcttaaatggagaaagcttcctgggaagattgatccatccatgttacctgcaagatggttttgttattataattcccatccaaagtacaggagatgctctgttccagaggaacaagaactcactgatgaagacctgtgcttgagcaaagctaagaaacaagaacaaactgttgaggagaagaagaagatgcctatggaaaatgagaaccaccaggtattcagtaatccaccaaagatccttactgttcaagaaatggctggattgaataacaagacaattggatatgagggaattcatagccctagtgtgcttccttctggtggagaagaaagcagatcaccatctcttcaacttaagcctctggattccagtgttttacagttttccagtaagtacaaatggatcctaggtgaagaaccggtggagaaacgaagaaggctccagaatgagatgacaacaccttctctagattattccatgcctgctccttacaggagggtagaagcacctgttgcctacccagaaggggagaacagccatgataaatcgagttctgagagaagtacaccaccataccttttcccagaatacccagaagcaagcaagaatacaggtcagaatagggaggtttcaattctgtatccaggggccaaagaccaacgccaggggtccctgcttcctgaagaattagaagatcagatgccaagattggtggcagaagaatctaacagaggtagcacaaccataaacaaagaagaagtcaacaagggaccttttgtagctgttgtgggtgttgccaaaggtgttagagattcaggagctcccattcagctgatcccttttaacagagaggagcttgctgagagacgaaaagcagttgaatcctggaacccagtgccttattctgtggcctctgctgcaatccctgctgcagccattggggagaaagcaagaggctatgaggagagcgaaggtcataatacaccaaagttgaagaaccagagagagctggaagaattgaagagaaccacagaaaaattggaacgtgttttggctgaaaggaatttgttccagcaaaaggtggaggagctggaacaggagaggaatcactggcagtctgaattcaagaaagtccaacatgaattggtgatctacagtacccaggaggcggaaggcttgtactggagcaagaaacacatgggttatcgccaagctgaattccagattctgaaagctgagctggaaagaaccaaagaggaaaagcaagagttaaaagagaaactgaaggaaacagagacacacctggaaatgctgcagaaggctcaggtctcctaccggaccccagagggagatgacctagaaagggctttggcaaagcttacgcggctacgtatccacgtcagctatctccttacttctgtcctccctcacttggagcttcgtgagatcgggtatgactcagaacaagtggatgggatcctgtacacggtgctggaggcaaatcacatactggattgagcaccagactgtatacccttctcttctcttatcttctgtctgttctcttttctctccctccctcacgtctctctctctctctctctctctctctctctctctctctcaccctcacctttatgccttatatagagaatctctgtgtaaatcctggctcataatcagtctcctttttatcagttttggtgtggagaaagaggccagtttaaataggctttcaagagtctagggtcagaaaagcaatagtcactaagctaggtgacctgaaagctttaattttcatgacctggatatgtggtctattgtatatctttttctgaaatggtttgtattcatttaggttagatcaatcagcagatattgggtccggtataccaggtattattttggggtaagctaacaagtacaactcatgtttgcagccttcgaagatgtaacaatctcgttggaaacataagacatacatcacattatacacaaaagtgtatgatatgtacaactgagtggtacagatatgacatggaagatctgggggaggaagttcaaggaaggcaccacaccagaaatgggacctaaattaaggcttaaagaatgagcatggccacactgtcagtgagtgttctttaggtggtaggactatggttgatatttttcttcttcctatcttcctgcctttttcagattttcaatattaaacttgttattcttacattggaaaaaaataaattgtttttaaaaagatcaa

SEQ ID NO: 155328 - DNA, 2027 bp, Homo sapiens
  Payload ID: 10536
  Gene Symbol: MORC4
  Gene Name: MORC family CW-type zinc finger 4
  ENST ID: ENST00000604604
  CDS Start-End: 1-115
atctgccaggacggtctttatagatgttgaggaggtcaagaataaatcttgtttgacctttaccgatgatggatgtgggatgacacctcataaactacaccgaatgctcagttaggaatccaacttacaggggatgtgaaggacctcttcaaggagaactacaaaccactgctcaatgaaataaaagaggatacaaacaaatggaagatcattccatgctcatgggtaggaagaatcaatatcgtgaaaatggccatactgcccaaggtaatttatagattcaatgccatccccatcaagctaccaatgactttcttcacagaattggaaaaaactactttaaagttcatatggaaccaaaaaagagcctgcatcaccaagtcaatcctaaggcaaaagaaaaaagctggaggcatcacactacctgacttcaaactatactacacggctacagtaaccaaaacagcatggtactggtaccaaaacagagatatagatcaatggaacagaacagagccctcagaaataatgccgcatatctacaactatctgatctttgacaaacctgacaaaaacaagcaatggggaaaggattccctatctaataaatggtgctgggaaaactggctagccatatgtaaaaagctgaaactggatcccttccttacaccttatacaaaaattaattcaaggtggattaaagacttaaacattagacctaaaaccataaaaaccctagaagaaaaccttggcattaccattcaggacataggaatgggcaagcacttcatgtctaaaacaccaaaagcaatggcaacaaaagccaaaattgacaaatgggatctaattaaactaaagagcttctgcacagcaaaagaaactaccatcagagtgaacaggcaacctacagaatgggagaaaattttcacaacctactcatctgacaaagggctaatatccagaatttacaatgaactcaaacaaatttagaagaaaaaaacaaacaaccccatcaaaaagtgggcaaaggatatgaacagacacttctcaaaagaagacatttatgcagccaaaaaacacatgaaaaaatgctcatcatcactggccatcagagaaatgcaaatcaaaaccactatgagatgccatctcacaccagttagaatggcgatcattaaaaagtcaggaaacaacaggtgctggagaggatgtggagaaataggaacacttttacactgttggtgggactgtaaactagttcaaccattgtggaagtcagtgtggggattcctcagggatctagaactagaaataccatttgacccagccatcccattactgggtatatacccaaaggactataaatcatgctgctataaagacacatgcacacgtatgtttattgcggcactattcacaatagcaaagacttggaaccaagccaaatgtccaacaatgatagactggattaagaaaatgtggcacatatacaccatggaatactatgcagccataaaaaatgatgagttcatgtcctttgtagggactataaatcatgctgctataaagacacatgcacacgtatgtttattgcggcactattcacaatagcaaagacttggaaccaagccaaatgtccatcaatgatagactggattaagaaaatgtggcacatatacaccatggaatactatacagccataaaaaatgatgagttcatgtcctttgtagggacatggataaaattggaaatcatcattctcagtaaactattgcaaggacaaaaaaccaaacaccgcatgttcagactcatagatgggaattgaacaatgagaacacatgaacatacgaaggggaacatcacactctggggcctgttgtggggtggcgggaggggggagggatagcattaagagatatacctaatgctaaatgacgcgttaatgggtgcagcagaccagcatggcacatgtatacatatgtaactaacctgcacattgtgcacatgtaccctaaaacttaaagtgtaa

SEQ ID NO: 155329 - DNA, 2049 bp, Homo sapiens
  Payload ID: 10537
  Gene Symbol: MRFAP1
  Gene Name: Morf4 family associated protein 1
  Uniprot ID: Q9Y605
  ENST ID: ENST00000320912
  CDS Start-End: 654-1037
gtctcactctgatgcacaggctggagagcagtggcgcgatatgggctcactgcaacctccgcctcccgttttcaaacgattgtctcagcctcccaagcagctggggttacacgcgtgcaacacgacgcccggctaatttttgtatttttggtagagacggggtctcgccatgtcggccaggctggtctcgaattcctgacctcaagccatccacccacctcgcctcccaacgtgctgagattacaggcgtgagccaccgcgcctgggaagtgcgggaggcctttttaaaaaatgtaaactcgcgtgctcaagaagccctatcggagggaaacacccagaagaggccaccctccaaacacagggtaaaacaggggtgacgcacagaggtaacgggaaagcaggaacgagcgagagcgtgcggtcccgtacctgcgcgtgcctgcgtgcgcgtccgtgcggccgcgacgccgccgccggtgcctctctttctagacgtgcgcgcgcccgcagctcgcccccctgaccgtaaagaggcccggctgtgtcgtgaaaggggccgcaacgcgcagagcgctggttgacggccgggactccattttgttcgccgttactctgcgcacatcgctattgcggttccgaggcagtgggaagagatgcggcccctggacatcgtcgagctggcggaaccggaggaagtggaggtgctggagcccgaggaggatttcgagcagtttctgctcccggtcatcaacgagatgcgcgaggacatcgcgtcgctgacgcgcgagcacgggcgggcgtacctgcggaaccggagcaagctgtgggagatggacaatatgctcatccagatcaaaacgcaggtggaggcctcggaggagagcgccctcaaccacctccagaacccgggcgacgcggccgagggccgggcggccaagaggtgcgagaaggccgaggagaaggccaaggagattgcgaagatggcagagatgctggtggagctggtccggcggatagagaagagcgagtcgtcgtgagcgcggtcggcggtttccagccaatggattctggtcaactggtggagattggctgacaccctggagaagccgaaaccagagagccttttgttttctcttttttcctgtctatgctctgtctcacttaacactacgttttctgctatggtctgtggttgatgacctcaatatgagtttcgattgttaacgtgtttttgtttgggaagtaattttgtttgaaaatgctctcacatacaggaattagggcctagattgtaagctcttgcagcagtcacatttgttcccgggctttggtggttatttctaaatttttgaggtgctttgctatttcttgtgtgacctgatagctccctggaactttgggtctgtgtgtgacacatgagactcacagttggagttctccagctctggaggtgctgaaggagctgcattaattctggaagacgactccatgcagcaactactgaagaaaggaccagacttcaacggggagtgtggatgggccgacctggctgggactcgtgaatctggagaagagctggagaatggatagtattgtctgtatttggagactttaatttctgtgtgagaccaaaggaggagagatgtgttttgttcaaaatttaaatttgttgtggtacactatcttatgtaacctgtctggtgagtttgtttggacaacctaactcagctttatttgacatggaacctaaaatagaagataagatcttgatattctgtacaagttgatgtaataccctgatgcgttttagaggacttggcataaaatgaaagattggcaaaggcccttgaggggcttggggatgacagtatggaactgtctgcattggaccctaaactggactagaagaggcatcttcaaggttcatacgttgtccagctgtaagttcatttgagtagcagacctaacaaatatttgaggtcagaaccctaccatgttaaaacaaacaaaaacttaccatgttaataaaagtattcatttgcttgaaaa

SEQ ID NO: 155330 - DNA, 1584 bp, Homo sapiens
  Payload ID: 10537
  Gene Symbol: MRFAP1
  Gene Name: Morf4 family associated protein 1
  Uniprot ID: Q9Y605
  ENST ID: ENST00000382581
  CDS Start-End: 173-556
ttcgccgttactctgcgcgtaagtcgcttgtccgtggcttctctgagaagaaaagttgaaaaagggtaaaagttttcaggaatattcgggctctctattgctaagcatagcgagtgtcggttttctctctccaacagacatcgctattgcggttccgaggcagtgggaagagatgcggcccctggacatcgtcgagctggcggaaccggaggaagtggaggtgctggagcccgaggaggatttcgagcagtttctgctcccggtcatcaacgagatgcgcgaggacatcgcgtcgctgacgcgcgagcacgggcgggcgtacctgcggaaccggagcaagctgtgggagatggacaatatgctcatccagatcaaaacgcaggtggaggcctcggaggagagcgccctcaaccacctccagaacccgggcgacgcggccgagggccgggcggccaagaggtgcgagaaggccgaggagaaggccaaggagattgcgaagatggcagagatgctggtggagctggtccggcggatagagaagagcgagtcgtcgtgagcgcggtcggcggtttccagccaatggattctggtcaactggtggagattggctgacaccctggagaagccgaaaccagagagccttttgttttctcttttttcctgtctatgctctgtctcacttaacactacgttttctgctatggtctgtggttgatgacctcaatatgagtttcgattgttaacgtgtttttgtttgggaagtaattttgtttgaaaatgctctcacatacaggaattagggcctagattgtaagctcttgcagcagtcacatttgttcccgggctttggtggttatttctaaatttttgaggtgctttgctatttcttgtgtgacctgatagctccctggaactttgggtctgtgtgtgacacatgagactcacagttggagttctccagctctggaggtgctgaaggagctgcattaattctggaagacgactccatgcagcaactactgaagaaaggaccagacttcaacggggagtgtggatgggccgacctggctgggactcgtgaatctggagaagagctggagaatggatagtattgtctgtatttggagactttaatttctgtgtgagaccaaaggaggagagatgtgttttgttcaaaatttaaatttgttgtggtacactatcttatgtaacctgtctggtgagtttgtttggacaacctaactcagctttatttgacatggaacctaaaatagaagataagatcttgatattctgtacaagttgatgtaataccctgatgcgttttagaggacttggcataaaatgaaagattggcaaaggcccttgaggggcttggggatgacagtatggaactgtctgcattggaccctaaactggactagaagaggcatcttcaaggttcatacgttgtccagctgtaagttcatttgagtagcagacctaacaaatatttgaggtcagaaccctaccatgttaaaacaaacaaaaacttaccatgttaataaaagtattcatttgcttgaaaagacgaaagacctaaaa

SEQ ID NO: 155331 - DNA, 563 bp, Homo sapiens
  Payload ID: 10537
  Gene Symbol: MRFAP1
  Gene Name: Morf4 family associated protein 1
  Uniprot ID: Q9Y605
  ENST ID: ENST00000507420
  CDS Start-End: 106-489
ttttgttcgccgttactctgcgcgtaagtcgcttgtccgtggcttctctgagaagaaaagttgaaaaaggacatcgctattgcggttccgaggcagtgggaagagatgcggcccctggacatcgtcgagctggcggaaccggaggaagtggaggtgctggagcccgaggaggatttcgagcagtttctgctcccggtcatcaacgagatgcgcgaggacatcgcgtcgctgacgcgcgagcacgggcgggcgtacctgcggaaccggagcaagctgtgggagatggacaatatgctcatccagatcaaaacgcaggtggaggcctcggaggagagcgccctcaaccacctccagaacccgggcgacgcggccgagggccgggcggccaagaggtgcgagaaggccgaggagaaggccaaggagattgcgaagatggcagagatgctggtggagctggtccggcggatagagaagagcgagtcgtcgtgagcgcggtcggcggtttccagccaatggattctggtcaactggtggagattggctgacaccctggagaagccgaa

SEQ ID NO: 155332 - DNA, 2112 bp, Homo sapiens
  Payload ID: 10537
  Gene Symbol: MRFAP1
  Gene Name: Morf4 family associated protein 1
  ENST ID: ENST00000617365
  CDS Start-End: 773-1084
gtctcactctgatgcacaggctggagagcagtggcgcgatatgggctcactgcaacctccgcctcccgttttcaaacgattgtctcagcctcccaagcagctggggttacacgcgtgcaacacgacgcccggctaatttttgtatttttggtagagacggggtctcgccatgtcggccaggctggtctcgaattcctgacctcaagccatccacccacctcgcctcccaacgtgctgagattacaggcgtgagccaccgcgcctgggaagtgcgggaggcctttttaaaaaatgtaaactcgcgtgctcaagaagccctatcggagggaaacacccagaagaggccaccctccaaacacagggtaaaacaggggtgacgcacagaggtaacgggaaagcaggaacgagcgagagcgtgcggtcccgtacctgcgcgtgcctgcgtgcgcgtccgtgcggccgcgacgccgccgccggtgcctctctttctagacgtgcgcgcgcccgcagctcgcccccctgaccgtaaagaggcccggctgtgtcgtgaaaggggccgcaacgcgcagagcgctggttgacggccgggactccattttgttcgccgttactctgcgcgtaagtcgcttgtccgtggcttctctgagaagaaaagttgaaaaagggtaaaagttttcaggaatattcgggctctctattgctaagcatagcgagtgtcggttttctctctccaacagacatcgctattgcggttccgaggcagtgggaagagatgcggcccctggacatcgtcgagctggcggaaccggaggaagtggaggtgctggagcccgaggaggatttcgagcagtttctgctcccggtcatcaacgagatgcgcgaggacatcgcgtcgctgacgcgcgagcacgggcgggcgtacctgcggaaccggagcaagctgtgggagatggacaatatgctcatccagatcaaaacgcaggtggaggcctcggaggagagcgccctcaaccacctccagaacccgggcgacgcggccgagggccgggcggccaagaggtgcgagaagagcgagtcgtcgtgagcgcggtcggcggtttccagccaatggattctggtcaactggtggagattggctgacaccctggagaagccgaaaccagagagccttttgttttctcttttttcctgtctatgctctgtctcacttaacactacgttttctgctatggtctgtggttgatgacctcaatatgagtttcgattgttaacgtgtttttgtttgggaagtaattttgtttgaaaatgctctcacatacaggaattagggcctagattgtaagctcttgcagcagtcacatttgttcccgggctttggtggttatttctaaatttttgaggtgctttgctatttcttgtgtgacctgatagctccctggaactttgggtctgtgtgtgacacatgagactcacagttggagttctccagctctggaggtgctgaaggagctgcattaattctggaagacgactccatgcagcaactactgaagaaaggaccagacttcaacggggagtgtggatgggccgacctggctgggactcgtgaatctggagaagagctggagaatggatagtattgtctgtatttggagactttaatttctgtgtgagaccaaaggaggagagatgtgttttgttcaaaatttaaatttgttgtggtacactatcttatgtaacctgtctggtgagtttgtttggacaacctaactcagctttatttgacatggaacctaaaatagaagataagatcttgatattctgtacaagttgatgtaataccctgatgcgttttagaggacttggcataaaatgaaagattggcaaaggcccttgaggggcttggggatgacagtatggaactgtctgcattggaccctaaactggactagaagaggcatcttcaaggttcatacgttgtccagctgtaagttcatttgagtagcagacctaacaaatatttgaggtcagaaccctaccatgttaaaacaaacaaaaacttaccatgttaataaaagtattcatttgcttgaaaagacgaaagacctaaaa

SEQ ID NO: 155333 - DNA, 1593 bp, Homo sapiens
  Payload ID: 10538
  Gene Symbol: MRFAP1L1
  Gene Name: Morf4 family associated protein 1-like 1
  Uniprot ID: Q96HT8
  ENST ID: ENST00000320848
  CDS Start-End: 252-635
cgagttgacggctgcgactccattttgtaggccgcttatttgtgtgcatccacggcgattcttcccgcagagttgtgaagcgaaaggcttacaattaaaaggaagaaaaaaaaataaagataattcgggagtacaattgacaaagcgtgtgggtcgctcagcctccagcagtaactgctgatctccagttcttggagggttccggtgagaagaacgcccctactgcggtactgaggaagcggcaggaggagatgcggcccctggacatagacgaggtggaagcgcctgaggaagtggaggtgctggagcccgaggaggatttcgagcagttcctgctcccggtcatcaacgagatgcgcgaggacatcgcgtctcttatacgcgagcacgggcgggcgtacctgcggaccaggagcaagctgtgggagatggacaatatgcttatccagatcaaaacgcaggtggaggcctcggaggagagcgccctcaatcacgtgcagcacccgagtggcgaagccgacgagagagtgtcggagttgtgcgagaaggctgaggagaaagccaaggagattgcgaagatggcagagatgctggtcgagctcgtctggcgaatagagagaagcgagtcttcttgaaggaggagatcggtggttcacagctgaggactgtagtcaactggtaaggatgaactgacaccttgaggaaactgaaacagcttgtcattttctctgttttgtttttgtatgttttttaccccgatgtaacagtctcccttatggtcagtgattgatgacctcgatatggatttagattatcaaatgtgtttggttttggaaatataacttttgtcaaagaaatactctcagaagagaaatggggcttaattaagttgtttttgtggtcacgtttattcttgttacttcgctgtgtttttgaaatgttgggcatggcctcgtattttgctgttacctttgtgacctgattgttttttggaacacgtcaagacgtgggatcagaatcttccaactttagaggtgcaatggaagacactacgctacttggttgagcctggtgaagaatgtattaatgagactgctttgcataaaactgggaagaaagagaagacagttggagatggaagatggttttgtatatattttggaactttagttcctctgtgagacgaaagaggagagctatgttttgtggcacattgtctgatatatattgtgtaacctgtcaggtgagttgatttagacaacatagctgaccttttatgacaaggcagtttgaatagggactattgtaataccctcacacattataggggcatcagagaatggcatggaagagacagtctacagagagctttaagaggccggagaaaggaaaagacattatcagggcctggaaagtctcttccagttcatcagggtagtagacctgtcagattggaggtcaaagtcaaaagtataataagtgttaatttgccttgaaaaacaaagacctaaaaagccttttttaagaaataaattttttgttcacatgaccaaagcccctcctgtgtgtgttaataaaagaatcataaacaaa

SEQ ID NO: 155334 - DNA, 1648 bp, Homo sapiens
  Payload ID: 10539
  Gene Symbol: MORN1
  Gene Name: MORN repeat containing 1
  ENST ID: ENST00000378525
  CDS Start-End: 139-609
ctctggctccgggcccggctagcttcgctccagagattgcgcgggctcagggactaggcccgtggccacacccccccttgcgacaaagaccaatggaagcgggcgttgctggtcgctaagagaaccctcggcggcaagatggcagcggcgggcgagggcaccccgagctcccgcgggccgcgtcgggacccgcctaggcggccgccccggaacggtcacgggaagttgttatttaaagatggcagttattacgaaggggcgtttgtggacggagagatcacgggagaaggccgccggcactgggcctggtcaggagacaccttctctggacagtttgttctgggagagcctcaaggctacggcgtcatggagtacaaagccggcggatgttatgaaggggaggtctcccacggcatgcgggaaggacacgggtttctggtggaccgggatggacaagtgtaccagggctccttccatgacaacaagaggcacggccctgggcagatgctctttcagaacggtgacaagtacgacggcgactgggtccgggaccggcgtcagggacacggggtgctgcgctgcgccgacggctccacctacaagctctgatccacccatctatagtaggagaaactcaaggagacatcggctgctacccaggcaccatgagctcagggttggtgaggcccctccgggagacctgttctccctctcgacagcagcttcttctgacggaaaataagaacagcggatcccaaagcagagaaggctcctcttccacagggacaggagccacgcggctcaggccggtcccggaagccacagaggtcctgggccacgagcacccccaccagcctgtgacgcctcagccatctccgtcccccacactcctagtttacagcttactgctcgacctcccaggacccgagggcttgggcaggccccacacgtcctccagaacatcctcggtgggagacggagcagacagagtagaggccacacgtgtgtgtgcacatcagagtgtctcctacccatgttggcagcagcgcggccctccgggcatccctggctgtatcagctgcgccgtgagtgttggctgtctcacacgccagctttcccggagttgccgctgggtgccgagcacctgctcactgcacggagcaggtggctccttctgggcggctttgcctgccgcagtccccgagcctcctctcctcagctgggcgtgtgtgggaatgcccaaccgggggcctccacggggcctatagcctccacgtttgggcctactgcccttggacccaggggtcacagtccaggaagcctgggccagtgggggactcctggggtgcatgtaacactgagaatcatgtagataatttggggtgtttgagcacgcatggcctgtggggagtctggccggcttgcctcatgtggaccccccaccaccctggggcagaggagggggccggctgttggggccgtcatggaagcactagggttacactagggcaggccccatgtcccctctggaactcctcacagttcacaccttgaagcccaggcacttgcgatgggaccagcgaggtcaaatgcaggacccctggtcctcactgttaccatgaagtgatgcaaatggccggtcttcaga

SEQ ID NO: 155335 - DNA, 1500 bp, Homo sapiens
  Payload ID: 10539
  Gene Symbol: MORN1
  Gene Name: MORN repeat containing 1
  Uniprot ID: Q5T089
  ENST ID: ENST00000378529
  CDS Start-End: 175-1227
gacagcggcggaaacgcgcacaggcgcagctgcgtcctctggctccgggcccggctagcttcgctccagagattgcgcgggctcagggactaggcccgtggccacacccccccttgcgacaaagaccaatggaagcgggcgttgctggtcgctaagagaaccctcggcggcaagatggcagcggcgggcgagggcaccccgagctcccgcgggccgcgtcgggacccgcctaggcggccgccccggaacggttatggtgtctacgtatacccaaattccttctttcgatatgaaggagaatggaaagcagggaggaagcacggtcacgggaagttgttatttaaagatggcagttattacgaaggggcgtttgtggacggagagatcacgggagaaggccgccggcactgggcctggtcaggagacaccttctctggacagtttgttctgggagagcctcaaggctacggcgtcatggagtacaaagccggcggatgttatgaaggggaggtctcccacggcatgcgggaaggacacgggtttctggtggaccgggatggacaagtgtaccagggctccttccatgacaacaagaggcacggccctgggcagatgctctttcagaacggtgacaagtacgacggcgactgggtccgggaccggcgtcagggacacggggtgctgcgctgcgccgacggctccacctacaagggacagtggcacagcgacgtcttcagtggactgggcagcatggcccactgctcaggggtcacctattatgggttgtggatcaatggccacccagcagaacaagctacgaggatcgtgatcttgggtccggaggtgatggaagtggcccaagggtctcccttctcggtgaacgttcagctgctgcaggaccacggggaaattgccaagagcgagagcggccgggtcctgcagatctcagcgggcgtcagatacgtgcagctgtcagcctactctgaggtcaactttttcaaagtggacagagacaaccaagagacactcatccagaccccatttgggttcgaatgcatcccttatcctgtgtccagccccgcagctggggtgccggggcccagagctgccaagggaggggcagaagccgacgtgcccctgcccaggggagacctggagctgcatttgggtgccctccatggccaggaggacacccctggtggcctgcttgggagctcactcttctaggatcagacgagtctccttccagacaacagctgtgagaggaccagcaagcgcaggcgtcattcatcatataaaagagcatgcaggcatcccaggtggggcagcagggcccggcgccactccacgggaggccaaggcggccaagcctcaggccaacaggcccacggggggcccggcccgcgcccccttgtctgccttcacctcagttgatagaagcagttccacaccgcataggtggaatagctctcatatttctgcataaaaatacttactggg

SEQ ID NO: 155336 - DNA, 1798 bp, Homo sapiens
  Payload ID: 10539
  Gene Symbol: MORN1
  Gene Name: MORN repeat containing 1
  Uniprot ID: Q5T089
  ENST ID: ENST00000378531
  CDS Start-End: 175-1668
gacagcggcggaaacgcgcacaggcgcagctgcgtcctctggctccgggcccggctagcttcgctccagagattgcgcgggctcagggactaggcccgtggccacacccccccttgcgacaaagaccaatggaagcgggcgttgctggtcgctaagagaaccctcggcggcaagatggcagcggcgggcgagggcaccccgagctcccgcgggccgcgtcgggacccgcctaggcggccgccccggaacggttatggtgtctacgtatacccaaattccttctttcgatatgaaggagaatggaaagcagggaggaagcacggtcacgggaagttgttatttaaagatggcagttattacgaaggggcgtttgtggacggagagatcacgggagaaggccgccggcactgggcctggtcaggagacaccttctctggacagtttgttctgggagagcctcaaggctacggcgtcatggagtacaaagccggcggatgttatgaaggggaggtctcccacggcatgcgggaaggacacgggtttctggtggaccgggatggacaagtgtaccagggctccttccatgacaacaagaggcacggccctgggcagatgctctttcagaacggtgacaagtacgacggcgactgggtccgggaccggcgtcagggacacggggtgctgcgctgcgccgacggctccacctacaagggacagtggcacagcgacgtcttcagtggactgggcagcatggcccactgctcaggggtcacctattatgggttgtggatcaatggccacccagcagaacaagctacgaggatcgtgatcttgggtccggaggtgatggaagtggcccaagggtctcccttctcggtgaacgttcagctgctgcaggaccacggggaaattgccaagagcgagagcggccgggtcctgcagatctcagcgggcgtcagatacgtgcagctgtcagcctactctgaggtcaactttttcaaagtggacagagacaaccaagagacactcatccagaccccatttgggttcgaatgcatcccttatcctgtgtccagccccgcagctggggtgccggggcccagagctgccaagggaggggcagaagccgacgtgcccctgcccaggggagacctggagctgcatttgggtgccctccatggccaggaggacacccctggtggcctgcttgccaggggacatgcgccccattgtcccggggcctgtcagcgagtggagcagggctgtgccgagttcacagatgtcctcctggggccgcccccgcctgggtaccaccccttcctgttcctggacagcctccacaagaaggcaggcggcagatccagaggcggcctgcaccccagggggacaccacccacggcacaggagcctcctggaggcagcaggcctgaggggagagccacggaggagcaggctgcggcagcacacctaggggagtacgtgctcatgatccgcgacgtgaccaccccgccgttcctggggcgcaggctgcccccggccttcaaacacctgcgggtcgtagcgaagagggctggccagccaccccatgtcctggaagaaggccctgaagcctcaagcagctggcaggccgcccacagctgcaccccagagccgccagcgcctcggtgaggccccgtgtccacaggaggccacctcggtgtgaatggaaggaaacgctgcctctgcttgcgtgactctgctccccgattctccagagccccgtggttgctggcttgaataaaatgctcagtggcggcta

SEQ ID NO: 155337 - DNA, 4764 bp, Homo sapiens
  Payload ID: 10539
  Gene Symbol: MORN1
  Gene Name: MORN repeat containing 1
  ENST ID: ENST00000449373
  CDS Start-End: 1-558
gtcacgggaagttgttatttaaagatggcagttattacgaaggggcgtttgtggacggagagatcacgggagaaggccgccggcactgggcctggtcaggagacaccttctctggacagtttgttctgggagagcctcaaggctacggcgtcatggagtacaaagccggcggatgttatgaaggggaggtctcccacggcatgcgggaaggacacgggtttctggtggaccgggatggacaagtgtaccagggctccttccatgacaacaagaggcacggccctgggcagatgctctttcagaacggtgacaagtacgacggcgactgggtccgggaccggcgtcagggacacggggtgctgcgctgcgccgacggctccacctacaagctctgatccacccatctatagtaggagaaactcaaggagacatcggctgctacccaggcaccatgagctcagggttggtgaggcccctccgggagacctgttctccctctcgacagcaggtgtgttttctgcaaaccgtgtctcctgccttgcagccagtattccttaatgcaaagctctatgaagaacctttttttaaaaatgcattctagaaaaaaatgcattcctgaaaataaacgtgttacagcttcttctgacggaaaataagaacagcggatcccaaagcagagaaggctcctcttccacagggacaggagccacgcggctcaggccggtcccggaagccacagaggtcctgggccacgagcacccccaccagcctgtgacgcctcagccatctccgtcccccacactcctagtttacagcttactgctcgacctcccaggacccgagggcttgggcaggccccacacgtcctccagaacatcctcggtgggagacggagcagacagagtagaggccacacgtgtgtgtgcacatcagagtgtctcctacccatgttggcagcagcgcggccctccgggcatccctggctgtatcagctgcgccgtgagtgttggctgtctcacacgccagctttcccggagttgccgctgggtgccgagcacctgctcactgcacggagcaggtggctccttctgggcggctttgcctgccgcagtccccgagcctcctctcctcagctgggcgtgtgtgggaatgcccaaccgggggcctccacggggcctatagcctccacgtttgggcctactgcccttggacccaggggtcacagtccaggaagcctgggccagtgggggactcctggggtgcatgtaacactgagaatcatgtagataatttggggtgtttgagcacgcatggcctgtggggagtctggccggcttgcctcatgtggaccccccaccaccctggggcagaggagggggccggctgttggggccgtcatggaagcactagggttacactagggcaggccccatgtcccctctggaactcctcacagttcacaccttgaagcccaggcacttgcgatgggaccagcgaggtcaaatgcaggacccctggtcctcactgttaccatgaagtgatgcaaatggccggtcttcagaaaccagagctagccccacccgtgccaccaaggcacaccagcccctgagcagtcgcagggcccaggcagaagggtccggcaggctcctcactcatgacgtggcctgagggggctgggcagctggtcctcggagcccccacctggtgcaccaggccgtgaacctcagcaaaggccccgtctcttgatgcccaaggtttggcaatggttgggggttactttctccagaccacagcaccctcgaggccaacactggggaaagctggagcccctgctcttcacccccacctcccagggctgttgaaccccaaggagcaccagacccaggacccccccaggagggccagaggcaggaagtgcctgatggtgccaggggagggtggatgcctgactagggcctgaaaacagagggcatagcttccaataaagcatggaaagaaaacagcatgaatggaccagaagtgcttcccattgggagaaagaagagcactcacaacctcttctgccccaggctgcttggagtgggccagcgccagagcagtccctgcaccagccgagccgtccgagcttgtcgactatcagggaaggtgtgagccttcggctgagtggtgctgggagctggggagagccgagcactgcccggggcctcctgagtgctctgccacccggctgggcagggaagggagggcccctcacagaggacacccttgtggtcctggggtcgcctttgtgaccgagggggacgtatgtgtgtcaccatcatcctgcacgactgcttcctgactttggaaccgctgtttgcctctgtgttttgggtgtggacctggaccccagtggcccttccccaaaggtcgtgtgaccaccaccaccttcccgtgtcccgtaccgcacacctgtgctcacctgggtgccaggcagtggcccagcagggaggaggagggtgagcaggtggcaaaatgcccattcctcggtcccagcctgtgtgtggctgaggccccgcacgtaactctccacgctgggcatcggcctggactgtgcctgggtgctccctgaggcccgggtgggaggcagctgctccaggactctcagtgtcccagtctgtgccgtcagcaggaggatcaggagcctcccctgcaccctatttaataagctcttgctcgttcctgcttggggtacatgaaacagaaacagccgaattgtcaaaggtgtgattgataacgtgaattagacaagaccgggctattggatcagttgaattgatcactcaaatgtgcttggactgaccaagtgctgcatgaaagcttgcctggctcagccctcccacccggacaccagcggtgggtaccgaggatgccaagccctgacctgattgctgcgcacccagggagggggatgccaggcaggctcgtgccacatacgtgagccgcagccccagaccaaccatgggaggagccactcaccccaaaggcgggctctgcacctctgcatttctcatgactcgagtgtgtctggcttcccctgcccagccacagcctcactgggtactcaccctggacgccatattgcagctggtgtcagccctgccccgcagctccacctccctcctcctgaaagcccggggcaccttccagaggccgagcaggtggaagggggcagagaccagacatcgccattctcatcactgacggtgacgggggccccggacgccctgaagagccctcagctgtgcgctgactcgcgcctctccccgtccagcgtgaatgagatgagagacagtgaggacaatggtcccaggaagggaccctcaagagatgccaatcaaatgcgttggactctcacccagtttggtgggaacgtctggagtcataggacagagagctgagggggcaaggctgaggggaggtgctctgtggatgcaagggtgcccacggcctccaacagggcatggcatggcctccaggcatgccgtgcagcagcagtcagggcagcccatggactctgcgccagtccttggtagctgaagcccagaaccactctcacctgaccccacatgtggtcagctctggggcccccatccactgtagttgccagtgtggatggtgcttgcccagagcccagggtggcacggtgaaccggactctgatcttcagggcaactgtctaggccgatggggtgacgtcagtggtgcgctcagcttggaacactgcaggaatgcagccgggtgggtgctggctgggatcttggggtctgggagctggaggaacaagagcctcaggagcaagggccctgtccagacagcagccgggcctctgcccacctggcaccccgagctggctgcccagcctctcctgaagctgagagctgcctttttgctgcctccgggcacccacgcgggctgccagttgtctcggatcggagccccctgcctggaggcgtgagccgtgctcccagccagcagctgtgagttgcccccaccctgccccagcccttcatgtactgtggctctccctggcctttggggcaatccagtcgccttcaggactgtctgcagaggccctgtctccctgcagccagagagagctccagcgccatccacttgtccctgatctgccacactcctcagccctggccctcggccctcgctgtctcttcccacacatcccagggcccaggatccgtggagaagccccagaaggcacacgctgcgccctgcagacctgccaccgctgcctcggggttcccctgggaaaggcacccagggagggccgggcagggaagcaggagcccacttggctcctgccagagagtgaacagaagcaaaacgtgcctttggttaatttttcttctaatagaagtaattcagagtcaaatgaaataccatttaaattttccatgaaaataatcaccctgctatttcacatgattttcccaggctttgttgtatgacttggaaaccaggcttgttatgaaggaggcagagttggggtgtacagcgaacaggcatttctcccaagctcacgggcacattttttcaaactgtgttttttaattggcctcttcatgtataaatgaacagtgtaacggacaagcagggcaccttaatcccaacgccacagtcggccagtttgcgggttcaggcctcctttatgatacatgccacaaacacaatatctttgtattaaaaggattttttttttttgctgaaa

SEQ ID NO: 155338 - DNA, 406 bp, Homo sapiens
  Payload ID: 10539
  Gene Symbol: MORN1
  Gene Name: MORN repeat containing 1
  ENST ID: ENST00000494279
  CDS Start-End: 1-182
gttatggtgtctacgtatacccaaattccttctttcgatatgaaggagaatggaaagcagggaggaagcacggtcacgggaagttgttatttaaagatggcagttattacgaaggggcgtttgtggacggagagatcacgggagaaggccgccggcactgggcctggtcaggtgagctctagctgggatggcacattcactcctttctcataacccatcgggctcagttggtccgccgagtctagatgcagaaggcgtgacgtgtagacgggaagctttgtgccgtgagaggcctggcctaccgagaagccctggggacctgactgaggctctgtggtcaccgctgagagcaactcaggcttccggagacacttttctagaataaagatttatctgtcccaagtta

SEQ ID NO: 155339 - DNA, 741 bp, Homo sapiens
  Payload ID: 10540
  Gene Symbol: MORN2
  Gene Name: MORN repeat containing 2
  Uniprot ID: Q502X0
  ENST ID: ENST00000340556
  CDS Start-End: 308-547
attcgcttccgggtgagaggtgcccggtcgccccagcaaccaagtcgcacctggagctgtcctagcgcctagttctctcccggccgcagagctggccgcccagggggagtcgcagagtttggaagatctctctaacacctctcggccaacttcagaagtgtataagatcagctttatctttccaaatggagacaagtatgatggtgactgtacaagaacatcttctggaatctacgagagaaatggaataggtattcataccactcctaatgggattgtctacacaggaagctggaaagatgacaagatgaatggttttggaagacttgagcatttttcaggagcagtatatgaaggacaatttaaggataatatgtttcatggactggggacttacacattcccaaatggggcaaagtatactggaaatttcaatgaaaatagggtggaaggtgaaggggaatatactgatatccaaggactagaatggagtggtaactttcattttacagctgctccagacctgaaattaaagcttcacatgtagatgtgatgttaaattaaagttgaaatgtagtaattgaagcttttagttgtaaggaaagcaacttaatctgttatttgaaatgacttcatacactacccctataagtttgccaataaaaccatcacctgcttacacctttttgaactttatattcattgtcttacaattagtttaaaataaatgacatgattcaa

SEQ ID NO: 155340 - DNA, 750 bp, Homo sapiens
  Payload ID: 10540
  Gene Symbol: MORN2
  Gene Name: MORN repeat containing 2
  Uniprot ID: Q502X0
  ENST ID: ENST00000410014
  CDS Start-End: 380-619
gccccagcaaccaagtcgcacctggagctgtcctagcgcctagttctctcccggccgcagagctggccgcccagggggagtcgcagagtttggaagatctctctaacacctctcggccaagtgagtgtccctcctcctaacgacccgggcagagaagagctcctttaagtcgaactagcgtggagtcagaacctgcttggctcccggtaactcctgtggggcttcagaagtgtataagatcagctttatctttccaaatggagacaagtatgatggtgactgtacaagaacatcttctggaatctacgagagaaatggaataggtattcataccactcctaatgggattgtctacacaggaagctggaaagatgacaagatgaatggttttggaagacttgagcatttttcaggagcagtatatgaaggacaatttaaggataatatgtttcatggactggggacttacacattcccaaatggggcaaagtatactggaaatttcaatgaaaatagggtggaaggtgaaggggaatatactgatatccaaggactagaatggagtggtaactttcattttacagctgctccagacctgaaattaaagcttcacatgtagatgtgatgttaaattaaagttgaaatgtagtaattgaagcttttagttgtaaggaaagcaacttaatctgttatttgaaatgacttcatacactacccctataagtttgccaataaaaccatcacctgctt

SEQ ID NO: 155341 - DNA, 648 bp, Homo sapiens
  Payload ID: 10540
  Gene Symbol: MORN2
  Gene Name: MORN repeat containing 2
  Uniprot ID: Q502X0
  ENST ID: ENST00000409665
  CDS Start-End: 277-516
cctggagctgtcctagcgcctagttctctcccggccgcagagctggccgcccagggggagtcgcagagtttggaagatctctctaacacctctcggccaacttcagaagtgtataagatcagctttatctttccaaatggagacaagtatgtttttctcctctgtttagatggtgactgtacaagaacatcttctggaatctacgagagaaatggaataggtattcataccactcctaatgggattgtctacacaggaagctggaaagatgacaagatgaatggttttggaagacttgagcatttttcaggagcagtatatgaaggacaatttaaggataatatgtttcatggactggggacttacacattcccaaatggggcaaagtatactggaaatttcaatgaaaatagggtggaaggtgaaggggaatatactgatatccaaggactagaatggagtggtaactttcattttacagctgctccagacctgaaattaaagcttcacatgtagatgtgatgttaaattaaagttgaaatgtagtaattgaagcttttagttgtaaggaaagcaacttaatctgttatttgaaatgacttcatacactacccctataagtttgccaataaaaccatcacctgctta

SEQ ID NO: 155342 - DNA, 465 bp, Homo sapiens
  Payload ID: 10540
  Gene Symbol: MORN2
  Gene Name: MORN repeat containing 2
  ENST ID: ENST00000409077
  CDS Start-End: 143-283
ctcccggccgcagagctggccgcccagggggagtcgcagagtttggaagatctctctaacacctctcggccaaatggtgactgtacaagaacatcttctggaatctacgagagaaatggaataggtattcataccactcctaatgggattgtctacacaggaagctggaaagatgacaagggtggaaggtgaaggggaatatactgatatccaaggactagaatggagtggtaactttcattttacagctgctccagacctgaaattaaagcttcacatgtagatgtgatgttaaattaaagttgaaatgtagtaattgaagcttttagttgtaaggaaagcaacttaatctgttatttgaaatgacttcatacactacccctataagtttgccaataaaaccatcacctgcttacacctttttgaactttatattcattgtcttacaattagtttaaaataaat

SEQ ID NO: 155343 - DNA, 544 bp, Homo sapiens
  Payload ID: 10540
  Gene Symbol: MORN2
  Gene Name: MORN repeat containing 2
  ENST ID: ENST00000409131
  CDS Start-End: 234-407
gagtcgcagagtttggaagatctctctaacacctctcggccaacttcagaagtgtataagatcagctttatctttccaaatggagacaagtatgatggtgactgtacaagaacatcttctggaatctacgagagaaatggaataggtattcataccactcctaatgggattgtctacacaggaagctggaaagatgacaaggagcagtatatgaaggacaatttaaggataatatgtttcatggactggggacttacacattcccaaatggggcaaagtatactggaaatttcaatgaaaatagggtggaaggtgaaggggaatatactgatatccaaggactagaatggagtggtaactttcattttacagctgctccagacctgaaattaaagcttcacatgtagatgtgatgttaaattaaagttgaaatgtagtaattgaagcttttagttgtaaggaaagcaacttaatctgttatttgaaatgacttcatacactacccctataagtttgccaataaaaccatcacctgcttacacct

SEQ ID NO: 155344 - DNA, 919 bp, Homo sapiens
  Payload ID: 10540
  Gene Symbol: MORN2
  Gene Name: MORN repeat containing 2
  ENST ID: ENST00000441049
  CDS Start-End: 279-485
gccccagcaaccaagtcgcacctggagctgtcctagcgcctagttctctcccggccgcagagctggccgcccagggggagtcgcagagtttggaagatctctctaacacctctcggccaacttcagaagtgtataagatcagctttatctttccaaatggagacaagtatgatggtgactgtacaagaacatcttctggaatctacgagagaaatggaataggtattcataccactcctaatgggattgtctacacaggaagctggaaagatgacaagatgaatggttttggaagacttgagcatttttcaggagcagtatatgaaggacaatttaaggataatatgtttcatggactggggacttacacattcccaaatggggcaaagtatactggaaatttcaatgaaaataggggaagtcaagcctctctactgcttctttttataacctttaagttaattcagaacccagataagccttgatctgaggatgatataaccaccgcaggcaacatgggaacttctagagaaaacaagaagaagacttcaaaaaacatgctgtgatgtctcccagtggagacagggcacgaggtgcagggaagaggaggtggcctgagccaggacgatgaggatgcaatgttgaagaataagctggagaagagaagtaaccggcactatggaaaaaaccaaaacaaagcaaggagagaatgaacatatgccggtgaataatccttccacgcagatttaccagttgcaggccctagcctccgaactcaaaactggtttcacagaagcaatgcaagaactgtcaagaattcaacatggagaatatgctttggaagaaaaggttaagagctgcagatgttccatggaagaaaaagttactgagatgaagaattcattaaactatttcaagg

SEQ ID NO: 155345 - DNA, 3803 bp, Homo sapiens
  Payload ID: 10541
  Gene Symbol: MORN3
  Gene Name: MORN repeat containing 3
  Uniprot ID: Q6PF18
  ENST ID: ENST00000355329
  CDS Start-End: 172-894
agtccagcactaaaggatccccactaagggctgttcacctgccccagggactcagaacacacatgactctccccacttgagctcaggatcccggcattacacggggcgcgctgagccccagatgtccctaacccctttccagcaccctccagccttgcagaagcagccaccatgccagtctctaagtgcccaaaaaagtcggagtccctgtggaaggggtgggaccggaaggcccagaggaacggcctgcggagccaggtatacgctgtgaatggcgactactatgtgggcgagtggaaggacaacgtgaaacacgggaaaggaacacaggtctggaagaagaaaggagccatctatgagggggactggaagtttgggaagcgagacggctacggcaccctcagccttcctgaccaacagacaggaaagtgcaggagagtctactcaggctggtggaaaggtgataagaaatcgggttatgggatccagtttttcggacccaaggagtattatgagggtgactggtgtggcagccagcgcagcgggtggggccgcatgtattacagcaacggcgacatctacgagggacagtgggagaacgacaagcccaacggggagggcatgctgcgcctgaagaacgggaaccgctacgagggctgctgggagagaggcatgaagaacggggcggggcgtttcttccatctggaccacggccagctgtttgaaggcttctgggtggacaatatggccaaatgcgggacgatgatcgactttggccgtgacgaggcccctgagcccactcagttccccattcctgaggtcaaaatcctagaccctgatggtgtgctggcggaggccttggccatgttcaggaagacagaggaaggagattgatgccagagaacacaaacgcttcaggagaaattcaagcctgtgtcacccgatcgctcagaccagtgcggctctggctggaggagtcagcagcagctccaggcatgaccccggcaccctcatagggcccctcactacccccagcactgggtcatttcttgccaataggaaggctggtgcttctctcccaggctgtcctcgggaccctcttcattctctgatctcatcctggaatgcatgagaataaagaataaccaagtggtataagcctgggcctatgggataaggatggggcactcgagggggctcagcagggctttcaggtttagaagagggaagacctgccttggctgggctgcctgggtttagcttgggggagtaagggcaggtcttaggccgggtgcagtggctcattcctgtaatcccagaacttgggaggccaaggtaagaggactgcctgaggccaggagttcgagaccagcttaggcaacatagcaagaccctgactctacaaaaaaaaattttaaaatataaaagaaaggaaaagaaaaagagaaagaaatggcaggtcccctgtgagataacccagatgacccagagagaaggcctgtatcctgccacactggctgccaagattggagatcataaaatttcctgaccacttctcagcctaacacagggctctcaaccttgaaatcccatggaaactttgcaaagctgtggaagcccaggtcccatgcccagagattcacaggttcacatctaattcatctggggtgaggcctgagctttcagaaaattccccaggtgattttttttttttaagacgtagtctccctctattgcccaggctggaatgcagtggcgcgatctcagctcactgcaacctctgcctcccatgttcaagcgattctcctacctcagcctcctgagtagctgggattacaggcgcatgccactgagcccagctaatttttgtatttttagtagagatggggtatcaccatgttggtcaggctggtcttgaactcctgacctcgtgatctgccccgctcagtctcctaaagtgctgggattacaggtgtgagccatcgagcctggccttttttttttttttttttttttttttgagacagagtcttgctctgtcacccaggctggagtgcagtggcacaatctcggctcactgcaacctcgcctccctggttcaagcgattatcctgcctcagcctcccaagtagctgggattacaggcacctgccaccaaggctaattttttgtatttttagtagagacagggtttcaccatgttggccaggacggtctcgatctcctgacctcgtgatctgcccgccttggactcccaaagtgctgggattacaggtgtgagccactgctcccagccaagatcagatgttcttgcataatgggcaggtgagctctggagtcacagtgcctgggcgtgaatctcggagctgtgtgttctcaggaatgtcacccaaactctgttctgttggtctcctcacttgcaatatggggcattaacagtacttaccacctggggttactgtggttagttactgtgaggatgagataaggcggtggttttaaactgtgggtaggattttgtcctccctcagccccactctttcttggggacatttggcaatgtatgacatttttgatgtcacaacaggcaggaagaaggctactggcattgagtgagtagagaccagggatgcggttaagcatagtgcaatatcaccatgctacaaaaaaaaaaaaaaaaaagaattcagcacctgtaatcccaactacttgggaggctgaggcaggagaattgcttgaacctgggtggcagaggttgcagtgagccgagattgcgccattgcactccagcctgggcgacagagcgagacaccatctccaaaaaaaaaaaaaaaaaaaatgttgagaaaccctgaaataccacgattctagctaagacctcagcaagaggcacatagcacatagtaaagcctcaataaacaccactgaccttactgaggttctctctgccccctaagtcataagtagggtggcctcaccaagggtgtggttctcagtctgtacctctggcactgggaagccccgcctggccaccctaggatgcagaattaatcataacttccagatatggagcactcactctattccaggccgtgtgctgacagcttcgcagcaagcattctctcctggcactccccgacaacagtgaggtgtcttgctattactgccattttagaggaggaaacaggttcagggaggatcacaagtcatcaagctagtactgtgcttaaacttaggtctagctgttcttaatgtgcagaagagtgtaaagggttaccatttttaaagaaaaagtgggggcagggcatggtggctcatgcctgtaatcctagcactttgagaggccgaggcaggcggatcaagaggtcaggagttcgagaccagcctgaccaacatggtgaaaccctgtctctactaaaaatacaaaaattagctgggtgtggtggagtgcatctataatcccagctactcaggaggctgaggcaggagaatcacttgaacccaggaggcggaggtagtggtgagccaagatcacgccgagccgagatcgtgccgctgctctccagcctgggcaacagagcgagactccatctcaaaaaaaaaaaaaatgttggaagagggtgtgcttgtttatgtacaaaatgtcgctagatttaaacacaataaactggcaaagatggttgtctctggggagaattggggacttgggaacaggagctgaagaacaacttttcagtgttgtgtttggaaccatgtgaatgtattatgtattcaaaatgtaaataaaaatgaagttaaagaga

SEQ ID NO: 155346 - DNA, 964 bp, Homo sapiens
  Payload ID: 10541
  Gene Symbol: MORN3
  Gene Name: MORN repeat containing 3
  Uniprot ID: Q6PF18
  ENST ID: ENST00000392462
  CDS Start-End: 168-650
cagcactaaaggatccccactaagggctgttcacctgccccagggactcagaacacacatgactctccccacttgagctcaggatcccggcattacacggggcgcgctgagccccagatgtccctaacccctttccagcaccctccagccttgcagaagcagccaccatgccagtctctaagtgcccaaaaaagtcggagtccctgtggaaggggtgggaccggaaggcccagaggaacggcctgcggagccaggtatacgctgtgaatggcgactactatgtgggcgagtggaaggacaacgtgaaacacgggaaaggaacacaggtctggaagaagaaaggagccatctatgagggggactggaagtttgggaagcgagacggctacggcaccctcagccttcctgaccaacagacaggaaagtgcaggagagtctactcaggctggtggaaaggtgataagaaatcgggttatgggatccagtttttcggacccaaggagtattatgagggtgactggtgtggcagccagcgcagcgggtggggccgcatgtattacagcaacggcgacatctacgagggacagtgggagaacgacaagcccaacggggagggcatgctgcgcctgagtcaaaatcctagaccctgatggtgtgctggcggaggccttggccatgttcaggaagacagaggaaggagattgatgccagagaacacaaacgcttcaggagaaattcaagcctgtgtcacccgatcgctcagaccagtgcggctctggctggaggagtcagcagcagctccaggcatgaccccggcaccctcatagggcccctcactacccccagcactgggtcatttcttgccaataggaaggctggtgcttctctcccaggctgtcctcgggaccctcttcattctctgatctcatcctggaatgcatgagaataaagaataaccaagtgg

SEQ ID NO: 155347 - DNA, 879 bp, Homo sapiens
  Payload ID: 10541
  Gene Symbol: MORN3
  Gene Name: MORN repeat containing 3
  Uniprot ID: Q6PF18
  ENST ID: ENST00000542364
  CDS Start-End: 83-565
cccgcggcgcgcgcagctgacggacattgaggctggatgctgcgatcccgcagcaccctccagccttgcagaagcagccaccatgccagtctctaagtgcccaaaaaagtcggagtccctgtggaaggggtgggaccggaaggcccagaggaacggcctgcggagccaggtatacgctgtgaatggcgactactatgtgggcgagtggaaggacaacgtgaaacacgggaaaggaacacaggtctggaagaagaaaggagccatctatgagggggactggaagtttgggaagcgagacggctacggcaccctcagccttcctgaccaacagacaggaaagtgcaggagagtctactcaggctggtggaaaggtgataagaaatcgggttatgggatccagtttttcggacccaaggagtattatgagggtgactggtgtggcagccagcgcagcgggtggggccgcatgtattacagcaacggcgacatctacgagggacagtgggagaacgacaagcccaacggggagggcatgctgcgcctgagtcaaaatcctagaccctgatggtgtgctggcggaggccttggccatgttcaggaagacagaggaaggagattgatgccagagaacacaaacgcttcaggagaaattcaagcctgtgtcacccgatcgctcagaccagtgcggctctggctggaggagtcagcagcagctccaggcatgaccccggcaccctcatagggcccctcactacccccagcactgggtcatttcttgccaataggaaggctggtgcttctctcccaggctgtcctcgggaccctcttcattctctgatctcatcctggaatgcatgagaataaagaataaccaagtgg

SEQ ID NO: 155348 - DNA, 2315 bp, Homo sapiens
  Payload ID: 10542
  Gene Symbol: MORN4
  Gene Name: MORN repeat containing 4
  Uniprot ID: Q8NDC4
  ENST ID: ENST00000307450
  CDS Start-End: 165-605
cggcgtcaagtggggcaatcgctggtggaggtggcggagagcaaggtggcagccgggagcccatcagaggaaaagtccgaggcgctggaaccctgcgtccaggcgtgacggtcatcccgaaaggccggccccagtttcatccttttatcctgtaatctgtcaccatgaccctgacaaaaggttccttcacctactccagtggggaggaatatcgtggcgagtggaaggagggccgcaggcatggttttggtcaactgatgtttgcagatggtggcacctacctgggtcattttgagaatgggctctttaatggctttggggtattgaccttctcagatggttcaaggtatgagggggagtttgcccagggcaagtttaatggcgtcggagtcttcattcgatatgacaacatgacctttgagggggaatttaaaaatggcagagtagatggttttggcctgctgactttccctgatggttctcatggaatcccccgcaatgaaggtctctttgagaacaacaagctgctgcgacgtgagaagtgttctgccattgttcagcgggcccagagcgcctccaagtcagccagaaatctcactgcctgacagcgcagtgggcaccagctgataagtattgggtaaagccagtgcccctgttgttgattcgaggtgaacaaatgaatcagagctgagatgagttgacaatgacagtggagcagaggccttgtatgtgccctgtcacctgccattccagaactggaccacagaaaagtgctgaggatgctggccagcagaccctgcagcagtcattggtggttctgtctttccctaacccttatgtgctggaggacagaggagccacctcttctcactggttgatactctgttcctaagacctcaggttacccagtgtagcctgctgtgacccttctgcttcattttctgccaagtgatacagaaccttcgttctgctgctttggggacaggtgatcctagccccagcttagggccagtgctctgtgccactctggagaaatagggaaaagataggggtggctcagtacagcagccctgtgaaagtcaaggccagagcttttcttttttaatttttttattattattattattattttattttttatttttgagatggagttttactctcgcccaggctagagtgcagtggcatgatctcagctcactgcaacttctgcctcccaggttcaagcaattcccctgcctcagcttcctgagtagctgggactacaggagcgcgccaccacacccagctaatttttgtatttttttttagtagagacggggtttcaccatattggccaggctggtctcaaactcctgacctcgtgatccacccgccttggtctcccaaagtgctgggattacaggcgtgagccaccacgctcagcctttaattttattattataaaaaattgagccagggtcttgctatgtggctcaggctcatctcaaaatcctgggctcaagtgatcctcctgcctgggcctgccaaagtgctaggattgcaggtgtgagccactgtgcctggctggcagagcttttccatatgttactcctcatgctggttggaatcatggctgcaggcttccacttggtctgatcagactggtattcattcctgcctatgtccccgtgaaggattcggtaagagtgctatttcctcctccctttagaagacaggctgtcttctttcatcaacttagagcagataatccccatgtgtgcctctctccttccttagatggggaacaggatccctttttgggacaatcaagaaaaaaactcatgtaaacagtaatcttattacttgtatttgtgactaactccagggaaaagggtagaatatttaggccacttcaggcactaccatggagtgaactgaattcatacggatggcttgggctgacacagtttcttcccagtggaccaataaatcagactcacccgaacccctggggttttggtagaattggacctactctaggactgtggggaactaaaggagcatttggctcactgtagctcttctatcatgagccttgaccgtcaggccgcaatcagaccttactgatgggatctctgcagtttattacgtaggcctcccgttaccctggtacccaaatacgtcccccacctctagctccctagcctcacattgaatgtctcttcaacagcagattgtggtggaagttatagccgtgtgcctctatttattctctgaattgtactgtagaaaaaggtgtttataaagaataaagaaatcaccagaactgccta

SEQ ID NO: 155349 - DNA, 419 bp, Homo sapiens
  Payload ID: 10542
  Gene Symbol: MORN4
  Gene Name: MORN repeat containing 4
  ENST ID: ENST00000370635
  CDS Start-End: 176-316
gcccaggatggcggcgtcaagtggggcaatcgctggtggaggtggcggagagcaaggtggcagccgggagcccatcagaggaaaagtccgaggcgctggaaccctgcgtccaggcgtgacggtcatcccgaaaggccggccccagtttcatccttttatcctgtaatctgtcaccatgaccctgacaaaaggttccttcacctactccagtggggaggaatatcgtggcgagtggaaggagggtgagaaggacccctggggagtatccatgatgaacacttcatttgctggaggacaaatacatcaggatatatagccaactttatggatcttcattttcaactccaggatttaattccatatagtgcctgccattcctttattccattttaggattaaataaaggaatttgaaaatgc

SEQ ID NO: 155350 - DNA, 2225 bp, Homo sapiens
  Payload ID: 10542
  Gene Symbol: MORN4
  Gene Name: MORN repeat containing 4
  ENST ID: ENST00000478953
  CDS Start-End: 185-385
agtgcggtcgcccaggatggcggcgtcaagtggggcaatcgctggtggaggtggcggagagcaaggtggcagccgggagcccatcagaggaaaagtccgaggcgctggaaccctgcgtccaggcgtgacggtcatcccgaaaggccggccccagtttcatccttttatcctgtaatctgtcaccatgaccctgacaaaaggttccttcacctactccagtggggaggaatatcgtggcgagtggaaggagggccgcaggcatggttttggtcaactgatgtttgcagatggtggcacctacctgggtcattttgagaatgggctctttaatggctttggggtattgaccttctcagatggttcaaggcctgctgactttccctgatggttctcatggaatcccccgcaatgaaggtctctttgagaacaacaagctgctgcgacgtgagaagtgttctgccattgttcagcgggcccagagcgcctccaagtcagccagaaatctcactgcctgacagcgcagtgggcaccagctgataagtattgggtaaagccagtgcccctgttgttgattcgaggtgaacaaatgaatcagagctgagatgagttgacaatgacagtggagcagaggccttgtatgtgccctgtcacctgccattccagaactggaccacagaaaagtgctgaggatgctggccagcagaccctgcagcagtcattggtggttctgtctttccctaacccttatgtgctggaggacagaggagccacctcttctcactggttgatactctgttcctaagacctcaggttacccagtgtagcctgctgtgacccttctgcttcattttctgccaagtgatacagaaccttcgttctgctgctttggggacaggtgatcctagccccagcttagggccagtgctctgtgccactctggagaaatagggaaaagataggggtggctcagtacagcagccctgtgaaagtcaaggccagagcttttcttttttaatttttttattattattattattattttattttttatttttgagatggagttttactctcgcccaggctagagtgcagtggcatgatctcagctcactgcaacttctgcctcccaggttcaagcaattcccctgcctcagcttcctgagtagctgggactacaggagcgcgccaccacacccagctaatttttgtatttttttttagtagagacggggtttcaccatattggccaggctggtctcaaactcctgacctcgtgatccacccgccttggtctcccaaagtgctgggattacaggcgtgagccaccacgctcagcctttaattttattattataaaaaattgagccagggtcttgctatgtggctcaggctcatctcaaaatcctgggctcaagtgatcctcctgcctgggcctgccaaagtgctaggattgcaggtgtgagccactgtgcctggctggcagagcttttccatatgttactcctcatgctggttggaatcatggctgcaggcttccacttggtctgatcagactggtattcattcctgcctatgtccccgtgaaggattcggtaagagtgctatttcctcctccctttagaagacaggctgtcttctttcatcaacttagagcagataatccccatgtgtgcctctctccttccttagatggggaacaggatccctttttgggacaatcaagaaaaaaactcatgtaaacagtaatcttattacttgtatttgtgactaactccagggaaaagggtagaatatttaggccacttcaggcactaccatggagtgaactgaattcatacggatggcttgggctgacacagtttcttcccagtggaccaataaatcagactcacccgaacccctggggttttggtagaattggacctactctaggactgtggggaactaaaggagcatttggctcactgtagctcttctatcatgagccttgaccgtcaggccgcaatcagaccttactgatgggatctctgcagtttattacgtaggcctcccgttaccctggtacccaaatacgtcccccacctctagctccctagcctcacattgaatgtctcttcaacagcagattgtggtggaagttatagccgtgtgcctctatttattctctgaattgtactgtagaaaaaggtgtttataaagaataaagaaatcaccagaactgccta

SEQ ID NO: 155351 - DNA, 705 bp, Homo sapiens
  Payload ID: 10543
  Gene Symbol: MORN5
  Gene Name: MORN repeat containing 5
  Uniprot ID: Q5VZ52
  ENST ID: ENST00000373764
  CDS Start-End: 63-548
atagtgatgccgtatccactgagactccggatcctaacagctggaagctaaaaacaggcgccatggagtacacagggagcaaatatatcggggaatatgtagatgggaggatggagggcaaagccaagtacatcctccctaccgaaacaatatatgttggggaaatgaaggatggcatgtttcacggcgagggaaccctgtacttccccagcggaagccaatacgacgccatttgggaaaacggattggccataaagggcacatatacgttctcagatgggctgcactatgatgagaaaaactggcattactgcgacggctatgatcggaggttttacacagagatcctcaatggcttgaagcctgcaggtatggctcaactcaccaatatggacccacctagaaaaatccccaagggctattacgattgtggagacggcttctataacccagtcacgagggtagtcaaggactataggaaccgctttctaagaaacgcagatgatgacgagcatgagtggatcacccgtacctgtcgaaagggctaggatgagatcgtgggtcacaggcccgagccgtgaactctgtggctgcctccaccagaggtttccatctgccctactagcattggctgccctgggggacgggctgtagttctagaacctgattttaactcaggaataaagactttctgcggtcagtggc

SEQ ID NO: 155352 - DNA, 366 bp, Homo sapiens
  Payload ID: 10543
  Gene Symbol: MORN5
  Gene Name: MORN repeat containing 5
  ENST ID: ENST00000418632
  CDS Start-End: 35-366
gtgagaggtctgaacagtgatgtccagttcaaggatggagggcaaagccaagtacatcctccctaccgaaacaatatatgttggggaaatgaaggatggcatgtttcacggcgagggaaccctgtacttccccagcggaagccaatacgacgccatttgggaaaacggattggccataaagggcacatatacgttctcagatgggctgcactatgatgagaaaaactggcattactgcgacggctatgatcggaggttttacacagagatcctcaatggcttgaagcctgcaggtatggctcaactcaccaatatggacccacctagaaaaatccccaagggctattacgattgtggagacggctt

SEQ ID NO: 155353 - DNA, 596 bp, Homo sapiens
  Payload ID: 10543
  Gene Symbol: MORN5
  Gene Name: MORN repeat containing 5
  ENST ID: ENST00000536616
  CDS Start-End: 66-356
gtcatagtgatgccgtatccactgagactccggatcctaacagctggaagctaaaaacaggcgccatggagtacacagggagcaaatatatcggggaatatgtagatgggaggatggagggcaaagccaagtacatcctccctaccgaaacaatatatgttggggaaatgaaggatggcatgtttcacggcgagggaaccctgtacttccccagcggaagccaatacgacgccatttgggaaaacggattggccataaaggtatggctcaactcaccaatatggacccacctagaaaaatccccaagggctattacgattgtggagacggcttctataacccagtcacgagggtagtcaaggactataggaaccgctttctaagaaacgcagatgatgacgagcatgagtggatcacccgtacctgtcgaaagggctaggatgagatcgtgggtcacaggcccgagccgtgaactctgtggctgcctccaccagaggtttccatctgccctactagcattggctgccctgggggacgggctgtagttctagaacctgattttaactcaggaataaagactttctgcggtcagtggc

SEQ ID NO: 155354 - DNA, 2359 bp, Homo sapiens
  Payload ID: 10544
  Gene Symbol: MORF4L1
  Gene Name: mortality factor 4 like 1
  Uniprot ID: Q9UBU8
  ENST ID: ENST00000331268
  CDS Start-End: 205-1293
gcgtgcgcggcgggctgtcgttggctggagcagcggctgcgcgggtcgcggtgctgtgaggtctgcgggcgctggcaaatccggcccaggatgtagagctggcagtgcctgacggcgcgtctgacgcggagttgggtggggtagagagtagggggcggtagtcgggggtggtgggagaaggaggaggcggcgaatcacttataaatggcgccgaagcaggacccgaagcctaaattccaggagggtgagcgagtgctgtgctttcatgggcctcttctttatgaagcaaagtgtgtaaaggttgccataaaggacaaacaagtgaaatacttcatacattacagtggttggaataaaaaaagtgctgtgaggcccaggcgctctgaaaaatctttgaagacacatgaggatattgtagccctttttcctgttcctgaaggagctccctcagtacaccaccccctcctgacctctagttgggatgaatgggttccggagagcagagtactcaaatacgtggacaccaatttgcagaaacagcgagaacttcaaaaagccaatcaggagcagtatgcagaggggaagatgagaggggctgccccaggaaagaagacatctggtctgcaacagaaaaatgttgaagtgaaaacgaaaaagaacaaacagaaaacacctggaaatggagatggtggcagtaccagtgagacccctcagcctcctcggaagaaaagggcccgggtagatcctactgttgaaaatgaggaaacattcatgaacagagttgaagttaaagtaaagattcctgaagagctaaaaccgtggcttgttgatgactgggacttaattaccaggcaaaaacagctcttttatcttcctgccaagaagaatgtggattccattcttgaggattatgcaaattacaagaaatctcgtggaaacacagataataaggagtatgcggttaatgaagttgtggcagggataaaagaatacttcaacgtaatgttgggtacccagctactctataaatttgagagaccacagtatgctgaaattcttgcagatcatcccgatgcacccatgtcccaggtgtatggagcgccacatctcctgagattatttgtacgaattggagcaatgttggcttatacacctctggatgagaagagccttgctttattactcaattatcttcacgatttcctaaagtacctggcaaagaattctgcaactttgttcagtgccagcgattatgaagtggctcctcctgagtaccatcggaaagctgtgtgagaggcactctcactcacttatgtttggatctccgtaaacacatttttgttcttagtctatctcttgtacaaacgatgtgctttgaagatgttagtgtataacaattgatgtttgttttctgtttgattttaaacagagaaaaaataaaagggggtaatagctccttttttcttctttctttttttttttcatttcaaaattgctgccagtgttttcaatgatggacaacagagggatatgctgtagagtgttttattgcctagttgacaaagctgcttttgaatgctggtggttctattcctttgacactacgcacttttataatacatgttaatgctatatgacaaaatgctctgattcctagtgccaaaggttcaattcagtgtatataactgaacacactcatccatttgtgcttttgtttttttttatggtgcttaaagtaaagagcccatcctttgcaagtcatccatgttgttacttaggcattttatcttggctcaaattgttgaagaatggtggcttgtttcatggtttttgtatttgtgtctaatgcacgttttaacatgatagacgcaatgcattgtgtagctagttttctggaaaagtcaatcttttaggaattgtttttcagatcttcaataaattttttctttaaatttcaaagaacaatgtgcttgtgttgatgccttacaaaaaccattgtatatttgtgtattccttcttgtatttagacagtggtttttcaggtgcgtgctttgttttctggtatggcctttatggaatgagacgctttagctttggtacgtagcgctaatccatagcagctttggcagtttgctgtcttgagtcttagctaaaaagttagaagtttacatgactgttttttttattttccctaaattattacttactctgagcattaattaagggcattttcacctgtgtaaaattatggtcagcttttttctgtctataattgtttacttttgtgggtttactctagaaacatgagccaaaaatgtcaatagacaacacagtattaaaataacccaaaagttgtaaa

SEQ ID NO: 155355 - DNA, 2274 bp, Homo sapiens
  Payload ID: 10544
  Gene Symbol: MORF4L1
  Gene Name: mortality factor 4 like 1
  ENST ID: ENST00000379535
  CDS Start-End: 565-1611
aacccatggccgggaaaagaagctcctgctccccgctccactcccggcgtcttcacacttggggaagggagaggcaggaagtgcaaggaccgcgcaagacccggccccccgagccgccaggggccgcgccagcagcccagatgcggtgggcgggagctgggggggcggcggggtcccgcgaagacctgcgacctggcgccctcgccggctgtgtcccggccagcccgctttccaggcgagcctcgctaaggagtgtgagaaaccaaatcctcagtgggtaaaccgcgctccgtccagcccactcggacgagagctctcccgggagccaggcgcgttgctgcacccgaggtggggaaaccggagcccgaagagcggaaggggcttattccaggcgacaggcagtgtcagtaactgaatcaggggccgaggaagtttccccagaagcgcggcttcgctcccggcccggcccgaccccgactactgtcccctaatacccagggagcggaagacgcgaccaactccaggcacagcggagccggcgcggggtccacaaagcaaaaaagaatgatccccttcccccatcctcaagtgactgatgctcttggaagatactccaactatatcctgagtagcactgtggagagccccagtctgagaagcatgaactttgagaagcaaggtgagcgagtgctgtgctttcatgggcctcttctttatgaagcaaagtgtgtaaaggttgccataaaggacaaacaagtgaaatacttcatacattacagtggttggaataaaaattgggatgaatgggttccggagagcagagtactcaaatacgtggacaccaatttgcagaaacagcgagaacttcaaaaagccaatcaggagcagtatgcagaggggaagatgagaggggctgccccaggaaagaagacatctggtctgcaacagaaaaatgttgaagtgaaaacgaaaaagaacaaacagaaaacacctggaaatggagatggtggcagtaccagtgagacccctcagcctcctcggaagaaaagggcccgggtagatcctactgttgaaaatgaggaaacattcatgaacagagttgaagttaaagtaaagattcctgaagagctaaaaccgtggcttgttgatgactgggacttaattaccaggcaaaaacagctcttttatcttcctgccaagaagaatgtggattccattcttgaggattatgcaaattacaagaaatctcgtggaaacacagataataaggagtatgcggttaatgaagttgtggcagggataaaagaatacttcaacgtaatgttgggtacccagctactctataaatttgagagaccacagtatgctgaaattcttgcagatcatcccgatgcacccatgtcccaggtgtatggagcgccacatctcctgagattatttgtacgaattggagcaatgttggcttatacacctctggatgagaagagccttgctttattactcaattatcttcacgatttcctaaagtacctggcaaagaattctgcaactttgttcagtgccagcgattatgaagtggctcctcctgagtaccatcggaaagctgtgtgagaggcactctcactcacttatgtttggatctccgtaaacacatttttgttcttagtctatctcttgtacaaacgatgtgctttgaagatgttagtgtataacaattgatgtttgttttctgtttgattttaaacagagaaaaaataaaagggggtaatagctccttttttcttctttctttttttttttcatttcaaaattgctgccagtgttttcaatgatggacaacagagggatatgctgtagagtgttttattgcctagttgacaaagctgcttttgaatgctggtggttctattcctttgacactacgcacttttataatacatgttaatgctatatgacaaaatgctctgattcctagtgccaaaggttcaattcagtgtatataactgaacacactcatccatttgtgcttttgtttttttttatggtgcttaaagtaaagagcccatcctttgcaagtcatccatgttgttacttaggcattttatcttggctcaaattgttgaagaatggtggcttgtttcatggtttttgtatttgtgtctaatgcacgttttaacatgatagacgcaatgcattgtgtagctagttttctggaaaagtcaatcttttaggaattgtttttcagatcttcaataaattttttctttaaatttc

SEQ ID NO: 155356 - DNA, 1880 bp, Homo sapiens
  Payload ID: 10544
  Gene Symbol: MORF4L1
  Gene Name: mortality factor 4 like 1
  Uniprot ID: Q9UBU8
  ENST ID: ENST00000426013
  CDS Start-End: 243-1214
agtcccggcgtgccctggggcggcgcgggcgcaggggcgcgtgcgcggcgggctgtcgttggctggagcagcggctgcgcgggtcgcggtgctgtgaggtctgcgggcgctggcaaatccggcccaggatgtagagctggcagtgcctgacggcgcgtctgacgcggagttgggtggggtagagagtagggggcggtagtcgggggtggtgggagaaggaggaggcggcgaatcacttataaatggcgccgaagcaggacccgaagcctaaattccaggagggtgagcgagtgctgtgctttcatgggcctcttctttatgaagcaaagtgtgtaaaggttgccataaaggacaaacaagtgaaatacttcatacattacagtggttggaataaaaattgggatgaatgggttccggagagcagagtactcaaatacgtggacaccaatttgcagaaacagcgagaacttcaaaaagccaatcaggagcagtatgcagaggggaagatgagaggggctgccccaggaaagaagacatctggtctgcaacagaaaaatgttgaagtgaaaacgaaaaagaacaaacagaaaacacctggaaatggagatggtggcagtaccagtgagacccctcagcctcctcggaagaaaagggcccgggtagatcctactgttgaaaatgaggaaacattcatgaacagagttgaagttaaagtaaagattcctgaagagctaaaaccgtggcttgttgatgactgggacttaattaccaggcaaaaacagctcttttatcttcctgccaagaagaatgtggattccattcttgaggattatgcaaattacaagaaatctcgtggaaacacagataataaggagtatgcggttaatgaagttgtggcagggataaaagaatacttcaacgtaatgttgggtacccagctactctataaatttgagagaccacagtatgctgaaattcttgcagatcatcccgatgcacccatgtcccaggtgtatggagcgccacatctcctgagattatttgtacgaattggagcaatgttggcttatacacctctggatgagaagagccttgctttattactcaattatcttcacgatttcctaaagtacctggcaaagaattctgcaactttgttcagtgccagcgattatgaagtggctcctcctgagtaccatcggaaagctgtgtgagaggcactctcactcacttatgtttggatctccgtaaacacatttttgttcttagtctatctcttgtacaaacgatgtgctttgaagatgttagtgtataacaattgatgtttgttttctgtttgattttaaacagagaaaaaataaaagggggtaatagctccttttttcttctttctttttttttttcatttcaaaattgctgccagtgttttcaatgatggacaacagagggatatgctgtagagtgttttattgcctagttgacaaagctgcttttgaatgctggtggttctattcctttgacactacgcacttttataatacatgttaatgctatatgacaaaatgctctgattcctagtgccaaaggttcaattcagtgtatataactgaacacactcatccatttgtgcttttgtttttttttatggtgcttaaagtaaagagcccatcctttgcaagtcatccatgttgttacttaggcattttatcttggctcaaattgttgaagaatggtggcttgtttcatggtttttgtatttgtgtctaatgcacgttttaacatgatagacgcaatgcattgtgtagctagttttctggaaaagtcaatcttttaggaattgtttttcagatcttcaataaattttttctttaaatttcaaa

SEQ ID NO: 155357 - DNA, 1468 bp, Homo sapiens
  Payload ID: 10544
  Gene Symbol: MORF4L1
  Gene Name: mortality factor 4 like 1
  Uniprot ID: Q9UBU8
  ENST ID: ENST00000559345
  CDS Start-End: 439-1146
gaatcacttataaatggcgccgaagcaggacccgaagcctaaattccaggagggtgagtgtgcgcctttgggaaaaaggcacctaacggcgcaggagatagaggcgggctcgaggtgattgaggcttgagggccgggggcggcgcgggctgcgccctgagaaggcggcggtcagtgctttgtgcggggaaagcgcattgcggatggcaattccggtgagcgagtgctgtgctttcatgggcctcttctttatgaagcaaagtgtgtaaaggttgccataaaggacaaacaagtgaaatacttcatacattacagtggttggaataaaaattgggatgaatgggttccggagagcagagtactcaaatacgtggacaccaatttgcagaaacagcgagaacttcaaaaagccaatcaggagcagtatgcagaggggaagatgagaggggctgccccaggaaagaagacatctggtctgcaacagaaaaatgttgaagtgaaaacgaaaaagaacaaacagaaaacacctggaaatggagatggtggcagtaccagtgagacccctcagcctcctcggaagaaaagggcccgggtagatcctactgttgaaaatgaggaaacattcatgaacagagttgaagttaaagtaaagattcctgaagagctaaaaccgtggcttgttgatgactgggacttaattaccaggcaaaaacagctcttttatcttcctgccaagaagaatgtggattccattcttgaggattatgcaaattacaagaaatctcgtggaaacacagataataaggagtatgcggttaatgaagttgtggcagggataaaagaatacttcaacgtaatgttgggtacccagctactctataaatttgagagaccacagtatgctgaaattcttgcagatcatcccgatgcacccatgtcccaggtgtatggagcgccacatctcctgagattatttgtacgaattggagcaatgttggcttatacacctctggatgagaagagccttgctttattactcaattatcttcacgatttcctaaagtacctggcaaagaattctgcaactttgttcagtgccagcgattatgaagtggctcctcctgagtaccatcggaaagctgtgtgagaggcactctcactcacttatgtttggatctccgtaaacacatttttgttcttagtctatctcttgtacaaacgatgtgctttgaagatgttagtgtataacaattgatgtttgttttctgtttgattttaaacagagaaaaaataaaagggggtaatagctccttttttcttctttctttttttttttcatttcaaaattgctgccagtgttttcaatgatggacaacagagggatatgctgtagagtgttttattgcctagttgacaaagctgcttttgaatgctggtggttctattcctttgacactacgcacttttat

SEQ ID NO: 155358 - DNA, 855 bp, Homo sapiens
  Payload ID: 10544
  Gene Symbol: MORF4L1
  Gene Name: mortality factor 4 like 1
  Uniprot ID: Q9UBU8
  ENST ID: ENST00000558502
  CDS Start-End: 138-845
caggacccgaagcctaaattccaggaggttgggatgaatgggttccggagagcagagtactcaaatacgtggacaccaatttgcagaaacagcgagaacttcaaaaagccaatcaggagcagtatgcagaggggaagatgagaggggctgccccaggaaagaagacatctggtctgcaacagaaaaatgttgaagtgaaaacgaaaaagaacaaacagaaaacacctggaaatggagatggtggcagtaccagtgagacccctcagcctcctcggaagaaaagggcccgggtagatcctactgttgaaaatgaggaaacattcatgaacagagttgaagttaaagtaaagattcctgaagagctaaaaccgtggcttgttgatgactgggacttaattaccaggcaaaaacagctcttttatcttcctgccaagaagaatgtggattccattcttgaggattatgcaaattacaagaaatctcgtggaaacacagataataaggagtatgcggttaatgaagttgtggcagggataaaagaatacttcaacgtaatgttgggtacccagctactctataaatttgagagaccacagtatgctgaaattcttgcagatcatcccgatgcacccatgtcccaggtgtatggagcgccacatctcctgagattatttgtacgaattggagcaatgttggcttatacacctctggatgagaagagccttgctttattactcaattatcttcacgatttcctaaagtacctggcaaagaattctgcaactttgttcagtgccagcgattatgaagtggctcctcctgagtaccatcggaaagctgtgtgagaggcactct

SEQ ID NO: 155359 - DNA, 874 bp, Homo sapiens
  Payload ID: 10544
  Gene Symbol: MORF4L1
  Gene Name: mortality factor 4 like 1
  ENST ID: ENST00000558746
  CDS Start-End: 65-874
gtagagagtagggggcggtagtcgggggtggtgggagaaggaggaggcggcgaatcacttataaatggcgccgaagcaggacccgaagcctaaattccaggagggtgagcgagtgctgtgctttcatgggcctcttctttatgaagcaaagtgtgtaaaggttgccataaaggacaaacaagtgaaatacttcatacattacagtggttggaataaaaattgggatgaatgggttccggagagcagagtactcaaatacgtggacaccaatttgcagaaacagcgagaacttcaaaaagccaatcagaaaacgaaaaagaacaaacagaaaacacctggaaatggagatggtggcagtaccagtgagacccctcagcctcctcggaagaaaagggcccgggtagatcctactgttgaaaatgaggaaacattcatgaacagagttgaagttaaagtaaagattcctgaagagctaaaaccgtggcttgttgatgactgggacttaattaccaggcaaaaacagctcttttatcttcctgccaagaagaatgtggattccattcttgaggattatgcaaattacaagaaatctcgtggaaacacagataataaggagtatgcggttaatgaagttgtggcagggataaaagaatacttcaacgtaatgttgggtacccagctactctataaatttgagagaccacagtatgctgaaattcttgcagatcatcccgatgcacccatgtcccaggtgtatggagcgccacatctcctgagattatttgtacgaattggagcaatgttggcttatacacctctggatgagaagagccttgctttattactcaattatcttcacgatttcctaaagtaa

SEQ ID NO: 155360 - DNA, 680 bp, Homo sapiens
  Payload ID: 10544
  Gene Symbol: MORF4L1
  Gene Name: mortality factor 4 like 1
  ENST ID: ENST00000559690
  CDS Start-End: 342-680
cagagtggtgggtggggacagaaaaaaaaaagtgagatgagcgttttcctccgctttgtgttgcctggaggcatcactctgctattcttgggcgcagtgccgagatcctatggtaatgtgagcgagtgctgtgctttcatgggcctcttctttatgaagcaaagtgtgtaaaggttgccataaaggacaaacaagtgaaatacttcatacattacagtggttggaataaaaattgggatgaatgggttccggagagcagagtactcaaatacgtggacaccaatttgcagaaacagcgagaacttcaaaaagccaatcaggagcagtatgcagaggggaagatgagaggggctgccccaggaaagaagacatctggtctgcaacagaaaaatgttgaagtgaaaacgaaaaagaacaaacagaaaacacctggaaatggagatggtggcagtaccagtgagacccctcagcctcctcggaagaaaagggcccgggtagatcctactgttgaaaatgaggaaacattcatgaacagagttgaagttaaagtaaagattcctgaagagctaaaaccgtggcttgttgatgactgggacttaattaccaggcaaaaacagctcttttatcttcctgccaagaagaatgtggattccattcttgaggattatgcaaattacaag

SEQ ID NO: 155361 - DNA, 793 bp, Homo sapiens
  Payload ID: 10544
  Gene Symbol: MORF4L1
  Gene Name: mortality factor 4 like 1
  ENST ID: ENST00000559158
  CDS Start-End: 325-793
gccgagatcctatggtaatgtgagtgagctctcgctttgcagttgctcgtaaaaagtaaataaaaatgatctgaatgcagtgttgacgccgtttgcatttgtgagcgagtgctgtgctttcatgggcctcttctttatgaagcaaagtgtgtaaaggttgccataaaggacaaacaagtgaaatacttcatacattacagtggttggaataaaaattgggatgaatgggttccggagagcagagtactcaaatacgtggacaccaatttgcagaaacagcgagaacttcaaaaagccaatcaggagcagtatgcagaggggaagatgagaggggctgccccaggaaagaagacatctggtctgcaacagaaaaatgttgaagtgaaaacgaaaaagaacaaacagaaaacacctggaaatggagatggtggcagtaccagtgagacccctcagcctcctcggaagaaaagggcccgggtagatcctactgttgaaaatgaggaaacattcatgaacagagttgaagttaaagtaaagattcctgaagagctaaaaccgtggcttgttgatgactgggacttaattaccaggcaaaaacagctcttttatcttcctgccaagaagaatgtggattccattcttgaggattatgcaaattacaagaaatctcgtggaaacacagataataaggagtatgcggttaatgaagttgtggcagggataaaagaatacttcaacgtaatgttgggtacccagctactctataaatttgagagaccacagtatgctgaaa

SEQ ID NO: 155362 - DNA, 761 bp, Homo sapiens
  Payload ID: 10544
  Gene Symbol: MORF4L1
  Gene Name: mortality factor 4 like 1
  ENST ID: ENST00000560422
  CDS Start-End: 26-761
aaaatactagggcctcgtagctagaatggaggtcacagggcctcggtttcagtgcacttttttttccggcagtagcagccaaggggagaaaaatggtgagcgagtgctgtgctttcatgggcctcttctttatgaagcaaagtgtgtaaaggttgccataaaggacaaacaagtgaaatacttcatacattacagtggttggaataaaaattgggatgaatgggttccggagagcagagtactcaaatacgtggacaccaatttgcagaaacagcgagaacttcaaaaagccaatcaggagcagtatgcagaggggaagatgagaggggctgccccaggaaagaagacatctggtctgcaacagaaaaatgttgaagtgaaaacgaaaaagaacaaacagaaaacacctggaaatggagatggtggcagtaccagtgagacccctcagcctcctcggaagaaaagggcccgggtagatcctactgttgaaaatgaggaaacattcatgaacagagttgaagttaaagtaaagattcctgaagagctaaaaccgtggcttgttgatgactgggacttaattaccaggcaaaaacagctcttttatcttcctgccaagaagaatgtggattccattcttgaggattatgcaaattacaagaaatctcgtggaaacacagataataaggagtatgcggttaatgaagttgtggcagggataaaagaatacttcaacgtaatgttgggtacccagctactctata

SEQ ID NO: 155363 - DNA, 616 bp, Homo sapiens
  Payload ID: 10544
  Gene Symbol: MORF4L1
  Gene Name: mortality factor 4 like 1
  ENST ID: ENST00000558830
  CDS Start-End: 261-616
tcgggggtggtgggagaaggaggaggcggcgaatcacttataaatggcgccgaagcaggacccgaagcctaaattccaggaggtgtgtaaaggttgccataaaggacaaacaagtgaaatacttcatacattacagtggttggaataaaaattgggatgaatgggttccggagagcagagtactcaaatacgtggacaccaatttgcagaaacagcgagaacttcaaaaagccaatcaggagcagtatgcagaggggaagatgagaggggctgccccaggaaagaagacatctggtctgcaacagaaaaatgttgaagtgaaaacgaaaaagaacaaacagaaaacacctggaaatggagatggtggcagtaccagtgagacccctcagcctcctcggaagaaaagggcccgggtagatcctactgttgaaaatgaggaaacattcatgaacagagttgaagttaaagtaaagattcctgaagagctaaaaccgtggcttgttgatgactgggacttaattaccaggcaaaaacagctcttttatcttcctgccaagaagaatgtggattccattcttgaggattatgcaaattacaagaaatctcgtggaaacac

SEQ ID NO: 155364 - DNA, 639 bp, Homo sapiens
  Payload ID: 10544
  Gene Symbol: MORF4L1
  Gene Name: mortality factor 4 like 1
  ENST ID: ENST00000559751
  CDS Start-End: 1-639
ctcttctttatgaagcaaagtgtgtaaaggttgccataaaggacaaacaagtgaaatacttcatacattacagtggttggaataaaaatgctgtgaggcccaggcgctctgaaaaatctttgaagacacatgaggatattgtagccctttttcctgttcctgaaggagctccctcagtacaccaccccctcctgacctctagttgggatgaatgggttccggagagcagagtactcaaatacgtggacaccaatttgcagaaacagcgagaacttcaaaaagccaatcaggagcagtatgcagaggggaagatgagaggggctgccccaggaaagaagacatctggtctgcaacagaaaaatgttgaagtgaaaacgaaaaagaacaaacagaaaacacctggaaatggagatggtggcagtaccagtgagacccctcagcctcctcggaagaaaagggcccgggtagatcctactgttgaaaatgaggaaacattcatgaacagagttgaagttaaagtaaagattcctgaagagctaaaaccgtggcttgttgatgactgggacttaattaccaggcaaaaacagctcttttatcttcctgccaagaagaatgtggattccattcttgaggattatg

SEQ ID NO: 155365 - DNA, 582 bp, Homo sapiens
  Payload ID: 10544
  Gene Symbol: MORF4L1
  Gene Name: mortality factor 4 like 1
  ENST ID: ENST00000559244
  CDS Start-End: 408-582
gtacgatatttcactgagtaaaagggttggaagcagagatacaagtggagagtaaaggtcctcaacttagaaaaacagatgaggaaagcatttaaaaaactgtattttcagatatatagttaaaaccaaccaaccaaccaacctcgacagctttgcaggagagtccgcttatgtgcttaacaggtgagcgagtgctgtgctttcatgggcctcttctttatgaagcaaagtgtgtaaaggttgccataaaggacaaacaagtgaaatacttcatacattacagtggttggaataaaaattgggatgaatgggttccggagagcagagtactcaaatacgtggacaccaatttgcagaaacagcgagaacttcaaaaagccaatcaggagcagtatgcagaggggaagatgagaggggctgccccaggaaagaagacatctggtctgcaacagaaaaatgttgaagtgaaaacgaaaaagaacaaacagaaaacacctggaaatggagatggtggcagtaccagtgagacccctcagcctcctcggaagaaaagggcccgggtagatcctactgttgaaaatg

SEQ ID NO: 155366 - DNA, 678 bp, Homo sapiens
  Payload ID: 10544
  Gene Symbol: MORF4L1
  Gene Name: mortality factor 4 like 1
  ENST ID: ENST00000559930
  CDS Start-End: 457-678
ggcaaatccggcccaggatgtagagctggcagtgcctgacggcgcgtctgacgcggagttgggtggggtagagagtagggggcggtagtcgggggtggtgggagaaggaggaggcggcgaatcacttataaatggcgccgaagcaggacccgaagcctaaattccaggagggtgagtgtgcgcctttgggaaaaaggcacctaacggcgcaggagatagaggcgggctcgaggtgagcgagtgctgtgctttcatgggcctcttctttatgaagcaaagtgtgtaaaggttgccataaaggacaaacaagtgaaatacttcatacattacagtggttggaataaaaattgggatgaatgggttccggagagcagagtactcaaatacgtggacaccaatttgcagaaacagcgagaacttcaaaaagccaatcaggagcagtatgcagaggggaagatgagaggggctgccccaggaaagaagacatctggtctgcaacagaaaaatgttgaagtgaaaacgaaaaagaacaaacagaaaacacctggaaatggagatggtggcagtaccagtgagacccctcagcctcctcggaagaaaagggcccgggtagatcctactgttgaaaatgaggaaacattcatgaacagagttgaagttaaagtaaagattcctgaa

SEQ ID NO: 155367 - DNA, 1824 bp, Homo sapiens
  Payload ID: 10545
  Gene Symbol: MORF4L2
  Gene Name: mortality factor 4 like 2
  Uniprot ID: Q15014
  ENST ID: ENST00000360458
  CDS Start-End: 293-1159
gaactttctggaaaattaacagtgcgtatttgcctgaagaaggtcagtgtgcttgcttggagatcaggacgcaaaggtcaccatcagaaaagctaagtttgctgtatagtgaggatcaggagatctgatcctgattgcagaaccttccctgattacagaatcttgggttgtatctcccacttcacccttctagaccatcccagaagatctataagatttcatctgggaaatcactaggagttcttggaagggaaagaaggaagattgttggttggaataaaaacagggttgaatgagttccagaaagcagggttctcaacctcgtggacagcaatctgcagaagaagagaacttcaaaaaaccaactagaagcaacatgcagagaagtaaaatgagaggggcctcctcaggaaagaagacagctggtccacagcagaaaaatcttgaaccagctctcccaggaagatggggtggtcgctctgcagagaaccccccttcaggatccgtgaggaagaccagaaagaacaagcagaagactcctggaaacggagatggtggcagtaccagcgaagcacctcagccccctcggaagaaaagggcccgggcagaccccactgttgaaagtgaggaggcgtttaagaatagaatggaggttaaagtgaagattcctgaagaattaaaaccatggcttgttgaggactgggacttagttaccaggcagaagcagctgtttcaactccctgccaagaaaaatgtagatgcaattctggaggagtatgcaaattgcaagaaatcgcagggaaatgttgataataaggaatatgcggttaatgaagttgtggcaggaataaaagaatatttcaatgtgatgttgggcactcagctgctctacaaatttgagaggccccagtatgctgaaatcctcttggctcaccctgatgctccaatgtcccaggtttatggagcaccacacctactgagattatttgtaagaattggagcaatgttggcctatacgccccttgatgagaaaagccttgcattattgttgggctatttgcatgatttcctaaaatatctggcaaagaattctgcatctctctttactgccagtgattacaaagtggcttctgctgagtaccaccgcaaagccctgtgagcgtctacagacagctcaccatttttgtcctgtatctgtaaacactttttgttcttagtctttttcttgtaaaattgatgttctttaaaatcgttaatgtataacagggcttatgtttcagtttgttttccgttctgttttaaacagaaaataaaaggagtgtaagctccttttctcatttcaaagttgctaccagtgtatgcagtaattagaacaaagaagaaacattcagtagaacattttattgcctagttgacaacattgcttgaatgctggtggttcctatccctttgacactacacaattttctaatatgtgttaatgctatgtgacaaaacgccctgattcctagtgccaaaggttcaacttaatgtatatacctgaaaacccatgcatttgtgctctttttttttttttatggtgcttgaagtaaaacagcccatcctctgcaagtccatctatgttgttcttaggcattctatctttgctcaaattgttgaaggatggtgatttgtttcatggtttttgtatttgagtctaatgcacgttctaacatgatagaggcaatgcattattgtgtagccacggttttctggaaaagttgatattttaggaattgtatttcagatcttaaataaaatttgtttctaaatttcaaagcaagt

SEQ ID NO: 155368 - DNA, 1828 bp, Homo sapiens
  Payload ID: 10545
  Gene Symbol: MORF4L2
  Gene Name: mortality factor 4 like 2
  Uniprot ID: Q15014
  ENST ID: ENST00000441076
  CDS Start-End: 306-1172
cacgtcggctgctgggaagatctggattctcgtttcaggtcaccatcagaaaagctaagtttgctgtatagtgaggatcaggagatctgatcctgattgcagaaccttccctgattacagaatcttggatgatttcacaaaagttcatcttcattgcagatacctgcctttctttctaggttgtatctcccacttcacccttctagaccatcccagaagatctataagatttcatctgggaaatcactaggagttcttggaagggaaagaaggaagattgttggttggaataaaaacagggttgaatgagttccagaaagcagggttctcaacctcgtggacagcaatctgcagaagaagagaacttcaaaaaaccaactagaagcaacatgcagagaagtaaaatgagaggggcctcctcaggaaagaagacagctggtccacagcagaaaaatcttgaaccagctctcccaggaagatggggtggtcgctctgcagagaaccccccttcaggatccgtgaggaagaccagaaagaacaagcagaagactcctggaaacggagatggtggcagtaccagcgaagcacctcagccccctcggaagaaaagggcccgggcagaccccactgttgaaagtgaggaggcgtttaagaatagaatggaggttaaagtgaagattcctgaagaattaaaaccatggcttgttgaggactgggacttagttaccaggcagaagcagctgtttcaactccctgccaagaaaaatgtagatgcaattctggaggagtatgcaaattgcaagaaatcgcagggaaatgttgataataaggaatatgcggttaatgaagttgtggcaggaataaaagaatatttcaatgtgatgttgggcactcagctgctctacaaatttgagaggccccagtatgctgaaatcctcttggctcaccctgatgctccaatgtcccaggtttatggagcaccacacctactgagattatttgtaagaattggagcaatgttggcctatacgccccttgatgagaaaagccttgcattattgttgggctatttgcatgatttcctaaaatatctggcaaagaattctgcatctctctttactgccagtgattacaaagtggcttctgctgagtaccaccgcaaagccctgtgagcgtctacagacagctcaccatttttgtcctgtatctgtaaacactttttgttcttagtctttttcttgtaaaattgatgttctttaaaatcgttaatgtataacagggcttatgtttcagtttgttttccgttctgttttaaacagaaaataaaaggagtgtaagctccttttctcatttcaaagttgctaccagtgtatgcagtaattagaacaaagaagaaacattcagtagaacattttattgcctagttgacaacattgcttgaatgctggtggttcctatccctttgacactacacaattttctaatatgtgttaatgctatgtgacaaaacgccctgattcctagtgccaaaggttcaacttaatgtatatacctgaaaacccatgcatttgtgctctttttttttttttatggtgcttgaagtaaaacagcccatcctctgcaagtccatctatgttgttcttaggcattctatctttgctcaaattgttgaaggatggtgatttgtttcatggtttttgtatttgagtctaatgcacgttctaacatgatagaggcaatgcattattgtgtagccacggttttctggaaaagttgatattttaggaattgtatttcagatcttaaataaaatttgtttctaaatttc

SEQ ID NO: 155369 - DNA, 849 bp, Homo sapiens
  Payload ID: 10545
  Gene Symbol: MORF4L2
  Gene Name: mortality factor 4 like 2
  ENST ID: ENST00000418819
  CDS Start-End: 319-849
gcgtatttgcctgaagaaggtcagtgtgcttgcttggagatcaggacgcaaaggtcaccatcagaaaagctaagtttgctgtatagtgaggatcaggagatctgatcctgattgcagaaccttccctgattacagaatcttgggattgttgagaggattacatgtaaagtaccaggacagtgcatggcacatgttgtatctcccacttcacccttctagaccatcccagaagatctataagatttcatctgggaaatcactaggagttcttggaagggaaagaaggaagattgttggttggaataaaaacagggttgaatgagttccagaaagcagggttctcaacctcgtggacagcaatctgcagaagaagagaacttcaaaaaaccaactagaagcaacatgcagagaagtaaaatgagaggggcctcctcaggaaagaagacagctggtccacagcagaaaaatcttgaaccagctctcccaggaagatggggtggtcgctctgcagagaaccccccttcaggatccgtgaggaagaccagaaagaacaagcagaagactcctggaaacggagatggtggcagtaccagcgaagcacctcagccccctcggaagaaaagggcccgggcagaccccactgttgaaagtgaggaggcgtttaagaatagaatggaggttaaagtgaagattcctgaagaattaaaaccatggcttgttgaggactgggacttagttaccaggcagaagcagctgtttcaactccctgccaagaaaaatgtagatgcaattctggaggagtatgcaaattgcaagaaatcgcagggaaatgttgataataaggaatat

SEQ ID NO: 155370 - DNA, 1983 bp, Homo sapiens
  Payload ID: 10545
  Gene Symbol: MORF4L2
  Gene Name: mortality factor 4 like 2
  Uniprot ID: Q15014
  ENST ID: ENST00000422154
  CDS Start-End: 456-1322
ttgattatggaacattctaaaacttagacaagacgattgtgattggctgaagggcatacgccctcctccagggtgacgtgtctgcctatggatatcagttgccagagaaacctggctttactatggcggttggaggaacggcagtgatcacacgtcggctgctgggaagatctggattctcgtttcaggtcaccatcagaaaagctaagtttgctgtatagtgaggatcaggagatctgatcctgattgcagaaccttccctgattacagaatcttggatgatttcacaaaagttcatcttcattgcagatacctgcctttctttctaggttgtatctcccacttcacccttctagaccatcccagaagatctataagatttcatctgggaaatcactaggagttcttggaagggaaagaaggaagattgttggttggaataaaaacagggttgaatgagttccagaaagcagggttctcaacctcgtggacagcaatctgcagaagaagagaacttcaaaaaaccaactagaagcaacatgcagagaagtaaaatgagaggggcctcctcaggaaagaagacagctggtccacagcagaaaaatcttgaaccagctctcccaggaagatggggtggtcgctctgcagagaaccccccttcaggatccgtgaggaagaccagaaagaacaagcagaagactcctggaaacggagatggtggcagtaccagcgaagcacctcagccccctcggaagaaaagggcccgggcagaccccactgttgaaagtgaggaggcgtttaagaatagaatggaggttaaagtgaagattcctgaagaattaaaaccatggcttgttgaggactgggacttagttaccaggcagaagcagctgtttcaactccctgccaagaaaaatgtagatgcaattctggaggagtatgcaaattgcaagaaatcgcagggaaatgttgataataaggaatatgcggttaatgaagttgtggcaggaataaaagaatatttcaatgtgatgttgggcactcagctgctctacaaatttgagaggccccagtatgctgaaatcctcttggctcaccctgatgctccaatgtcccaggtttatggagcaccacacctactgagattatttgtaagaattggagcaatgttggcctatacgccccttgatgagaaaagccttgcattattgttgggctatttgcatgatttcctaaaatatctggcaaagaattctgcatctctctttactgccagtgattacaaagtggcttctgctgagtaccaccgcaaagccctgtgagcgtctacagacagctcaccatttttgtcctgtatctgtaaacactttttgttcttagtctttttcttgtaaaattgatgttctttaaaatcgttaatgtataacagggcttatgtttcagtttgttttccgttctgttttaaacagaaaataaaaggagtgtaagctccttttctcatttcaaagttgctaccagtgtatgcagtaattagaacaaagaagaaacattcagtagaacattttattgcctagttgacaacattgcttgaatgctggtggttcctatccctttgacactacacaattttctaatatgtgttaatgctatgtgacaaaacgccctgattcctagtgccaaaggttcaacttaatgtatatacctgaaaacccatgcatttgtgctctttttttttttttatggtgcttgaagtaaaacagcccatcctctgcaagtccatctatgttgttcttaggcattctatctttgctcaaattgttgaaggatggtgatttgtttcatggtttttgtatttgagtctaatgcacgttctaacatgatagaggcaatgcattattgtgtagccacggttttctggaaaagttgatattttaggaattgtatttcagatcttaaataaaatttgtttctaaatttcaaagc

SEQ ID NO: 155371 - DNA, 869 bp, Homo sapiens
  Payload ID: 10545
  Gene Symbol: MORF4L2
  Gene Name: mortality factor 4 like 2
  ENST ID: ENST00000442614
  CDS Start-End: 396-869
acctggctttactatggcggttggaggaacggcagtgatcacacgtcggctgctgggaagatctggattctcgtttcaggtcaccatcagaaaagctaagtttgctgtatagtgaggatcaggagatctgatcctgattgcagaaccttccctgattacagaatcttgggattgttgagaggattacatgtaaagtaccaggacagtgcatggcacatatgatttcacaaaagttcatcttcattgcagatacctgcctttctttctaggttgtatctcccacttcacccttctagaccatcccagaagatctataagatttcatctgggaaatcactaggagttcttggaagggaaagaaggaagattgttggttggaataaaaacagggttgaatgagttccagaaagcagggttctcaacctcgtggacagcaatctgcagaagaagagaacttcaaaaaaccaactagaagcaacatgcagagaagtaaaatgagaggggcctcctcaggaaagaagacagctggtccacagcagaaaaatcttgaaccagctctcccaggaagatggggtggtcgctctgcagagaaccccccttcaggatccgtgaggaagaccagaaagaacaagcagaagactcctggaaacggagatggtggcagtaccagcgaagcacctcagccccctcggaagaaaagggcccgggcagaccccactgttgaaagtgaggaggcgtttaagaatagaatggaggttaaagtgaagattcctgaagaattaaaaccatggcttgttgaggactgggacttagttaccaggcagaagcagctgtttcaactccctgccaagaaaaatgtagatgcaatt

SEQ ID NO: 155372 - DNA, 562 bp, Homo sapiens
  Payload ID: 10545
  Gene Symbol: MORF4L2
  Gene Name: mortality factor 4 like 2
  ENST ID: ENST00000422355
  CDS Start-End: 361-562
ggctttactatggcggttggaggaacggcagtgatcacacgtcggctgctgggaagatctggattctcgtttcaggtcaccatcagaaaagctaagtttgctgtatagtgaggatcaggagatctgatcctgattgcagaaccttccctgattacagaatcttgggattgttgagaggattacatgtaaagtaccaggacagtgcatggcacatatacctgcctttctttctaggttgtatctcccacttcacccttctagaccatcccagaagatctataagatttcatctgggaaatcactaggagttcttggaagggaaagaaggaagattgttggttggaataaaaacagggttgaatgagttccagaaagcagggttctcaacctcgtggacagcaatctgcagaagaagagaacttcaaaaaaccaactagaagcaacatgcagagaagtaaaatgagaggggcctcctcaggaaagaagacagctggtccacagcagaaaaatcttgaaccagctctcccaggaagatggggtggtcgctctgcagagaaccccc

SEQ ID NO: 155373 - DNA, 1830 bp, Homo sapiens
  Payload ID: 10545
  Gene Symbol: MORF4L2
  Gene Name: mortality factor 4 like 2
  Uniprot ID: Q15014
  ENST ID: ENST00000451301
  CDS Start-End: 303-1169
ttgattatggaacattctaaaacttagacaagacgattgtgattggctgaagggcatacgccctcctccagggtgacgtgtctgcctatggatatcagttgccagagaaacctggctttactatggcggttggaggaacggcagtgatcacacgtcggctgctgggaagatctggattctcgtttcaggtcaccatcagaaaagctaagtttgctgtatagtgaggatcaggagatctgatcctgattgcagaaccttccctgattacagaatcttggtggttggaataaaaacagggttgaatgagttccagaaagcagggttctcaacctcgtggacagcaatctgcagaagaagagaacttcaaaaaaccaactagaagcaacatgcagagaagtaaaatgagaggggcctcctcaggaaagaagacagctggtccacagcagaaaaatcttgaaccagctctcccaggaagatggggtggtcgctctgcagagaaccccccttcaggatccgtgaggaagaccagaaagaacaagcagaagactcctggaaacggagatggtggcagtaccagcgaagcacctcagccccctcggaagaaaagggcccgggcagaccccactgttgaaagtgaggaggcgtttaagaatagaatggaggttaaagtgaagattcctgaagaattaaaaccatggcttgttgaggactgggacttagttaccaggcagaagcagctgtttcaactccctgccaagaaaaatgtagatgcaattctggaggagtatgcaaattgcaagaaatcgcagggaaatgttgataataaggaatatgcggttaatgaagttgtggcaggaataaaagaatatttcaatgtgatgttgggcactcagctgctctacaaatttgagaggccccagtatgctgaaatcctcttggctcaccctgatgctccaatgtcccaggtttatggagcaccacacctactgagattatttgtaagaattggagcaatgttggcctatacgccccttgatgagaaaagccttgcattattgttgggctatttgcatgatttcctaaaatatctggcaaagaattctgcatctctctttactgccagtgattacaaagtggcttctgctgagtaccaccgcaaagccctgtgagcgtctacagacagctcaccatttttgtcctgtatctgtaaacactttttgttcttagtctttttcttgtaaaattgatgttctttaaaatcgttaatgtataacagggcttatgtttcagtttgttttccgttctgttttaaacagaaaataaaaggagtgtaagctccttttctcatttcaaagttgctaccagtgtatgcagtaattagaacaaagaagaaacattcagtagaacattttattgcctagttgacaacattgcttgaatgctggtggttcctatccctttgacactacacaattttctaatatgtgttaatgctatgtgacaaaacgccctgattcctagtgccaaaggttcaacttaatgtatatacctgaaaacccatgcatttgtgctctttttttttttttatggtgcttgaagtaaaacagcccatcctctgcaagtccatctatgttgttcttaggcattctatctttgctcaaattgttgaaggatggtgatttgtttcatggtttttgtatttgagtctaatgcacgttctaacatgatagaggcaatgcattattgtgtagccacggttttctggaaaagttgatattttaggaattgtatttcagatcttaaataaaatttgtttctaaatttcaaagc

SEQ ID NO: 155374 - DNA, 899 bp, Homo sapiens
  Payload ID: 10545
  Gene Symbol: MORF4L2
  Gene Name: mortality factor 4 like 2
  ENST ID: ENST00000434230
  CDS Start-End: 367-899
tatttgcctgaagaaggtcagtgtgcttgcttggagatcaggacgcaaaggtcaccatcagaaaagctaagtttgctgtatagtgaggatcaggagatctgatcctgattgcagaaccttccctgattacagaatcttgggattgttgagaggattacatgtaaagtaccaggacagtgcatggcacatatgatttcacaaaagttcatcttcattgcagatacctgcctttctttctaggttgtatctcccacttcacccttctagaccatcccagaagatctataagatttcatctgggaaatcactaggagttcttggaagggaaagaaggaagattgttggttggaataaaaacagggttgaatgagttccagaaagcagggttctcaacctcgtggacagcaatctgcagaagaagagaacttcaaaaaaccaactagaagcaacatgcagagaagtaaaatgagaggggcctcctcaggaaagaagacagctggtccacagcagaaaaatcttgaaccagctctcccaggaagatggggtggtcgctctgcagagaaccccccttcaggatccgtgaggaagaccagaaagaacaagcagaagactcctggaaacggagatggtggcagtaccagcgaagcacctcagccccctcggaagaaaagggcccgggcagaccccactgttgaaagtgaggaggcgtttaagaatagaatggaggttaaagtgaagattcctgaagaattaaaaccatggcttgttgaggactgggacttagttaccaggcagaagcagctgtttcaactccctgccaagaaaaatgtagatgcaattctggaggagtatgcaaattgcaagaaatcgcagggaaatgttgataataaggaatatgc

SEQ ID NO: 155375 - DNA, 1965 bp, Homo sapiens
  Payload ID: 10545
  Gene Symbol: MORF4L2
  Gene Name: mortality factor 4 like 2
  Uniprot ID: Q15014
  ENST ID: ENST00000433176
  CDS Start-End: 438-1304
aaaatcccagaatcccagggaccaaacagccaatcctttgctgggatttggcggcatctagtggcagactcgagaggtataaaccttactcacagaactttctggaaaattaacagtgcgtatttgcctgaagaaggtcagtgtgcttgcttggagatcaggacgcaaaggtcaccatcagaaaagctaagtttgctgtatagtgaggatcaggagatctgatcctgattgcagaaccttccctgattacagaatcttggatgatttcacaaaagttcatcttcattgcagatacctgcctttctttctaggttgtatctcccacttcacccttctagaccatcccagaagatctataagatttcatctgggaaatcactaggagttcttggaagggaaagaaggaagattgttggttggaataaaaacagggttgaatgagttccagaaagcagggttctcaacctcgtggacagcaatctgcagaagaagagaacttcaaaaaaccaactagaagcaacatgcagagaagtaaaatgagaggggcctcctcaggaaagaagacagctggtccacagcagaaaaatcttgaaccagctctcccaggaagatggggtggtcgctctgcagagaaccccccttcaggatccgtgaggaagaccagaaagaacaagcagaagactcctggaaacggagatggtggcagtaccagcgaagcacctcagccccctcggaagaaaagggcccgggcagaccccactgttgaaagtgaggaggcgtttaagaatagaatggaggttaaagtgaagattcctgaagaattaaaaccatggcttgttgaggactgggacttagttaccaggcagaagcagctgtttcaactccctgccaagaaaaatgtagatgcaattctggaggagtatgcaaattgcaagaaatcgcagggaaatgttgataataaggaatatgcggttaatgaagttgtggcaggaataaaagaatatttcaatgtgatgttgggcactcagctgctctacaaatttgagaggccccagtatgctgaaatcctcttggctcaccctgatgctccaatgtcccaggtttatggagcaccacacctactgagattatttgtaagaattggagcaatgttggcctatacgccccttgatgagaaaagccttgcattattgttgggctatttgcatgatttcctaaaatatctggcaaagaattctgcatctctctttactgccagtgattacaaagtggcttctgctgagtaccaccgcaaagccctgtgagcgtctacagacagctcaccatttttgtcctgtatctgtaaacactttttgttcttagtctttttcttgtaaaattgatgttctttaaaatcgttaatgtataacagggcttatgtttcagtttgttttccgttctgttttaaacagaaaataaaaggagtgtaagctccttttctcatttcaaagttgctaccagtgtatgcagtaattagaacaaagaagaaacattcagtagaacattttattgcctagttgacaacattgcttgaatgctggtggttcctatccctttgacactacacaattttctaatatgtgttaatgctatgtgacaaaacgccctgattcctagtgccaaaggttcaacttaatgtatatacctgaaaacccatgcatttgtgctctttttttttttttatggtgcttgaagtaaaacagcccatcctctgcaagtccatctatgttgttcttaggcattctatctttgctcaaattgttgaaggatggtgatttgtttcatggtttttgtatttgagtctaatgcacgttctaacatgatagaggcaatgcattattgtgtagccacggttttctggaaaagttgatattttaggaattgtatttcagatcttaaataaaatttgtttctaaatttcaaagc

SEQ ID NO: 155376 - DNA, 717 bp, Homo sapiens
  Payload ID: 10545
  Gene Symbol: MORF4L2
  Gene Name: mortality factor 4 like 2
  ENST ID: ENST00000423833
  CDS Start-End: 4-717
aaaatgagaggggcctcctcaggaaagaagacagctggtccacagcagaaaaatcttgaatccgtgaggaagaccagaaagaacaagcagaagactcctggaaacggagatggtggcagtaccagcgaagcacctcagccccctcggaagaaaagggcccgggcagaccccactgttgaaagtgaggaggcgtttaagaatagaatggaggttaaagtgaagattcctgaagaattaaaaccatggcttgttgaggactgggacttagttaccaggcagaagcagctgtttcaactccctgccaagaaaaatgtagatgcaattctggaggagtatgcaaattgcaagaaatcgcagggaaatgttgataataaggaatatgcggttaatgaagttgtggcaggaataaaagaatatttcaatgtgatgttgggcactcagctgctctacaaatttgagaggccccagtatgctgaaatcctcttggctcaccctgatgctccaatgtcccaggtttatggagcaccacacctactgagattatttgtaagaattggagcaatgttggcctatacgccccttgatgagaaaagccttgcattattgttgggctatttgcatgatttcctaaaatatctggcaaagaattctgcatctctctttactgccagtgattacaaagtggcttctgctgagtaccaccgcaaagccctgtga

SEQ ID NO: 155377 - DNA, 784 bp, Homo sapiens
  Payload ID: 10546
  Gene Symbol: MOSPD1
  Gene Name: motile sperm domain containing 1
  Uniprot ID: Q9UJG1
  ENST ID: ENST00000370777
  CDS Start-End: 102-746
attgccaaaatgctttggagtttttaactgaatctaagaaaagtccaaaatagatttgagactgtaaaaacagaaactgcagcaagggggattcagtgccaatgcatcaacaaaaaagacaaccagagttagtggaaggaaatcttcctgttttcgtgttccccacggagctcatattttatgcagatgatcagtcaacacataagcaagtgttgacactgtacaatccctatgagtttgccttaaagttcaaagttttgtgtactactccaaataagtatgttgtcgttgatgctgcaggtgcagtaaagcctcagtgttgtgtggatattgtgattcgtcatcgagatgttcgatcctgtcactatggtgtaatagacaaattccgtctccaagtttccgagcaaagccaaaggaaggctttgggaagaaaagaggttgttgctactcttctcccatcagcaaaagaacaacaaaaggaagaagaggaaaaaagattaaaggaacatttaactgaaagtttattttttgagcagtcgtttcaaccaggtaaaaacagagctgtatcctcaggacctagtttactaactgtcttcctgggagtggtgtgcattgcagccctgatgctgcctacactgggggatgtggaatcgctggtgcctctctacctccacttaagtgtgaatcaaaaattagtggctgcttatatcttaggtcttatcacaatggccatacttagaacatgagcaaggatttcaattgacttctgaagtaaatctgtctt

SEQ ID NO: 155378 - DNA, 773 bp, Homo sapiens
  Payload ID: 10546
  Gene Symbol: MOSPD1
  Gene Name: motile sperm domain containing 1
  Uniprot ID: Q9UJG1
  ENST ID: ENST00000370779
  CDS Start-End: 148-627
ggaggagcagtcgcagctgctttccgaggaagccggtgttgccgagattgccaaaatgctttggagtttttaactgaatctaagaaaagtccaaaatagatttgagactgtaaaaacagaaactgcagcaagggggattcagtgccaatgcatcaacaaaaaagacaaccagagttagtggaaggaaatcttcctgttttcgtgttccccacggagctcatattttatgcagatgatcagtcaacacataagcaagtgttgacactgtacaatccctatgagtttgccttaaagttcaaagttttgtgtactactccaaataagtatgttgtcgttgatgctgcaggtgcagtaaagcctcagtgttgtgtggatattgtgattcgtcatcgagatgttcgatcctgtcactatggtgtaatagacaaattccgtctccaagtttccgagcaaagccaaaggaaggctttgggaagaaaagaggttgttgctactcttctcccatcagcaaaagaacaacaaaaggaagaagaggaaaaaagattaaaggaacatttaactgaaagtttattttttgagcagtcgtttcaaccaggtcttatcacaatggccatacttagaacatgagcaaggatttcaattgacttctgaagtaaatctgtcttgaaaatatgaatgtggactgccttttatctctatttcactccattaacatgcaacaaactattgaatgatttcaaataattgcaaatgtataatatatattttaaatt

SEQ ID NO: 155379 - DNA, 2364 bp, Homo sapiens
  Payload ID: 10546
  Gene Symbol: MOSPD1
  Gene Name: motile sperm domain containing 1
  Uniprot ID: Q9UJG1
  ENST ID: ENST00000370783
  CDS Start-End: 188-829
cccagcaggcagtgcagcctagagacgctgacaaaggagcggaggagcagtcgcagctgctttccgaggaagccggtgttgccgagattgccaaaatgctttggagtttttaactgaatctaagaaaagtccaaaatagatttgagactgtaaaaacagaaactgcagcaagggggattcagtgccaatgcatcaacaaaaaagacaaccagagttagtggaaggaaatcttcctgttttcgtgttccccacggagctcatattttatgcagatgatcagtcaacacataagcaagtgttgacactgtacaatccctatgagtttgccttaaagttcaaagttttgtgtactactccaaataagtatgttgtcgttgatgctgcaggtgcagtaaagcctcagtgttgtgtggatattgtgattcgtcatcgagatgttcgatcctgtcactatggtgtaatagacaaattccgtctccaagtttccgagcaaagccaaaggaaggctttgggaagaaaagaggttgttgctactcttctcccatcagcaaaagaacaacaaaaggaagaagaggaaaaaagattaaaggaacatttaactgaaagtttattttttgagcagtcgtttcaaccagaaaacagagctgtatcctcaggacctagtttactaactgtcttcctgggagtggtgtgcattgcagccctgatgctgcctacactgggggatgtggaatcgctggtgcctctctacctccacttaagtgtgaatcaaaaattagtggctgcttatatcttaggtcttatcacaatggccatacttagaacatgagcaaggatttcaattgacttctgaagtaaatctgtcttgaaaatatgaatgtggactgccttttatctctatttcactccattaacatgcaacaaactattgaatgatttcaaataattgcaaatgtataatatatattttaaattataatttaatttgaaggactgcagaacattattttacagacagcaaggatgcttctgagtgacacctaggaaattatttgaagaaattctttttatatctatacctgttgtgtaagaaactttaaaacatttgttattttctcacctttttttctaattcactttgattgctaggggtcatgtatgcttcgaagttacaggactaaaagagcaaactgaccggcctaaaactaaaatgacatttattccctagctacaaacatcagcgttattatgttaattataccttgccctctatcattataaatggttgccatggtgtttctaaaaataagtgttttaccattaatgtgtagagggcaaacaaagcataaagtactaagggatcatgcttatcctagggtctcacagaagagaggacatatttaattaatcttgtgaattacagaacaggttgtggtccagacaccaagaatcataggggtttttttttaaaaaacctaatagaagtagggtgacctctctctttggtctaagagttctaaaggaaggtaggcatctgtttaattagttggttcaccctggctttacctctggttaatgctttgtgttaataggaaggaaaaatcactttatcttttcttccaagcccctccctgcctgacttacccagactgggattaccagataccaggtgatttatgtggagatgatttttcacctttaaactctaagccaagtgtaagaaactcttgatagctatgtctattttatatcagtcactgagacttttttttaagtttttatttattattaagacaactttgccaaaaaagtcccctaagcacaactatttacatttctttatagcctcttctgatctctaacacatatgcagttttaactgttattttcatagtaactgatcttttgtctaaggatttttacctgaaagcacaatgtattgagtctcttgaaaatcatctttcagatctttttacagaatgaacttatgcactgctactgtagtattctcaaggaatatatgtaaacacaaatgtatgcctgaggttggtttttgcagaaaacagtctctgcttctaaaaacttctatgtctagtcttccataggaaatcctcactgtttaaccatgtgaggagcctaagtcattaaacggatcatgtctgtacattgtgtaatgaatgaaaagcacataaatgtaatctactttgaactttgtaaaaatgatgtgtggaggctattcttgtttctccatctcaagtcctgtgtgtgcacgtgtgtgcaagtgcacatgtgtgtgtgtaataacacattgtaaagaacagaaattactttaaaaaataaacagaaatggagacctgagcttca

SEQ ID NO: 155380 - DNA, 4163 bp, Homo sapiens
  Payload ID: 10547
  Gene Symbol: MOSPD2
  Gene Name: motile sperm domain containing 2
  Uniprot ID: Q8NHP6
  ENST ID: ENST00000380492
  CDS Start-End: 89-1645
gggcgggactgccgggtgatgagatactcggtcggcgacggtagaacgggcgacggcgacaaccgcaatcacatccacgacggtgatcatggcagagaatcacgcccagaataaagccaagctcatctctgagacccggaggaggttcgaagctgagtatgtgacagataagtcagataaatatgatgcacgtgatgttgaaaggctacaacaagatgataactgggttgaaagttacttatcttggagacataatattgtagatgaaacactgaagatgctcgatgagagttttcagtggaggaaagaaatttctgtcaatgaccttaatgaatcctccattcccagatggttattggaaattggtgttatttatctccatggttatgacaaagaaggtaacaaattgttctggatcagggtgaagtatcatgtaaaagaccagaaaaccatattggacaaaaagaagctcatagcattctggttggaacgttatgctaagagggaaaatgggaaacctgtaacagtgatgtttgacctgtcagaaactggaataaatagcattgacatggactttgtacgctttatcatcaactgctttaaggtttattaccctaaatacctctcaaaaatagtgatctttgatatgccttggttaatgaatgctgctttcaaaattgtgaaaacctggcttggtccagaagcagtgagcttgttgaagtttacaagcaaaaatgaagtccaggactatgtcagtgtagaatacctgcctccccacatgggtggaactgatcctttcaagtatagctatccaccactagtagatgatgacttccagaccccactgtgtgagaatgggcctattaccagtgaggatgaaacttcaagtaaagaagacatagaaagtgatggcaaagaaacattggaaacaatttctaatgaagaacaaacacctcttcttaaaaagattaacccaaccgaatctacttccaaagcagaagaaaatgaaaaagttgattcaaaagtgaaagctttcaagaaaccattgagtgtatttaaaggccccttactacacatcagcccagcagaagaactgtactttggaagtacagaatccggagagaagaaaaccttaatagtgttgacaaatgtaactaaaaatatagtggcatttaaggtgagaacaacagctccagaaaaatacagagtcaagccaagcaatagcagctgtgacccgggtgcatcagtggatatagttgtgtctccccatgggggtttaacagtctctgcccaagaccgttttctgataatggctgcagaaatggaacagtcatctggcacaggcccagcagaattaactcagttttggaaagaagttcccagaaacaaagtgatggaacataggttaagatgccatactgttgaaagcagtaaaccaaacactcttacgttaaaagacaatgctttcaatatgtcagataaaaccagtgaagatatatgtctacaactcagtcgtttactagaaagcaataggaagcttgaagaccaagttcagcgttgtatctggttccagcagctgctgctttccttaacaatgctcttgcttgcttttgtcacctctttcttctatttattgtacagttaaagaagtggtgccgggtaggaaccacggttccttcgtccattagttggaaaaagtaacagacctaaaactctaccaagctactaaaaacattgcacatctgtgcttcctaaaaggaaatatgcagcacgtggaggggaacacatacatgtcttgaaaataaactgctagaataaagaaatgctggagaaattgattataagagactatagctatttagtaaagtaagtaaaggcatatccattgtgtaaattaatagtttaaatataatttattttttccttttgatctgaatacttttaaagcttaagttttatcgtgtaaatacattagctaaactgaaaagtataagtaacatgctttgttgcagccaaaaaatgtaatctgcttttttatgacagaattattatagctgagctgacttactagcttttctatactatgtatatagaagaacatgtatattgagaaagaaaacatacttatatagaggaatttatgtaaccatgactttgtaattttgagaattcctcccagtgatggtcagtattcttttggaatgtaaaccgatttaatgccaaaccaccttaacctttgtttctcagtgttccttaacagcctgccttttattaatctcaggcttttttatgaacactctcatttcagtagaatttggaaaactaagcgtggttggaatttctttgaattctgttagtaatgcccaaaagaaaagtctcaagcagtccccctatccagtcatttttatggagtttcatgttgtccactatagctggacactgaaccttttgcctaatttattataaaggcctgaccctctattgtcccatcttcacccccattccagagcagaggagtctctgtggaccatgaattgcactgtctccctcctcatttctaaatgaaaggtattagatataaatttttttgaaaggttagttgtttgagatgctaagcaggataataaatttagattttaaaatgttccctgtaaaagtcagcccatgacaaggaaatttacaaaatactagagtatctagaagggtgaaaacaaaaaaaaataaaaagaaacacagacgcccaggtgtcagctctccgtttaaagaatgaaaaatgtaactcatgatgatctgtgaaaccttcaaactaggaccaattgacttacttgatattctgcctttgatatggtagtacccacccggtattcctaaaatcctaaaaagatacaccttgcagtagcagaggcaatgacatgagtttgttttctcattaatatgaccagtttgggtctatgttggttcacatgtacatctactttatatgaaagaaaaaacagttgtctgcctgtaaaatgttgagtttcgattgagccatgtttggagattttattactattctgaagggtagtgttgttggttttcatcttcaagaagttgattccaaaactgagttatgaagaatgatataacagttccttcaaaattggcctaggaaataaaaccttaaaaggacactggtgtgctactttgtcttaatttgggcttttctgtttcagtttgccacctccagctgtgaaatggactgcagtccaccctaagtactgtgcacagtatctccctgtgtgtgtgcacagtggcttccccttacatggtagatttttggccttaatataatctaatcccaaagtagttgtgtatgttttctgttccttggcaaataaatgaagaaataattagccaagattgaaaatgtattgtcctaacggtgtccctttaatgtttcatatgaaaaattatgttgacccactaaaatatccttgctcaatgtctggtcagttgaatttaataacatatcttgttaatgtttgtgtgtctattaaatgtgactaagcaggattactgaaaattcactataaaatcaaaggcatctaaacgtttgtacttgtcttgattaatcatatatttacacttgatttttttctgtcttcatttgtttttatttaatcataattgcatgatttttttggtactctaatcagtaattttatttttaatcatgtcattacctattcatgaccaaattaccaaggaaccaacatttagatttagatatttgttttcacttaggaatggaaattaatagattttccatgaaagcattagtgaaatatcattaccttgatctgcaagtagcctaaaaatgcgattgctggtaaacctggcctcaaatttcatactaccataactgtttttatatattgccactaattttgactggatttaatagcactttattgtacaactacaaaaaaaaatatattcctagaattgttgccagtgtaatttctctaatgttctggtgcttttcatatattttcagtatttttattactatattggtattttctttgtataaattgattgattaaaagaacatgttttctattttaatatgttttagaaaaataattacatttatgaaataaatatcatcaggaaaaaaa

SEQ ID NO: 155381 - DNA, 1870 bp, Homo sapiens
  Payload ID: 10547
  Gene Symbol: MOSPD2
  Gene Name: motile sperm domain containing 2
  ENST ID: ENST00000482354
  CDS Start-End: 75-1535
ggtgatgagatactcggtcggcgacggtagaacgggcgacggcgacaaccgcaatcacatccacgacggtgatcatggcagagaatcacgcccagaataaagccaagctcatctctgagacccggaggaggttcgaagctgagtatgtgacagataagtcagataaatatgatgcacgtgatgttgaaaggctacaacaagatgataactgggttgaaagttacttatcttggagacataatattgtagatgaaacactgaagatgctcgatgagagttttcagtggaggaaagaaatttctgtcaatgaccttaatgaatcctccattcccagatggttattggaaattggtgttatttatctccatggttatgacaaagaaggtaacaaattgttctggatcagggtgaagtatcatgtaaaagaccagaaaaccatattggacaaaaagaagctcatagcattctggttggaacgttatgctaagagggaaaatgggaaacctgtaacagtgatgtttgacctgtcagaaactggaataaatagcattgacatggactttgtacgctttatcatcaactgctttaaggtttattaccctaaatacctctcaaaaatagtgatctttgatatgccttggttaatgaatgctgctttcaaaattgtgaaaacctggcttggtccagaagcagtgagcttgttgaagtttacaagcaaaaatgaagtccaggactatgtcagtgtagaatacctgcctccccacatgggtggaactgatcctttcaagtatagctatccaccactagtagatgatgacttccagaccccactgtgtgagaatgggcctattaccagtgaggatgaaacttcaagtaaagaagacatagaaagtgatggcaaagaaacattggaaacaatttctaatgaagaacaaacacctcttcttaaaaagattaacccaaccgaatctacttccaaagcagaagaaaatgaaaaagttgattcaaaagtgaaagctttcaagaaaccattgagtgtatttaaaggccccttactacacatcagcccagcagaagaactgtactttggaagtacagaatccggagagaagaaaaccttaatagtgttgacaaatgtaactaaaaatatagtggcatttaaggtgagaacaacagctccagaaaaatacagagtcaagccaagcaatagcagctgtgacccgggtgcatcagtggatatagttgtgtctccccatgggggtttaacagtctctgcccaagaccgttttctgataatggctgcagaaatggaacagtcatctggcacaggcccagcagaattaactcagttttggaaagaagttcccagaaacaaagtgatggaacataggttaagatgccatactgttgaaagcagtaaaccaaacactcttacgttaaaagacaatgctttcaatatgtcagataaaaccagtgaagatatatgtctacaatttgccacctccagctgtgaaatggactgcagtccaccctaagtactgtgcacagtatctccctgtgtgtgtgcacagtggcttccccttacatggtagatttttggccttaatataatctaatcccaaagtagttgtgtatgttttctgttccttggcaaataaatgaagaaataattagccaagattgaaaatgtattgtcctaacggtgtccctttaatgtttcatatgaaaaattatgttgacccactaaaatatccttgctcaatgtctggtcagttgaatttaataacatatcttgttaatgtttgtgtgtctattaaatgtgactaagcaggattactgaaaattcactataaaatcaaaggcatctaaa

SEQ ID NO: 155382 - DNA, 605 bp, Homo sapiens
  Payload ID: 10547
  Gene Symbol: MOSPD2
  Gene Name: motile sperm domain containing 2
  ENST ID: ENST00000460386
  CDS Start-End: 1-474
agcaaaaatgaagtccaggactatgtcagtgtagaatacctgcctccccacatgggtggaactgatcctttcaagtatagctatccaccactagtagatgatgacttccagaccccactgtgtgagaatgggcctattaccagtgaggatgaaacttcaagtaaagaagacatagaaagtgatggcaaagaaacattggaaacaatttctaatgaagaacaaacacctcttcttaaaaagattaacccaaccgaatctacttccaaagcagaagaaaatgaaaaagttgattcaaaagtgaaagctttcaagaaaccattgagtgtatttaaaggccccttactacacatcagcccagcagaagaactgtactttggaagtacagaatccggagagaagaaaaccttaatagtgttgacaaatgtaactaaaaatatagtggcatttaagggagatatacctaatgctaaatgacgagttaatgggtgcagcacaccaacatggcacatgtatacatatgtaacaaacctgcacgttgtgcacatgtaccctaaaacttaaagtataataaaaataaaaaaaataaaaataaaaataaaaataaa

SEQ ID NO: 155383 - DNA, 775 bp, Homo sapiens
  Payload ID: 10547
  Gene Symbol: MOSPD2
  Gene Name: motile sperm domain containing 2
  ENST ID: ENST00000497603
  CDS Start-End: 1-120
atggcagagaatcacgcccagaataaagccaagctcatctctgagacccggaggaggttcgaagctgagtatgtgacaggtgggtactctgttccaggtattaagaaaggtgtgcagtgagcatccccaactttgctggagtgtttgtgagtgtatttgtgggaggtgttagggaccctttcgaccctcacaggaatgatgctgggcacgtctcaaaggttttcctctccatgacaagccgtgtgcactgcttcaaatggtcaagtggtgtgtcccatgctccctttaaagggttaatgtaagttggaaatcggttaagtttttagcatgccctcgtgtttatggaacttgcaggatacttgttaggcccacaacacgggtgacattgtccagtccacggttccactgctggcctttcaccagcaacactagcgaaaatgtacctggaaactgccataatactattgatgtgtacttaattgggtatacaaattccttggatattttgtttgatttggctttcatacaacccagcatgctacccacaaaataggccctccaatgctggaacaagttcttatcccaaactgtatcttgcaaagtacctatgagtccagaattgatttattggttgaacattctgtgtccagatgtcacagatacttgagttgtcaggtacttaactgaatatttaatgcttgtacagtaattttgtaaaacatacggaataacttattgtaaatatggaattaaataaggatttatatgttgccta

SEQ ID NO: 155384 - DNA, 1053 bp, Homo sapiens
  Payload ID: 10548
  Gene Symbol: MOSPD3
  Gene Name: motile sperm domain containing 3
  Uniprot ID: O75425
  ENST ID: ENST00000223054
  CDS Start-End: 203-910
atcggcgtatagttacggcagaaacaaagacgtcctagccaatgacagaggccgtacggcggaagtatagaaaaggactctctggaacatggcaacattaatctgaccacaagctgactggcaggtgctttaaccacaagctctgactccaggccctgtcccctgagctctgccctcggatgtccgaccgcccagagcctgcatgcgccgtggggcgccccaggaccaggagctggtgggtccggggccccctgggcgggggtcccggggcgcccctcctcccttgggacccgttgtcccggtcctggtctttcccccggatctagtattcagggcggaccagcggagcggaccccgacagctgctgaccctctataaccccacaggaactgcgcttcgcttccgagtcctgtgcacagcacctgccaaatacacggtgtttgacgcagagggatatgtgaagccccagtcttgcattgacattgtgattcgccatgtggcacccattcccagccactatgatgtccaggaccgcttccgcattgagctgtctgaggaaggagctgagggccgagtggtgggacgcaaggacattacctccattctgagagccccagcgtacccccttgagcttcagggacagccagatccagcgcctcgcccagggcctcctgctgggacaccaccacccacggccagacacttccaggagcacccccgccagcaactggccaccagctccttcctcctcttcttgctgacggggattgtgtctgtggccttcctgctgctcccactcccggacgaactcggcagccagctgcctcaagtcctgcacgtctccctgggacaaaagttggtggccgcctacgtcttgggcctcctcaccatggtgttcctccggacctgagctccgtgctcaacccccagcccaccccaccctccctgggcagggtcttgaggcagccactgtgatgctcataccttaccttgcctcctaccctcttctctttcctgcctactccccactcctccctgacaaaaaacacccag

SEQ ID NO: 155385 - DNA, 1016 bp, Homo sapiens
  Payload ID: 10548
  Gene Symbol: MOSPD3
  Gene Name: motile sperm domain containing 3
  Uniprot ID: O75425
  ENST ID: ENST00000379527
  CDS Start-End: 119-826
cccggaaggggcgaggccagcggcggggcggggcttatggagatcgtgagctgggcctctgactccaggccctgtcccctgagctctgccctcggatgtccgaccgcccagagcctgcatgcgccgtggggcgccccaggaccaggagctggtgggtccggggccccctgggcgggggtcccggggcgcccctcctcccttgggacccgttgtcccggtcctggtctttcccccggatctagtattcagggcggaccagcggagcggaccccgacagctgctgaccctctataaccccacaggaactgcgcttcgcttccgagtcctgtgcacagcacctgccaaatacacggtgtttgacgcagagggatatgtgaagccccagtcttgcattgacattgtgattcgccatgtggcacccattcccagccactatgatgtccaggaccgcttccgcattgagctgtctgaggaaggagctgagggccgagtggtgggacgcaaggacattacctccattctgagagccccagcgtacccccttgagcttcagggacagccagatccagcgcctcgcccagggcctcctgctgggacaccaccacccacggccagacacttccaggagcacccccgccagcaactggccaccagctccttcctcctcttcttgctgacggggattgtgtctgtggccttcctgctgctcccactcccggacgaactcggcagccagctgcctcaagtcctgcacgtctccctgggacaaaagttggtggccgcctacgtcttgggcctcctcaccatggtgttcctccggacctgagctccgtgctcaacccccagcccaccccaccctccctgggcagggtcttgaggcagccactgtgatgctcataccttaccttgcctcctaccctcttctctttcctgcctactccccactcctccctgacaaaaaacacccagggatttgtactcattttccaagttgaataaaatacatttttaaaatg

SEQ ID NO: 155386 - DNA, 1191 bp, Homo sapiens
  Payload ID: 10548
  Gene Symbol: MOSPD3
  Gene Name: motile sperm domain containing 3
  Uniprot ID: O75425
  ENST ID: ENST00000393950
  CDS Start-End: 283-990
ctgcgaggggccgggtttagcggggtgggcgtggccgtcgaggtggggctcggcgggtccgaaggaacctggggcagagctggaagaggaaaggtcttgggggccctgggcctgggtctgcgggagccccatctagcggggttccaaggcggcggcggcatcagtcgaggccctgctccgggagctcatcttgtcccctttcgcccctcacgccccccagctctgactccaggccctgtcccctgagctctgccctcggatgtccgaccgcccagagcctgcatgcgccgtggggcgccccaggaccaggagctggtgggtccggggccccctgggcgggggtcccggggcgcccctcctcccttgggacccgttgtcccggtcctggtctttcccccggatctagtattcagggcggaccagcggagcggaccccgacagctgctgaccctctataaccccacaggaactgcgcttcgcttccgagtcctgtgcacagcacctgccaaatacacggtgtttgacgcagagggatatgtgaagccccagtcttgcattgacattgtgattcgccatgtggcacccattcccagccactatgatgtccaggaccgcttccgcattgagctgtctgaggaaggagctgagggccgagtggtgggacgcaaggacattacctccattctgagagccccagcgtacccccttgagcttcagggacagccagatccagcgcctcgcccagggcctcctgctgggacaccaccacccacggccagacacttccaggagcacccccgccagcaactggccaccagctccttcctcctcttcttgctgacggggattgtgtctgtggccttcctgctgctcccactcccggacgaactcggcagccagctgcctcaagtcctgcacgtctccctgggacaaaagttggtggccgcctacgtcttgggcctcctcaccatggtgttcctccggacctgagctccgtgctcaacccccagcccaccccaccctccctgggcagggtcttgaggcagccactgtgatgctcataccttaccttgcctcctaccctcttctctttcctgcctactccccactcctccctgacaaaaaacacccagggatttgtactcattttccaagttgaataaaatacatttttaaaatgataatcagaaa

SEQ ID NO: 155387 - DNA, 1115 bp, Homo sapiens
  Payload ID: 10548
  Gene Symbol: MOSPD3
  Gene Name: motile sperm domain containing 3
  Uniprot ID: O75425
  ENST ID: ENST00000424091
  CDS Start-End: 237-914
ggctcggcgggtccgaaggaacctggggcagagctggaagaggaaaggtcttgggggccctgggcctgggtctgcgggagccccatctagcggggttccaaggcggcggcggcatcagtcgaggccctgctccgggagctcatcttgtcccctttcgcccctcacgccccccagctctgactccaggccctgtcccctgagctctgccctcggatgtccgaccgcccagagcctgcatgcgccgtggggcgccccaggaccaggagctggtgggtccggggccccctgggcgggggtcccggggcgcccctcctcccttgggacccgttgtcccggtcctggtctttcccccggatctagtattcagggcggaccagcggagcggaccccgacagctgctgaccctctataaccccacaggaactgcgcttcgcttccgagtcctgtgcacagcacctgccaaatacacggtgtttgacgcagagggatatgtgaagccccagtcttgcattgacatccactatgatgtccaggaccgcttccgcattgagctgtctgaggaaggagctgagggccgagtggtgggacgcaaggacattacctccattctgagagccccagcgtacccccttgagcttcagggacagccagatccagcgcctcgcccagggcctcctgctgggacaccaccacccacggccagacacttccaggagcacccccgccagcaactggccaccagctccttcctcctcttcttgctgacggggattgtgtctgtggccttcctgctgctcccactcccggacgaactcggcagccagctgcctcaagtcctgcacgtctccctgggacaaaagttggtggccgcctacgtcttgggcctcctcaccatggtgttcctccggacctgagctccgtgctcaacccccagcccaccccaccctccctgggcagggtcttgaggcagccactgtgatgctcataccttaccttgcctcctaccctcttctctttcctgcctactccccactcctccctgacaaaaaacacccagggatttgtactcattttccaagttgaataaaatacatttttaaaatgataatcagaaa

SEQ ID NO: 155388 - DNA, 853 bp, Homo sapiens
  Payload ID: 10548
  Gene Symbol: MOSPD3
  Gene Name: motile sperm domain containing 3
  ENST ID: ENST00000493970
  CDS Start-End: 177-853
ggcgcccgctgcagcgggcggagtctggctggagagaggaggcgggcgtccgggaacgcccggaaggggcgaggccagcggcggggcggggcttatggagatcgtgagctgggcctctgactccaggccctgtcccctgagctctgccctcggatgtccgaccgcccagagcctgcatgcgccgtggggcgccccaggaccaggagctggtgggtccggggccccctgggcgggggtcccggggcgcccctcctcccttgggacccgttgtcccggtcctggtctttcccccggatctagtattcagggcggaccagcggagcggaccccgacagctgctgaccctctataaccccacaggaactgcgcttcgcttccgagtcctgtgcacagcacctgccaaatacacggtgtttgacgcagagggatatgtgaagccccagtcttgcattgacattgtgattcgccatgtggcacccattcccagccactatgatgtccaggaccgcttccgcattgagctgtctgaggaaggagctgagggccgagtggtgggacgcaaggacattacctccattctgagagccccagcgtacccccttgagcttcagggacagccagatccagcgcctcgcccagggcctcctgctgggacaccaccacccacggccagacacttccaggagcacccccgccagcaactggccaccagctccttcctcctcttcttgctgacggggattgtgtctgtggccttcctgctgctcccactcccggacgaactcggcagccagctgcctcaagtcctgcacgtctccctgggacaaaagttggtggccgcctacgtcttggg

SEQ ID NO: 155389 - DNA, 979 bp, Homo sapiens
  Payload ID: 10548
  Gene Symbol: MOSPD3
  Gene Name: motile sperm domain containing 3
  ENST ID: ENST00000462372
  CDS Start-End: 147-356
cggcggaagtatagaaaaggactctctggaacatggcaacattaatctgaccacaagctgactggcaggtgctttaaccacaagctctgactccaggccctgtcccctgagctctgccctcggatgtccgaccgcccagagcctgcatgcgccgtggggcgccccaggaccaggagctggtgggtccggggccccctgggcgggggtcccggggcgcccctcctcccttgggacccgttgtcccggtcctggtctttcccccggatctagtattcagggcggaccagcggagcggaccccgacagctgctgaccctctataaccccacaggaactgcgcttcgcttccgagtgtgattcgccatgtggcacccattcccagccactatgatgtccaggaccgcttccgcattgagctgtctgaggaaggagctgagggccgagtggtgggacgcaaggacattacctccattctgagagccccagcgtacccccttgagcttcagggacagccagatccagcgcctcgcccagggcctcctgctgggacaccaccacccacggccagacacttccaggagcacccccgccagcaactggccaccagctccttcctcctcttcttgctgacggggattgtgtctgtggccttcctgctgctcccactcccggacgaactcggcagccagctgcctcaagtcctgcacgtctccctgggacaaaagttggtggccgcctacgtcttgggcctcctcaccatggtgttcctccggacctgagctccgtgctcaacccccagcccaccccaccctccctgggcagggtcttgaggcagccactgtgatgctcataccttaccttgcctcctaccctcttctctttcctgcctactccccactcctccctgacaaaaaacacccagggatttgtactcattttccaagttgaataaaatacatttttaaaatgataatcagaaa

SEQ ID NO: 155390 - DNA, 527 bp, Homo sapiens
  Payload ID: 10549
  Gene Symbol: MLN
  Gene Name: motilin
  Uniprot ID: P12872
  ENST ID: ENST00000266003
  CDS Start-End: 58-402
gaagacaagcagagagactcctccagacccactcagaccacgtgcacgccctccaagatggtatcccgtaaggctgtggctgctctgctggtggtgcatgtagctgccatgctggcctcccagacggaagccttcgtccccatcttcacctatggcgaactccagaggatgcaggaaaaggaacggaataaagggcaaaagaaatccctgagtgtatggcagaggtctggggaggaaggtcctgtagaccctgcggagcccatcagggaagaagaaaacgaaatgatcaagctgactgctcctctggaaattggaatgaggatgaactccagacagctggaaaagtacccggccaccctggaagggctgctgagtgagatgcttccccagcatgccaagtgatggccacgctggggagaaggtggacagatttgggaggcccctcctgcccaagtgaggccctgggaatttacagagcctgccagctgggcttggaaggaaaacaccctttccaaagcaaattcccc

SEQ ID NO: 155391 - DNA, 566 bp, Homo sapiens
  Payload ID: 10549
  Gene Symbol: MLN
  Gene Name: motilin
  Uniprot ID: P12872
  ENST ID: ENST00000430124
  CDS Start-End: 67-414
cggacaccagaagacaagcagagagactcctccagacccactcagaccacgtgcacgccctccaagatggtatcccgtaaggctgtggctgctctgctggtggtgcatgtagctgccatgctggcctcccagacggaagccttcgtccccatcttcacctatggcgaactccagaggatgcaggaaaaggaacggaataaagggcaaaagaaatccctgagtgtatggcagaggtctggggaggaaggtcctgtagaccctgcggagcccatcagggaagaagaaaacgaaatgatcaagctgactgctcctctggaaattggaatgaggatgaactccagacagctggaaaagtacccggccaccctggaagggctgctgagtgagatgcttccccagcatgcagccaagtgatggccacgctggggagaaggtggacagatttgggaggcccctcctgcccaagtgaggccctgggaatttacagagcctgccagctgggcttggaaggaaaacaccctttccaaagcaaattcccctccagcaaataaagcatgaaatataca

SEQ ID NO: 155392 - DNA, 400 bp, Homo sapiens
  Payload ID: 10549
  Gene Symbol: MLN
  Gene Name: motilin
  Uniprot ID: P12872
  ENST ID: ENST00000507738
  CDS Start-End: 36-362
ccagacccactcagaccacgtgcacgccctccaagatggtatcccgtaaggctgtggctgctctgctggtggtgcatgtagctgccatgctggcctcccagacggaagccttcgtccccatcttcacctatggcgaactccagaggatgcaggaaaaggaacggaataaagggcaaaagaaatccctgagtgtatggcagaggtctggggaggaaggtcctgtagaccctgcggagcccatcagggaagaagaaaacgaaatgatcaagctgactgctcctctggaaattggaatgaggatgaactccagacagctggaaaagtacccggccaccctggaagggctgctgacagccaagtgatggccacgctggggagaaggtggacagatttgggaggc

SEQ ID NO: 155393 - DNA, 1239 bp, Homo sapiens
  Payload ID: 10550
  Gene Symbol: MLNR
  Gene Name: motilin receptor
  Uniprot ID: O43193
  ENST ID: ENST00000218721
  CDS Start-End: 1-1239
atgggcagcccctggaacggcagcgacggccccgagggggcgcgggagccgccgtggcccgcgctgccgccttgcgacgagcgccgctgctcgccctttcccctgggggcgctggtgccggtgaccgctgtgtgcctgtgcctgttcgtcgtcggggtgagcggcaacgtggtgaccgtgatgctgatcgggcgctaccgggacatgcggaccaccaccaacttgtacctgggcagcatggccgtgtccgacctactcatcctgctcgggctgccgttcgacctgtaccgcctctggcgctcgcggccctgggtgttcgggccgctgctctgccgcctgtccctctacgtgggcgagggctgcacctacgccacgctgctgcacatgaccgcgctcagcgtcgagcgctacctggccatctgccgcccgctccgcgcccgcgtcttggtcacccggcgccgcgtccgcgcgctcatcgctgtgctctgggccgtggcgctgctctctgccggtcccttcttgttcctggtgggcgtcgagcaggaccccggcatctccgtagtcccgggcctcaatggcaccgcgcggatcgcctcctcgcctctcgcctcgtcgccgcctctctggctctcgcgggcgccaccgccgtccccgccgtcggggcccgagaccgcggaggccgcggcgctgttcagccgcgaatgccggccgagccccgcgcagctgggcgcgctgcgtgtcatgctgtgggtcaccaccgcctacttcttcctgccctttctgtgcctcagcatcctctacgggctcatcgggcgggagctgtggagcagccggcggccgctgcgaggcccggccgcctcggggcgggagagaggccaccggcagaccgtccgcgtcctgctggtggtggttctggcatttataatttgctggttgcccttccacgttggcagaatcatttacataaacacggaagattcgcggatgatgtacttctctcagtactttaacatcgtcgctctgcaacttttctatctgagcgcatctatcaacccaatcctctacaacctcatttcaaagaagtacagagcggcggcctttaaactgctgctcgcaaggaagtccaggccgagaggcttccacagaagcagggacactgcgggggaagttgcaggggacactggaggagacacggtgggctacaccgagacaagcgctaacgtgaagacgatgggataa

SEQ ID NO: 155394 - DNA, 2174 bp, Homo sapiens
  Payload ID: 10551
  Gene Symbol: MNX1
  Gene Name: motor neuron and pancreas homeobox 1
  Uniprot ID: P50219
  ENST ID: ENST00000252971
  CDS Start-End: 302-1507
gcggcctccgcgcggtcgcctgagggctgcagcgcaaagaaccgggctcccgggcccggacgcggggaagcactcgcgtgggagtttgtgcgagcgcggcccggggcggggcccgcacggaggaggcgccgggaccatggtcaccctcggctgagtttccggcggcgactttgattattggcaaataaccaccataacaataccgagcccccgggcttgcaccgcacgcactgactccgcgagcccgcacacggccgcgtcgcccgccaccgggccctgagcgccagccccaaacgagccgatggaaaaatccaaaaatttccgcatcgacgccctgctggcggtggaccccccacgagccgcctctgcgcagagcgcgccgctggccttggtcacgtcgctcgccgccgccgcatctggcaccggaggtggcggcggcggcggcggggcgagcggcgggactagcggcagctgcagccccgcgtcctcggagccgccggctgcgcccgccgaccgcctgcgcgccgagagcccgtcgccgccgcgcctgctggccgcgcactgcgcgctgctgcccaagccgggcttcctgggcgcgggcggcggcggcggcggcacgggcggcgggcacggggggccccaccaccacgcgcatccgggcgcagcggccgctgccgccgccgccgccgccgccgccgccgctgggggcctggcgctggggctgcaccctgggggcgcgcagggcggcgcgggcctcccggcgcaggcggcgctctacggccacccggtctacggctactccgcggcggcggcggcggctgcgctggcgggccagcacccggcgctctcctactcgtacccgcaggtgcaaggcgcgcaccccgcgcaccccgccgaccccatcaagctgggcgccggcaccttccagctggaccagtggctgcgcgcgtccaccgcgggcatgatcctgcctaagatgcccgacttcaactcccaggcgcagtcgaacctcctggggaagtgccgccggccgcgcaccgccttcaccagccagcagctgctggagctggagcaccagttcaagctcaacaagtacctgtcgcggcccaagcgcttcgaggtggccacctcgctcatgctcaccgagacccaggtgaagatttggttccagaaccggcggatgaaatggaaacgcagcaaaaaggccaaagagcaggcggcgcaggaagcggagaaacagaagggcggcggcgggggcgcggggaagggcggcgcggaggagccgggagccgaggagctgctggggccgccagcgcccggagacaagggcagcggacgccgcctgcgggacttgagggacagtgaccccgaggaggacgaggacgaggacgacgaggaccatttcccctacagcaacggcgccagcgtccacgccgcctcctccgactgctcctcggaggacgactcgccgcccccgcggcccagccaccagcccgcgccccagtaggagccccgcggcccagcaggtgcggcgcgcacggagcgccccggccggcggcttctcccggaggccccggcgcccgcacccacccggcccggccccgagagcaggctcgaccgccgccccatggacccctcgcccaggccggggctggagggattcggccgcggctccggtcctgggcgcttcccttttaagcaagggcgcctcacctgctcttcaagaaacagcgagagggagacccagggggctgaaacttgaactctggttcttttaaaattaattttggttggtgttgggggaggcgcgagtgcgtgtgagaagaaccgacccaccccgcgcaaggggaagcctcctgtctcccctttccccgcgtccgagaaggcggaaacccacagtgttacctgacttatgaaacttgaaaccgcctctggagccgccattctgcagagtatttggaaaaagaaaaaagggtttatgcttacgtctctggggtcggggggattatgtcacgagcgttcaaactgctggaaatctcaaaactgtactgtctttatttttgtatattgtatttatatataaaaagaaacgtctacgtatgcatgctaaattattatttagcttctcccatcgcccacgatggaatgtaaaataaattggttttgtactggat

SEQ ID NO: 155395 - DNA, 631 bp, Homo sapiens
  Payload ID: 10551
  Gene Symbol: MNX1
  Gene Name: motor neuron and pancreas homeobox 1
  ENST ID: ENST00000428439
  CDS Start-End: 384-631
tctcttaacgggaaggggcagttggaggtgtgagactgagatctaatgattaacccgaaggctgcaggagaaggaagtcgccgggggaaggcgagccgagagcgccctgaattaggcaggcccgggaatgggggtcagggcttatcaccggggaaaggaacttgggccaggtcccccactggggcgttagagagacccgcggcccctccagggagagggagtgcttcaggagcagcaaacaagagaaatgggcttcggaggcccggggaggcaaggccaaggcccagggaacccccggctcttaccagggcgctgccctcctctggaagggcgttggatccggggtgcgatggccgaggcaggtggcctggcttgaaccagctatggggggactctcaacagtaggtgcctgccctggaatcctgggcgcccaacaagcccaggcgcagtcgaacctcctggggaagtgccgccggccgcgcaccgccttcaccagccagcagctgctggagctggagcaccagttcaagctcaacaagtacctgtcgcggcccaagcgcttcgaggtggccacctcgctcatgctcaccgagacccaggtgaagatttggttccagaaccggcggatgaa

SEQ ID NO: 155396 - DNA, 322 bp, Homo sapiens
  Payload ID: 10551
  Gene Symbol: MNX1
  Gene Name: motor neuron and pancreas homeobox 1
  ENST ID: ENST00000425745
  CDS Start-End: 236-322
cggggaaaggaacttgggccaggtcccccactggggcgttagagagacccgcggcccctccagggagagggagtgcttcaggagcagcaaacaagagaaatgggcttcggaggcccggggaggcaaggccaaggcccagggaacccccggctcttaccagggcgctgccctcctctggaagggcgttggatccggggtgcgatggccgaggcaggtggcctggcttgaaccagctatggggggactctcaacagtaggtgcctgccctggaatcctgggcgcccaacaaggtgaagatttggttccagaaccggcggatgaa

SEQ ID NO: 155397 - DNA, 1620 bp, Homo sapiens
  Payload ID: 10551
  Gene Symbol: MNX1
  Gene Name: motor neuron and pancreas homeobox 1
  Uniprot ID: P50219
  ENST ID: ENST00000543409
  CDS Start-End: 384-953
tctcttaacgggaaggggcagttggaggtgtgagactgagatctaatgattaacccgaaggctgcaggagaaggaagtcgccgggggaaggcgagccgagagcgccctgaattaggcaggcccgggaatgggggtcagggcttatcaccggggaaaggaacttgggccaggtcccccactggggcgttagagagacccgcggcccctccagggagagggagtgcttcaggagcagcaaacaagagaaatgggcttcggaggcccggggaggcaaggccaaggcccagggaacccccggctcttaccagggcgctgccctcctctggaagggcgttggatccggggtgcgatggccgaggcaggtggcctggcttgaaccagctatggggggactctcaacagtaggtgcctgccctggaatcctgggcgcccaacaagcccaggcgcagtcgaacctcctggggaagtgccgccggccgcgcaccgccttcaccagccagcagctgctggagctggagcaccagttcaagctcaacaagtacctgtcgcggcccaagcgcttcgaggtggccacctcgctcatgctcaccgagacccaggtgaagatttggttccagaaccggcggatgaaatggaaacgcagcaaaaaggccaaagagcaggcggcgcaggaagcggagaaacagaagggcggcggcgggggcgcggggaagggcggcgcggaggagccgggagccgaggagctgctggggccgccagcgcccggagacaagggcagcggacgccgcctgcgggacttgagggacagtgaccccgaggaggacgaggacgaggacgacgaggaccatttcccctacagcaacggcgccagcgtccacgccgcctcctccgactgctcctcggaggacgactcgccgcccccgcggcccagccaccagcccgcgccccagtaggagccccgcggcccagcaggtgcggcgcgcacggagcgccccggccggcggcttctcccggaggccccggcgcccgcacccacccggcccggccccgagagcaggctcgaccgccgccccatggacccctcgcccaggccggggctggagggattcggccgcggctccggtcctgggcgcttcccttttaagcaagggcgcctcacctgctcttcaagaaacagcgagagggagacccagggggctgaaacttgaactctggttcttttaaaattaattttggttggtgttgggggaggcgcgagtgcgtgtgagaagaaccgacccaccccgcgcaaggggaagcctcctgtctcccctttccccgcgtccgagaaggcggaaacccacagtgttacctgacttatgaaacttgaaaccgcctctggagccgccattctgcagagtatttggaaaaagaaaaaagggtttatgcttacgtctctggggtcggggggattatgtcacgagcgttcaaactgctggaaatctcaaaactgtactgtctttatttttgtatattgtatttatatataaaaagaaacgtctacgtatgcatgctaaattattatttagcttctcccatcgcccacgatggaatgtaaaataaattggttttgtactggat

SEQ ID NO: 155398 - DNA, 1101 bp, Homo sapiens
  Payload ID: 10551
  Gene Symbol: MNX1
  Gene Name: motor neuron and pancreas homeobox 1
  ENST ID: ENST00000474448
  CDS Start-End: 384-815
tctcttaacgggaaggggcagttggaggtgtgagactgagatctaatgattaacccgaaggctgcaggagaaggaagtcgccgggggaaggcgagccgagagcgccctgaattaggcaggcccgggaatgggggtcagggcttatcaccggggaaaggaacttgggccaggtcccccactggggcgttagagagacccgcggcccctccagggagagggagtgcttcaggagcagcaaacaagagaaatgggcttcggaggcccggggaggcaaggccaaggcccagggaacccccggctcttaccagggcgctgccctcctctggaagggcgttggatccggggtgcgatggccgaggcaggtggcctggcttgaaccagctatggggggactctcaacagtaggtgcctgccctggaatcctgggcgcccaacaaggtaacgaatgcccctccaaggtggggccgagggagcccctgttctccccaccccagagccgctgggcttcgggcagcttcctctccatccgggcgggacacctcgccagaggcctgggcccctcaggctttcctggcacacgcggactctccgggctggggctccggggctctggctctctggggctctggctctccccgctcgccccatcggggtcagctacttatgagtcgggccgagcagatgtatatggctcaacgctttcagccgccgaacacccaaacaaagagaccccattgtttctgtctgagtggatttgtttagactggggagatgcaggcagagcaggggaaaagcaaaaaagaaaacagaaataaacactccagaattcagattcctttgctggaagctgtggttgtgactaaacagagaaaatctaggaccccagaggctggagaagtcacaagaggcccaggcgcagtcgaacctcctggggaagtgccgccggccgcgcaccgccttcaccagccagcagctgctggagctggagcaccagttcaagctcaacaagtacctgtcgcggcccaagcgcttcgaggtggccacctcgctcatgctcaccgagacccaggtgaagatttggttccagaaccggcggatgaa

SEQ ID NO: 155399 - DNA, 169 bp, Homo sapiens
  Payload ID: 10551
  Gene Symbol: MNX1
  Gene Name: motor neuron and pancreas homeobox 1
  ENST ID: ENST00000479817
  CDS Start-End: 1-94
cgcgggcatgatcctgcctaagatgcccgacttcaactgtaaagaaggcacagacaccctcacctcctgcactctaggcagcttccagaattgactaaaaatatcccgagagctttccaggaagccgcagggagccctcgacctgtttgaatctctggctgccggtgga

SEQ ID NO: 155400 - DNA, 209 bp, Homo sapiens
  Payload ID: 10551
  Gene Symbol: MNX1
  Gene Name: motor neuron and pancreas homeobox 1
  ENST ID: ENST00000469500
  CDS Start-End: 24-134
aggtggcctggcttgaaccagctatggggggactctcaacagtaggtgcctgccctggaatcctgggcgcccaacaaggtaaagaaggcacagacaccctcacctcctgcactctaggcagcttccagaattgactaaaaatatcccgagagctttccaggaagccgcagggagccctcgacctgtttgaatctctggctgccggtgga

SEQ ID NO: 155401 - DNA, 3383 bp, Homo sapiens
  Payload ID: 10552
  Gene Symbol: MOV10
  Gene Name: Mov10 RISC complex RNA helicase
  Uniprot ID: Q9HCE1
  ENST ID: ENST00000357443
  CDS Start-End: 169-3180
aggagggaagcctggtggggagaagggagcccgcaggatcaggggtcagagttagggggcttccctcctgctgcaccctcatctcagggccgccaacttccagctgcagcggcgactttcagtttcatttccacggaccctcctgcctgggccgcagccgccgccgcgatgcccagtaagttcagctgccggcagctccgggaggcgggccagtgtttcgagagtttcctggtcgttcggggactggacatggagacagatcgcgagcggctgcggaccatttataaccgcgacttcaagatcagctttgggacccccgcccctggcttctcctccatgctgtatggaatgaagattgcaaatctggcctacgtcaccaagactcgggtcaggttcttcagactcgaccgctgggccgacgtgcggttcccagaaaagaggagaatgaagctggggtcagatatcagcaaacaccacaagtcactgctagccaagatcttttatgacagggctgagtatcttcatgggaaacatggtgtggatgtggaagtccaggggccccatgaagcccgagatgggcagctccttatccgcctggatttgaaccgcaaagaggtgctgaccctgaggcttcggaatggcggaacccagtctgttaccctcactcacctcttcccactctgccggacaccccagtttgctttctacaatgaagaccaggagttgccctgtccactgggccccggtgaatgctatgaactccatgtccattgtaagaccagctttgtgggctacttcccagccacagtgctctgggagctgctgggacctggggagtcgggttcagaaggagccggcacattctacattgcccgcttcttggctgccgtcgcccacagccccctggctgcacagctgaagcccatgactcccttcaagcggacccggatcaccggaaaccctgtggtgaccaatcggatagaggaaggagagagacctgaccgcgctaagggctatgacctggagttaagtatggcgctggggacatactacccacctccccgcctcaggcagctgctccccatgcttcttcagggaacaagtatcttcactgcccctaaggagatcgcagagatcaaggcccagctggagacagccctgaagtggaggaactatgaggtgaagctgcggctgctgctgcacctggaggaactgcagatggagcatgatatccggcactatgacctggagtcggtgcccatgacctgggaccctgtggaccagaaccccaggctgctcacgctggaggttcctggagtgactgagagccgcccctcagtgctacggggcgaccacctgtttgcccttttgtcctcggagacacaccaggaggaccccatcacatataagggctttgtgcacaaggtggaattggaccgtgtcaagctgagcttttccatgagcctcctgagccgctttgtggatgggctgaccttcaaggtgaactttaccttcaaccgccagccgctgcgagtccagcaccgtgccctggagctgacagggcgctggctgctgtggcccatgctctttcctgtggcacctcgggacgtcccgctgctgccctcagatgtgaaactcaagctgtacgaccggagtctggagtcaaacccagagcagctgcaggccatgaggcacattgttacgggcaccacccgtccagccccctacatcatctttgggcctccaggcaccggcaagactgtcacgttagtggaggcaattaagcaggtggtgaagcacttgcccaaagcccacatcttggcctgcgctccatccaactcaggggctgacctactctgtcaaaggctccgggtccaccttcctagctccatctaccgcctcctggcccccagcagggacatccgcatggtacctgaggacatcaagccctgctgcaactgggacgcaaagaagggggagtatgtatttcccgccaagaagaagctgcaggaataccgggtcttaattaccaccctcatcactgccggcaggttggtctcggcccagtttcccattgatcacttcacacacatcttcatcgatgaggctggccactgcatggagcctgagagtctggtagctatagcagggctgatggaagtaaaggaaacaggtgatccaggagggcagctggtgctggcaggagaccctcggcagctggggcctgtgctgcgttccccactgacccagaagcatggactgggatactcactgctggagcggctgctcacctacaactccctgtacaagaagggccctgatggctatgacccccagttcataaccaagctgctccgcaactacaggtctcatcccaccatcctggacattcctaaccagctctattatgaaggggagctgcaggcctgtgctgatgtcgtggatcgagaacgcttctgccgctgggcgggcctacctcgacagggctttcccatcatctttcacggcgtaatgggcaaagatgagcgtgaaggcaacagcccatccttcttcaaccctgaagaggctgccacagtgacttcctacctgaagctgctcctggccccctcctccaagaagggcaaagctcgcctgagccctcgaagtgtgggcgtcatctccccgtaccggaaacaggtggagaaaatccgttactgcatcaccaaacttgacagggagcttcgaggactggatgacatcaaggacttgaaggtgggttcagtagaagaattccaaggccaagaacgaagcgtcatcctcatctccaccgtgcgaagcagccagagctttgtgcagctggatctggactttaatctgggtttccttaagaaccccaagaggttcaatgtagctgtgacccgggccaaggccctgctcatcatcgtggggaacccccttctcctgggccatgaccctgactggaaagtattcctggagttctgtaaagaaaacggagggtataccgggtgtcccttccctgccaaactggacctgcaacagggacagaatttactgcaaggtctgagcaagctcagcccctctacctcagggccccacagccatgactacctcccccaggagcgggagggtgaagggggcctgtctctgcaagtggagccagagtggaggaatgagctctgaagacacagcacccagccttctcgcaccagccaagccttaactgcctgcctgaccctgaaccagaacccagctgaactgcccctccaagggacaggaaggctgggggagggagtttacaacccaagccattccaccccctcccctgctggggagaatgacacatcaagctgctaacaattgggggaaggggaaggaagaaaact

SEQ ID NO: 155402 - DNA, 4100 bp, Homo sapiens
  Payload ID: 10552
  Gene Symbol: MOV10
  Gene Name: Mov10 RISC complex RNA helicase
  ENST ID: ENST00000369644
  CDS Start-End: 1030-3873
gataggacgaagaaaccgaagggaaagctcagggccgccaacttccagctgcagcggcgactttcagtttcatttccacggaccctcctgcctgggccgcagccgccgccgcgatgcccagtaagttcagctgccggcagctccgggaggcgggccagtgtttcgagagtttcctggtcgttcggggactggacatggagacagatcgcgagcggctgcggaccatttataaccgcgacttcaagatcagtcttgcctccagcaaatccatcctccaatcctgatgccagagtgatctgaaatgcaaatatgatcttgccactcccctgcttaaaacccaccaaccgcagtggttctgtaaccacagtgtagcctctgacgtgggctgaaagcacaaagccaggctatttgatctctggagaaggatcctttcccttcctgcttgggttccacctgcaccctatgacttcgggtggaaactgctgtctgatcagccaccttgcccacacacttggacatctgtactgtctctgatcccttctctcctcaccaacaggctggaccccacatccacccctctgaatcaaatcattccgcttccccttagcctcagctctttcttctgggttgtttgtattttcttttctgtcccaaacagtttcccccacaaaaagaactttatgtctttctctgtcttccctcagtccttccagtcagcagcctgtgattgggcttttcccctcagaaacgaacaatccagaacccactgtttaaaacaactgtattttgccttgggaagtcccattgccttccctgaaaacattaaacattcctccgatccccagcctgagtctctctgtctctgggccccatcctgctccacagcagggctggtgtgtccagcacagagtgaccctccgatgccctttcccacccgccgccctgcctccctcgagccctgccttccctcacttcccagtctcctctgcttctggcagctttgggacccccgcccctggcttctcctccatgctgtatggaatgaagattgcaaatctggcctacgtcaccaagactcgggtcaggttcttcagactcgaccgctgggccgacgtgcggttcccagaaaagaggagaatgaagctggggtcagatatcagcaaacaccacaagtcactgctagccaagatcttttatgacagggctgagtatcttcatgggaaacatggtgtggatgtggaagtccaggggccccatgaagcccgagatgggcagctccttatccgcctggatttgaaccgcaaagaggtgctgaccctgaggcttcggaatggcggaacccagtctgttaccctcactcacctcttcccactctgccggacaccccagtttgctttctacaatgaagaccaggagttgccctgtccactgggccccggtgaatgctatgaactccatgtccattgtaagaccagctttgtgggctacttcccagccacagtgctctgggagctgctgggacctggggagtcgggttcagaaggagccggcacattctacattgcccgcttcttggctgccgtcgcccacagccccctggctgcacagctgaagcccatgactcccttcaagcggacccggatcaccggaaaccctgtggtgaccaatcggatagaggaaggagagagacctgaccgcgctaagggctatgacctggagttaagtatggcgctggggacatactacccacctccccgcctcaggcagctgctccccatgcttcttcagggaacaagtatcttcactgcccctaaggagatcgcagagatcaaggcccagctggagacagccctgaagtggaggaactatgaggtgaagctgcggctgctgctgcacctggaggaactgcagatggagcatgatatccggcactatgacctggagtcggtgcccatgacctgggaccctgtggaccagaaccccaggctgctcacgctggaggttcctggagtgactgagagccgcccctcagtgctacggggcgaccacctgtttgcccttttgtcctcggagacacaccaggaggaccccatcacatataagggctttgtgcacaaggtggaattggaccgtgtcaagctgagcttttccatgagcctcctgagccgctttgtggatgggctgaccttcaaggtgaactttaccttcaaccgccagccgctgcgagtccagcaccgtgccctggagctgacagggcgctggctgctgtggcccatgctctttcctgtggcacctcgggacgtcccgctgctgccctcagatgtgaaactcaagctgtacgaccggagtctggagtcaaacccagagcagctgcaggccatgaggcacattgttacgggcaccacccgtccagccccctacatcatctttgggcctccaggcaccggcaagactgtcacgttagtggaggcaattaagcaggtggtgaagcacttgcccaaagcccacatcttggcctgcgctccatccaactcaggggctgacctactctgtcaaaggctccgggtccaccttcctagctccatctaccgcctcctggcccccagcagggacatccgcatggtacctgaggacatcaagccctgctgcaactgggacgcaaagaagggggagtatgtatttcccgccaagaagaagctgcaggaataccgggtcttaattaccaccctcatcactgccggcaggttggtctcggcccagtttcccattgatcacttcacacacatcttcatcgatgaggctggccactgcatggagcctgagagtctggtagctatagcagggctgatggaagtaaaggaaacaggtgatccaggagggcagctggtgctggcaggagaccctcggcagctggggcctgtgctgcgttccccactgacccagaagcatggactgggatactcactgctggagcggctgctcacctacaactccctgtacaagaagggccctgatggctatgacccccagttcataaccaagctgctccgcaactacaggtctcatcccaccatcctggacattcctaaccagctctattatgaaggggagctgcaggcctgtgctgatgtcgtggatcgagaacgcttctgccgctgggcgggcctacctcgacagggctttcccatcatctttcacggcgtaatgggcaaagatgagcgtgaaggcaacagcccatccttcttcaaccctgaagaggctgccacagtgacttcctacctgaagctgctcctggccccctcctccaagaagggcaaagctcgcctgagccctcgaagtgtgggcgtcatctccccgtaccggaaacaggtggagaaaatccgttactgcatcaccaaacttgacagggagcttcgaggactggatgacatcaaggacttgaaggtgggttcagtagaagaattccaaggccaagaacgaagcgtcatcctcatctccaccgtgcgaagcagccagagctttgtgcagctggatctggactttaatctgggtttccttaagaaccccaagaggttcaatgtagctgtgacccgggccaaggccctgctcatcatcgtggggaacccccttctcctgggccatgaccctgactggaaagtattcctggagttctgtaaagaaaacggagggtataccgggtgtcccttccctgccaaactggacctgcaacagggacagaatttactgcaaggtctgagcaagctcagcccctctacctcagggccccacagccatgactacctcccccaggagcgggagggtgaagggggcctgtctctgcaagtggagccagagtggaggaatgagctctgaagacacagcacccagccttctcgcaccagccaagccttaactgcctgcctgaccctgaaccagaacccagctgaactgcccctccaagggacaggaaggctgggggagggagtttacaacccaagccattccaccccctcccctgctggggagaatgacacatcaagctgctaacaattgggggaaggggaaggaagaaaactctgaaaacaaaatcttgttctatg

SEQ ID NO: 155403 - DNA, 3552 bp, Homo sapiens
  Payload ID: 10552
  Gene Symbol: MOV10
  Gene Name: Mov10 RISC complex RNA helicase
  Uniprot ID: Q9HCE1
  ENST ID: ENST00000369645
  CDS Start-End: 309-3320
gcttttcactgagtcccgaggctctggagggtgggcgtgagggtagccctggctgaggctcggaggtcctcccgggctgttcagagggccccaagcggtagccacgttctgatactggctagaagccaggggagggagcttggggtaaggggagggccctgagggaggggtcagacgctttaggaaagagttaatgcgaagagggggaggggataggacgaagaaaccgaagggaaagctcagctgcagcggcgactttcagtttcatttccacggaccctcctgcctgggccgcagccgccgccgcgatgcccagtaagttcagctgccggcagctccgggaggcgggccagtgtttcgagagtttcctggtcgttcggggactggacatggagacagatcgcgagcggctgcggaccatttataaccgcgacttcaagatcagctttgggacccccgcccctggcttctcctccatgctgtatggaatgaagattgcaaatctggcctacgtcaccaagactcgggtcaggttcttcagactcgaccgctgggccgacgtgcggttcccagaaaagaggagaatgaagctggggtcagatatcagcaaacaccacaagtcactgctagccaagatcttttatgacagggctgagtatcttcatgggaaacatggtgtggatgtggaagtccaggggccccatgaagcccgagatgggcagctccttatccgcctggatttgaaccgcaaagaggtgctgaccctgaggcttcggaatggcggaacccagtctgttaccctcactcacctcttcccactctgccggacaccccagtttgctttctacaatgaagaccaggagttgccctgtccactgggccccggtgaatgctatgaactccatgtccattgtaagaccagctttgtgggctacttcccagccacagtgctctgggagctgctgggacctggggagtcgggttcagaaggagccggcacattctacattgcccgcttcttggctgccgtcgcccacagccccctggctgcacagctgaagcccatgactcccttcaagcggacccggatcaccggaaaccctgtggtgaccaatcggatagaggaaggagagagacctgaccgcgctaagggctatgacctggagttaagtatggcgctggggacatactacccacctccccgcctcaggcagctgctccccatgcttcttcagggaacaagtatcttcactgcccctaaggagatcgcagagatcaaggcccagctggagacagccctgaagtggaggaactatgaggtgaagctgcggctgctgctgcacctggaggaactgcagatggagcatgatatccggcactatgacctggagtcggtgcccatgacctgggaccctgtggaccagaaccccaggctgctcacgctggaggttcctggagtgactgagagccgcccctcagtgctacggggcgaccacctgtttgcccttttgtcctcggagacacaccaggaggaccccatcacatataagggctttgtgcacaaggtggaattggaccgtgtcaagctgagcttttccatgagcctcctgagccgctttgtggatgggctgaccttcaaggtgaactttaccttcaaccgccagccgctgcgagtccagcaccgtgccctggagctgacagggcgctggctgctgtggcccatgctctttcctgtggcacctcgggacgtcccgctgctgccctcagatgtgaaactcaagctgtacgaccggagtctggagtcaaacccagagcagctgcaggccatgaggcacattgttacgggcaccacccgtccagccccctacatcatctttgggcctccaggcaccggcaagactgtcacgttagtggaggcaattaagcaggtggtgaagcacttgcccaaagcccacatcttggcctgcgctccatccaactcaggggctgacctactctgtcaaaggctccgggtccaccttcctagctccatctaccgcctcctggcccccagcagggacatccgcatggtacctgaggacatcaagccctgctgcaactgggacgcaaagaagggggagtatgtatttcccgccaagaagaagctgcaggaataccgggtcttaattaccaccctcatcactgccggcaggttggtctcggcccagtttcccattgatcacttcacacacatcttcatcgatgaggctggccactgcatggagcctgagagtctggtagctatagcagggctgatggaagtaaaggaaacaggtgatccaggagggcagctggtgctggcaggagaccctcggcagctggggcctgtgctgcgttccccactgacccagaagcatggactgggatactcactgctggagcggctgctcacctacaactccctgtacaagaagggccctgatggctatgacccccagttcataaccaagctgctccgcaactacaggtctcatcccaccatcctggacattcctaaccagctctattatgaaggggagctgcaggcctgtgctgatgtcgtggatcgagaacgcttctgccgctgggcgggcctacctcgacagggctttcccatcatctttcacggcgtaatgggcaaagatgagcgtgaaggcaacagcccatccttcttcaaccctgaagaggctgccacagtgacttcctacctgaagctgctcctggccccctcctccaagaagggcaaagctcgcctgagccctcgaagtgtgggcgtcatctccccgtaccggaaacaggtggagaaaatccgttactgcatcaccaaacttgacagggagcttcgaggactggatgacatcaaggacttgaaggtgggttcagtagaagaattccaaggccaagaacgaagcgtcatcctcatctccaccgtgcgaagcagccagagctttgtgcagctggatctggactttaatctgggtttccttaagaaccccaagaggttcaatgtagctgtgacccgggccaaggccctgctcatcatcgtggggaacccccttctcctgggccatgaccctgactggaaagtattcctggagttctgtaaagaaaacggagggtataccgggtgtcccttccctgccaaactggacctgcaacagggacagaatttactgcaaggtctgagcaagctcagcccctctacctcagggccccacagccatgactacctcccccaggagcgggagggtgaagggggcctgtctctgcaagtggagccagagtggaggaatgagctctgaagacacagcacccagccttctcgcaccagccaagccttaactgcctgcctgaccctgaaccagaacccagctgaactgcccctccaagggacaggaaggctgggggagggagtttacaacccaagccattccaccccctcccctgctggggagaatgacacatcaagctgctaacaattgggggaaggggaaggaagaaaactctgaaaacaaaatcttgttctatgcaaaa

SEQ ID NO: 155404 - DNA, 3641 bp, Homo sapiens
  Payload ID: 10552
  Gene Symbol: MOV10
  Gene Name: Mov10 RISC complex RNA helicase
  Uniprot ID: Q9HCE1
  ENST ID: ENST00000413052
  CDS Start-End: 391-3402
cgctggatgagcttccccattccggccgcagccgacctagatcccagccctgccctttgctctcctgcttttcactgagtcccgaggctctggagggtgggcgtgagggtagccctggctgaggctcggaggtcctcccgggctgttcagagggccccaagcggtagccacgttctgatactggctagaagccaggggagggagcttggggtaaggggagggccctgagggaggggtcagacgctttaggaaagagttaatgcgaagagggggaggggataggacgaagaaaccgaagggaaagctcagggccgccaacttccagctgcagcggcgactttcagtttcatttccacggaccctcctgcctgggccgcagccgccgccgcgatgcccagtaagttcagctgccggcagctccgggaggcgggccagtgtttcgagagtttcctggtcgttcggggactggacatggagacagatcgcgagcggctgcggaccatttataaccgcgacttcaagatcagctttgggacccccgcccctggcttctcctccatgctgtatggaatgaagattgcaaatctggcctacgtcaccaagactcgggtcaggttcttcagactcgaccgctgggccgacgtgcggttcccagaaaagaggagaatgaagctggggtcagatatcagcaaacaccacaagtcactgctagccaagatcttttatgacagggctgagtatcttcatgggaaacatggtgtggatgtggaagtccaggggccccatgaagcccgagatgggcagctccttatccgcctggatttgaaccgcaaagaggtgctgaccctgaggcttcggaatggcggaacccagtctgttaccctcactcacctcttcccactctgccggacaccccagtttgctttctacaatgaagaccaggagttgccctgtccactgggccccggtgaatgctatgaactccatgtccattgtaagaccagctttgtgggctacttcccagccacagtgctctgggagctgctgggacctggggagtcgggttcagaaggagccggcacattctacattgcccgcttcttggctgccgtcgcccacagccccctggctgcacagctgaagcccatgactcccttcaagcggacccggatcaccggaaaccctgtggtgaccaatcggatagaggaaggagagagacctgaccgcgctaagggctatgacctggagttaagtatggcgctggggacatactacccacctccccgcctcaggcagctgctccccatgcttcttcagggaacaagtatcttcactgcccctaaggagatcgcagagatcaaggcccagctggagacagccctgaagtggaggaactatgaggtgaagctgcggctgctgctgcacctggaggaactgcagatggagcatgatatccggcactatgacctggagtcggtgcccatgacctgggaccctgtggaccagaaccccaggctgctcacgctggaggttcctggagtgactgagagccgcccctcagtgctacggggcgaccacctgtttgcccttttgtcctcggagacacaccaggaggaccccatcacatataagggctttgtgcacaaggtggaattggaccgtgtcaagctgagcttttccatgagcctcctgagccgctttgtggatgggctgaccttcaaggtgaactttaccttcaaccgccagccgctgcgagtccagcaccgtgccctggagctgacagggcgctggctgctgtggcccatgctctttcctgtggcacctcgggacgtcccgctgctgccctcagatgtgaaactcaagctgtacgaccggagtctggagtcaaacccagagcagctgcaggccatgaggcacattgttacgggcaccacccgtccagccccctacatcatctttgggcctccaggcaccggcaagactgtcacgttagtggaggcaattaagcaggtggtgaagcacttgcccaaagcccacatcttggcctgcgctccatccaactcaggggctgacctactctgtcaaaggctccgggtccaccttcctagctccatctaccgcctcctggcccccagcagggacatccgcatggtacctgaggacatcaagccctgctgcaactgggacgcaaagaagggggagtatgtatttcccgccaagaagaagctgcaggaataccgggtcttaattaccaccctcatcactgccggcaggttggtctcggcccagtttcccattgatcacttcacacacatcttcatcgatgaggctggccactgcatggagcctgagagtctggtagctatagcagggctgatggaagtaaaggaaacaggtgatccaggagggcagctggtgctggcaggagaccctcggcagctggggcctgtgctgcgttccccactgacccagaagcatggactgggatactcactgctggagcggctgctcacctacaactccctgtacaagaagggccctgatggctatgacccccagttcataaccaagctgctccgcaactacaggtctcatcccaccatcctggacattcctaaccagctctattatgaaggggagctgcaggcctgtgctgatgtcgtggatcgagaacgcttctgccgctgggcgggcctacctcgacagggctttcccatcatctttcacggcgtaatgggcaaagatgagcgtgaaggcaacagcccatccttcttcaaccctgaagaggctgccacagtgacttcctacctgaagctgctcctggccccctcctccaagaagggcaaagctcgcctgagccctcgaagtgtgggcgtcatctccccgtaccggaaacaggtggagaaaatccgttactgcatcaccaaacttgacagggagcttcgaggactggatgacatcaaggacttgaaggtgggttcagtagaagaattccaaggccaagaacgaagcgtcatcctcatctccaccgtgcgaagcagccagagctttgtgcagctggatctggactttaatctgggtttccttaagaaccccaagaggttcaatgtagctgtgacccgggccaaggccctgctcatcatcgtggggaacccccttctcctgggccatgaccctgactggaaagtattcctggagttctgtaaagaaaacggagggtataccgggtgtcccttccctgccaaactggacctgcaacagggacagaatttactgcaaggtctgagcaagctcagcccctctacctcagggccccacagccatgactacctcccccaggagcgggagggtgaagggggcctgtctctgcaagtggagccagagtggaggaatgagctctgaagacacagcacccagccttctcgcaccagccaagccttaactgcctgcctgaccctgaaccagaacccagctgaactgcccctccaagggacaggaaggctgggggagggagtttacaacccaagccattccaccccctcccctgctggggagaatgacacatcaagctgctaacaattgggggaaggggaaggaagaaaactctgaaaacaaaatcttgttctatgcaaaagccttga

SEQ ID NO: 155405 - DNA, 3960 bp, Homo sapiens
  Payload ID: 10553
  Gene Symbol: MOV10L1
  Gene Name: Mov10 RISC complex RNA helicase like 1
  Uniprot ID: Q9BXT6
  ENST ID: ENST00000262794
  CDS Start-End: 84-3719
attggtggcgggcggcgggagcggcgcgggcgcgtgcgggcggcggcagcggcggtgacggcagcctaggccgggcgagggccatgctgagcctcgcagccaagctggtggccttcttctggaggacggcggacacccctagggaggaagccgggcagctggagcccgagctcgcggaaggtgacactaagctgaaaactgtacggggtgtcgtgacaaggtactgcagcgattatggcatgattgatgatatgatctacttctccagtgatgctgtgactagcagagtgcttctgaatgttggacaggaagtgattgcagttgtggaagaaaataaagtgtccaatggactgaaagcaatcagggtagaagctgtctctgataagtgggaagacgacagcagaaaccatgggagtccctcagactgcggcccccgagtgttgattggctgtgtgacttccctggtggagggcgcaggctgtatcagtcagaccacctacttctctctggagagtgtgtgcgaaggcttcgagccctgcaagggagactgggtggaggctgagtaccggatccggcctggcacgtggagcagcgaagccacctcagtgaagccactgagatacaagcgcgtggacaaggtctgcatctctagcctctgtggaaggaacggggtgttagaggaaagcatcttctttaccttggactccttgaaactgccagatgggtacacaccccggagaggtgacgtggtcaatgcagtggtggtggagagcagccagtcatgctatgtctggagggcactttgtatgaccctagtgaagaggcgagacgccgcccctgttcatgaggccactcatttctatggaacgattttgctgaagaacaaaggtgatattgaagttacacaggtgacgcattttggaaccctaaaggaaggaagaagtaaaaccatggtgatctggatagagaataaaggagacattcctcaaaacttagtcagctgtaaactggctggctgggataaatctaaacaattcagattccaaatgctggataaagaccagatgtgccccgtggtatcttttgtttctgttcctgagaaggagaattcatcagatgaaaatattaattcattaaatagccacacaaaaaacaaaacctctcagatgtcggagagcagtttggtgaacaacagaggaatctctccaggtgattgtacctgtaaaggagaaaatggagaaaaagacaacattctatcaaggaagcagatgacagagcctgagcctggggggcttgtccctccagggggaaaaaccttcattgtggtcatctgtgacggaaaaaatcctggccgctgcaaggagctccttttgctctgtttttccgatttcctaattgggcgataccttgaagtaaatgttatcagtggggaggagtcactaattgctgcgcgcgaaccattttcttggaaaaagcttaaaagttcacaagcgttaacatccgcaaaaactacagttgttgtgaccgcacagaaaaggaactcaagacgacaacttccaagttttcttccccaatatccaatcccagatagacttagaaaatgtgtggaacaaaaaattgacatcctgactttccagccattacttgcagagcttctgaacatgtcaaattacaaggagaagttttcgactttgctgtggcttgaggagatttatgcagaaatggaactgaaagagtataacatgagcgggatcatcttaagaaggaatggggatctgctggttctggaggtcccagggttggccgaagggaggccttctctctacgcaggtgataaactgattttaaaaactcaagagtacaatggacatgccatcgaatacatcagctacgtgactgagattcatgaagaagatgtaactcttaaaattaatccagaatttgaacaagcctataactttgaacctatggatgtggaatttacatataataggaccacaagcagacggtgtcactttgcacttgaacacgtcatccacttaggtgtaaaagtgttgtttccagaagaaattattttacagtctccacaagtgacgggaaattggaaccatgcacaagacaccaaaagcagtggacagtccaccagcaaaaagaataggaaaacaatgacggaccaagctgagcatggaacagaggagaggcgtgttggtgacaaggacctgccggtgctggcaccctttactgcagagatgagcgattgggtagatgaaattcagacccctaaagcaagaaagatggagtttttcaacccagtgctaaatgaaaatcagaagttagcagttaaaaggattctgagtggtgactgccgtcccctcccgtatattctctttggacctcctggtactggaaagacagtgacaataatagaggctgttttacaggtacactttgccttgccggacagtcggattttagtctgtgcgccctccaacagtgctgctgacctcgtgtgtctgcggctgcacgagagcaaggtgctacagccggccaccatggtccgggtgaacgccacctgcaggttcgaggagatagttattgacgccgtcaaaccgtattgcagagacggagaagacatctggaaagcctcacgcttccggataatcatcaccacatgcagcagctcagggctgttttaccaaataggagtgagagttgggcacttcactcacgtgtttgtggacgaggctgggcaggcaagtgagccggaatgcctcattcctctggggctgatgtcggacatcagtggccagatcgtgctggcaggagaccccatgcagctcggcccagtcattaagtccagactcgccatggcctatgggctgaacgtgtcctttttggaacggctgatgtctcgacccgcgtaccagagggacgaaaatgctttcggtgcttgtggcgcacataatcccctgttggtcacaaagctggtgaagaactaccggtcccacgaggccctgctgatgctgccctcacggctgttctaccacagggaactcgaggtctgtgcggaccccacagtggtgacctccttgctgggctgggagaagttgcctaagaaaggcttccctctcatcttccatggtgtgcggggcagcgaggcacgggagggaaaaagcccatcgtggttcaacccggccgaggccgtccaggtcctgcgctactgctgcctcctggcccacagcatctccagtcaggtgtctgccagcgacattggcgtcatcacgccctaccggaagcaggtggagaaaatcagaattcttttgcgtaatgttgatctgatggatataaaggttggatcagtagaggagtttcaaggacaagagtatctggtcatcatcatttcgaccgtacggtcaaatgaagatagatttgaagatgatcgatattttttgggtttcttgtccaactcaaaaagatttaatgttgcaatcaccagacccaaagctttgctgatagtgctgggaaacccccatgttctcgttcgagacccctgttttggtgctttgctggaatacagtattacaaacggtgtttacatgggatgcgatttacctcctgcactgcagtctctgcaaaactgtggcgagggggtggcagacccctcctacccagtggtgccagaatccacaggaccagagaagcatcaggagcccagctgatctgcagtggctgacagcagggaggccatgtgctcagcctggccacgttgccgttacagtctgctccgtggctcctgtggcctgcccttgtctcgcagccaggcagggtcgtgtgtgggtgtggggctgccaggttggacgcagctgctgctgccctgactttggcatatgccagcctgttcctgccacagggcagtcactgccgcctaccctgaaataaaccctcgagtgacccccagaa

SEQ ID NO: 155406 - DNA, 1701 bp, Homo sapiens
  Payload ID: 10553
  Gene Symbol: MOV10L1
  Gene Name: Mov10 RISC complex RNA helicase like 1
  Uniprot ID: Q9BXT6
  ENST ID: ENST00000354853
  CDS Start-End: 306-683
agacgctgcgtgcaaagcactgggtgctgatgtggcttagcatctcctgacacctgtggcctgtcctccctccagccgggtgacacccagacccccagctcctgcacacccctgggcaaccctgctgtgcccccggggtgctgagcgtggctttgccagtgtgtcagaggcatcaattgctaaaacaattcggcagaaattaccatttagaacatctttgctctagagttgggcacttcactcacgtgtttgtggacgaggctgggcaggcaagtgagccggaatgcctcattcctctggggctgatgtcggacatcagtggccaggtcacaaagctggtgaagaactaccggtcccacgaggccctgctgatgctgccctcacggctgttctaccacagggaactcgaggtctgtgcggaccccacagtggtgacctccttgctgggctgggagaagttgcctaagaaaggcttccctctcatcttccatggtgtgcggggcagcgaggcacgggagggaaaaagcccatcgtggttcaacccggccgaggccgtccaggtcctgcgctactgctgcctcctggcccacagcatctccagtcaggtgtctgccagcgacattggcgtcatcacgccctaccggaagcaggtacgccctgcccaggcacgcctggttctgtgaggtccctgcagccctgctccttggctcctgcagctccacagaggcaggaacaagctccttgtgagcagcagcaggtttttaaaggggcaggaccgcacttgaatgtcgttcaacatgagaggtcacccaactgccatccatgggccagttccgggcagctgccagcttttctacggccagagcctcgaacagtttttacatttctaaatggttacatttatatgtcccttgatatttggccctttgggaaaacatttgccaacccccagctctaacccagtgtttctcaaagggggcactttgggtatatttgaatgggacgcttctcatttcgtatgactctgtgatgtgattataggagagttagcgtccccaggccccaggggctggtcccaggaagcatctccacacgttcacagtggctctggagctctggtggggacacaggtgcctcccatgccgaacaccaggtttcattcatgaagcatgtgtccctgtggtgttcacaccaccaagcagaacttggaaagaacccccaaaatacagaagaaaaggtgagtcccctaggccatcacagtaacagatcacctgtaccgcgcgtgtgctgaccgcagagcccgtcaaagatgttatgtttccttttttctgacctcggggactcgagaggtgagtgcttagttctcccagaggtacagagattacgaaggcttatggagacaagtaagttgccagacatcacacagccagtgtcctggtgtcttaacctcagcttgtaggtgccatcctgctgagacatccagcttagagctgccatcctcagctctaagcatcagacatgcatctcgtttctcctgaaggatttcctccatccttgatatgtgcttgtggggagggaggattttccacatgaaacttggctttcctagtaagcattgtcccccgtccccagtttaactaaaactgcaatttgtgttctaatcaattcagattagaagaaagcaataaagaattaaaaaac

SEQ ID NO: 155407 - DNA, 1422 bp, Homo sapiens
  Payload ID: 10553
  Gene Symbol: MOV10L1
  Gene Name: Mov10 RISC complex RNA helicase like 1
  Uniprot ID: Q9BXT6
  ENST ID: ENST00000395852
  CDS Start-End: 178-1194
gagagccgtgtgtggctaccggattggacagcacggatctgaacaagacagggattttttttgttaatgtgtgttgatgagtcaaaggtcaagagccgaagagccagtcctcactggggtgcagagggctctttgggggcagagcgggcactgcatggaccctgcaccctggagctgatgttcagagttgggcacttcactcacgtgtttgtggacgaggctgggcaggcaagtgagccggaatgcctcattcctctggggctgatgtcggacatcagtggccagatcgtgctggcaggagaccccatgcagctcggcccagtcattaagtccagactcgccatggcctatgggctgaacgtgtcctttttggaacggctgatgtctcgacccgcgtaccagagggacgaaaatgctttcggtgcttgtggcgcacataatcccctgttggtcacaaagctggtgaagaactaccggtcccacgaggccctgctgatgctgccctcacggctgttctaccacagggaactcgaggtctgtgcggaccccacagtggtgacctccttgctgggctgggagaagttgcctaagaaaggcttccctctcatcttccatggtgtgcggggcagcgaggcacgggagggaaaaagcccatcgtggttcaacccggccgaggccgtccaggtcctgcgctactgctgcctcctggcccacagcatctccagtcaggtgtctgccagcgacattggcgtcatcacgccctaccggaagcaggtggagaaaatcagaattcttttgcgtaatgttgatctgatggatataaaggttggatcagtagaggagtttcaaggacaagagtatctggtcatcatcatttcgaccgtacggtcaaatgaagatagatttgaagatgatcgatattttttgggtttcttgtccaactcaaaaagatttaatgttgcaatcaccagacccaaagctttgctgatagtgctgggaaacccccatgttctcgttcgagacccctgttttggtgctttgctggaatacagtattacaaacggtgtttacatgggatgcgatttacctcctgcactgcagtctctgcaaaactgtggcgagggggtggcagacccctcctacccagtggtgccagaatccacaggaccagagaagcatcaggagcccagctgatctgcagtggctgacagcagggaggccatgtgctcagcctggccacgttgccgttacagtctgctccgtggctcctgtggcctgcccttgtctcgcagccaggcagggtcgtgtgtgggtgtggggctgccaggttggacgcagctgctgctgccctgactttggcatatgccagcctgttcctgccacagggcagtcactgccgcctaccctgaaataaaccctcga

SEQ ID NO: 155408 - DNA, 1044 bp, Homo sapiens
  Payload ID: 10553
  Gene Symbol: MOV10L1
  Gene Name: Mov10 RISC complex RNA helicase like 1
  ENST ID: ENST00000395854
  CDS Start-End: 36-206
gcggcggtgacggcagcctaggccgggcgagggccatgctgagcctcgcagccaagctggtggccttcttctggaggacggcggacacccctagggaggaagccgggcagctggagcccgagctcgcggaaggtggctcgcgggaggcggctgggaggcgggtcccgggccctcgcgtgtcggccacgagggagccgcgcccataggtctttgagtgcagtgcgggccggcaggcaacgctgggcccggcctttcctcatctccgctggcggggatccccgttcgcctcaggaggcttccgaccccacagcatcccgccgctctgggcgcccgtcctctgtgaggtctctccggtgacaccagcccctcttcccgccctcactttgtgtgtttacgccgagcagctgccaagtcgtctctccatgtcgttcctccctgtccgcagcgtcattggcggtggtgacactaagctgaaaactgtacggggtgtcgtgacaaggtactgcagcgattatggcatgattgatgatatgatctacttctccagtgatgctgtgactagcagagtgcttctgaatgttggacaggaagtgattgcagttgtggaagaaaataaagtgtccaatggactgaaagcaatcagggtagaagctgtctctgataagtgggaagacgacagcagaaaccatgggagtccctcagactgcggcccccgagtgttgattggctgtgtgacttccctggtggagggcgcaggctgtatcagtcagaccacctacttctctctggagagtgtgtgcgaaggcttcgagccctgcaagggagactgggtggaggctgagtaccggatccggcctggcacgtggagcagcgaagccacctcagtgaagccactgagatacaagcgcgtggacaaggtagcgtgccgactagtggctcctctctgtgcttctggcagacctgccatcaggggtaacttgcacggcccaggcttctcctgcatgtgttggaagcctggaaaaataaagctttgtcatggccaaa

SEQ ID NO: 155409 - DNA, 3763 bp, Homo sapiens
  Payload ID: 10553
  Gene Symbol: MOV10L1
  Gene Name: Mov10 RISC complex RNA helicase like 1
  Uniprot ID: Q9BXT6
  ENST ID: ENST00000395858
  CDS Start-End: 25-3522
ggcagcctaggccgggcgagggccatgctgagcctcgcagccaagctggtggccttcttctggaggacggcggacacccctagggaggaagccgggcagctggagcccgagctcgcggaaggtgacactaagctgaaaactgtacggggtgtcgtgacaaggtactgcagcgattatggcatgattgatgatatgatctacttctccagtgatgctgtgactagcagagtgcttctgaatgttggacaggaagtgattgcagttgtggaagaaaataaagtgtccaatggactgaaagcaatcagggtagaagctgtctctgataagtgggaagacgacagcagaaaccatgggagtccctcagactgcggcccccgagtgttgattggctgtgtgacttccctggtggagggcgcaggctgtatcagtcagaccacctacttctctctggagagtgtgtgcgaaggcttcgagccctgcaagggagactgggtggaggctgagtaccggatccggcctggcacgtggagcagcgaagccacctcagtgaagccactgagatacaagcgcgtggacaaggtctgcatctctagcctctgtggaaggaacggggtgttagaggaaagcatcttctttaccttggactccttgaaactgccagatgggtacacaccccggagaggtgacgtggtcaatgcagtggtggtggagagcagccagtcatgctatgtctggagggcactttgtatgaccctagtgaagaggcgagacgccgcccctgttcatgaggccactcatttctatggaacgattttgctgaagaacaaaggtgatattgaagttacacaggtgacgcattttggaaccctaaaggaaggaagaagtaaaaccatggtgatctggatagagaataaaggagacattcctcaaaacttagtcagctgtaaactggctggctgggataaatctaaacaattcagattccaaatgctggataaagaccagatgtgccccgtggtatcttttgtttctgttcctgagaaggagaattcatcagatgaaaatattaattcattaaatagccacacaaaaaacaaaacctctcagatgtcggagagcagtttggtgaacaacagaggaatctctccaggtgattgtacctgtaaaggagaaaatggagaaaaagacaacattctatcaaggaagcagatgacagagcctgagcctggggggcttgtccctccagggggaaaaaccttcattgtggtcatctgtgacggaaaaaatcctggccgctgcaaggagctccttttgctctgtttttccgatttcctaattgggcgataccttgaagtaaatgttatcagtggggaggagtcactaattgctgcgcgcgaaccattttcttggaaaaagcttaaaagttcacaagcgttaacatccgcaaaaactacagttgttgtgaccgcacagaaaaggaactcaagacgacaacttccaagttttcttccccaatatccaatcccagatagacttagaaaatgtgtggaacaaaaaattgacatcctgactttccagccattacttgcagagcttctgaacatgtcaaattacaaggagaagttttcgactttgctgtggcttgaggagatttatgcagaaatggaactgaaagagtataacatgagcgggatcatcttaagaaggaatggggatctgctggttctggaggtcccagggttggccgaagggaggccttctctctacgcaggtgataaactgattttaaaaactcaagagtacaatggacatgccatcgaatacatcagctacgtgactgagattcatgaagaagatgtaactcttaaaattaatccagaatttgaacaagcctataactttgaacctatggatgtggaatttacatataataggaccacaagcagacggtgtcactttgcacttgaacacgtcatccacttaggtgtaaaagtgttgtttccagaagaaattattttacagtctccacaagtgacgggaaattggaaccatgcacaagacaccaaaagcagtggacagtccaccagcaaaaagaataggaaaacaatgacggaccaagctgagcatggaacagaggagaggcgtgttggtgacaaggacctgccggtgctggcaccctttactgcagagatgagcgattgggtagatgaaattcagacccctaaagcaagaaagatggagtttttcaacccagtgctaaatgaaaatcagaagttagcagttaaaaggattctgagtggtgactgccgtcccctcccgtatattctctttggacctcctggtactggaaagacagtgacaataatagaggctgttttacaggtacactttgccttgccggacagtcggattttagtctgtgcgccctccaacagtgctgctgacctcgtgtgtctgcggctgcacgagagcaaggtgctacagccggccaccatggtccgggtgaacgccacctgcaggttcgaggagatagttattgacgccgtcaaaccgtattgcagagacggagaagacatctggaaagcctcacgcttccggataatcatcaccacatgcagcagctcagggctgttttaccaaataggagtgagagttgggcacttcactcacgtgtttgtggacgaggctgggcaggcaagtgagccggaatgcctcattcctctggggctgatgtcggacatcagtggccagatcgtgctggcaggagaccccatgcagctcggcccagtcattaagtccagactcgccatggcctatgggctgaacgtgtcctttttggaacggctgatgtctcgacccgcgtaccagagggacgaaaatgctttcggtgcttgtggcgcacataatcccctgttggtcacaaagctggtgaagaactaccggtcccacgaggccctgctgatgctgccctcacggctgttctaccacagggaactcgaggtctgtgcggaccccacagtggtgacctccttgctgggctgggagaagttgcctaagaaaggcttccctctcatcttccatggtgtgcggggcagcgaggcacgggagggaaaaagcccatcgtggttcaacccggccgaggccgtccaggtcctgcgctactgctgcctcctggcccacagcatctccagtcaggtgtctgccagcgacattggcgtcatcacgccctaccggaagcaggtggagaaaatcagaattcttttgcgtaatgttgatctgatggatataaaggttggatcagtagaggagtttcaaggacaagagtatctggtcatcatcatttcgaccgacccctgttttggtgctttgctggaatacagtattacaaacggtgtttacatgggatgcgatttacctcctgcactgcagtctctgcaaaactgtggcgagggggtggcagacccctcctacccagtggtgccagaatccacaggaccagagaagcatcaggagcccagctgatctgcagtggctgacagcagggaggccatgtgctcagcctggccacgttgccgttacagtctgctccgtggctcctgtggcctgcccttgtctcgcagccaggcagggtcgtgtgtgggtgtggggctgccaggttggacgcagctgctgctgccctgactttggcatatgccagcctgttcctgccacagggcagtcactgccgcctaccctgaaataaaccctcgagtgacccccagaa

SEQ ID NO: 155410 - DNA, 937 bp, Homo sapiens
  Payload ID: 10553
  Gene Symbol: MOV10L1
  Gene Name: Mov10 RISC complex RNA helicase like 1
  ENST ID: ENST00000434497
  CDS Start-End: 1-500
aaatgctggataaagaccagatgtgccccgtggtatcttttgtttctgttcctgagaaggagaattcatcagatgaaaatattaattcattaaatagccacacaaaaaacaaaacctctcagatgtcggagagcagtttggtgaacaacagaggaatctctccaggtgattgtacctgtaaaggagaaaatggagaaaaagacaacattctatcaaggaagcagatgacagagcctgagcctggggggcttgtccctccagggggaaaaaccttcattgtggtcatctgtgacggaaaaaatcctggccgctgcaaggagctccttttgctctgtttttccgatttcctaattgggcgataccttgaagtaaatgttatcagtggggaggagtcactaattgctgcgcgcgaaccattttcttggaaaaagcttaaaagttcacaagcgttaacatccgcaaaaactacagttgttgtgaccgcacagaaaagcttctgaacatgtcaaattacaaggagaagttttcgactttgctgtggcttgaggagatttatgcagaaatggaactgaaagagtataacatgagcgggatcatcttaagaaggaatggggatctgctggttctggaggtcccagggttggccgaagggaggccttctctctacgcaggaccacaagcagacggtgtcactttgcacttgaacacgtcatccacttaggtgtaaaagtgttgtttccagaagaaattattttacagtctccacaagtgacgggaaattggaaccatgcacaagacaccaaaagcagtggacagtccaccagcaaaaagaataggaaaacaatgacggaccaagctgagcatggaacagaggagaggcgtgttggtgacaaggacctgccggtgctggcaccctttactgcagagatgagcgatt

SEQ ID NO: 155411 - DNA, 2003 bp, Homo sapiens
  Payload ID: 10553
  Gene Symbol: MOV10L1
  Gene Name: Mov10 RISC complex RNA helicase like 1
  ENST ID: ENST00000419054
  CDS Start-End: 45-215
gcggcggcagcggcggtgacggcagcctaggccgggcgagggccatgctgagcctcgcagccaagctggtggccttcttctggaggacggcggacacccctagggaggaagccgggcagctggagcccgagctcgcggaaggtggctcgcgggaggcggctgggaggcgggtcccgggccctcgcgtgtcggccacgagggagccgcgcccataggtctttgagtgcagtgcgggccggcaggcaacgctgggcccggcctttcctcatctccgctggcggggatccccgttcgcctcaggaggcttccgaccccacagcatcccgccgctctgggcgcccgtcctctgtgaggtctctccggtgacaccagcccctcttcccgccctcactttgtgtgtttacgccgagcagctgccaagtcgtctctccatgtcgttcctccctgtccgcagcgtcattggcggtggtgtgtctagaaagccccgaaaaacgcggccccgcagacttggcctgtcctttcagaacgcgctgcgccaaggcgtgccatttccttgtctggttttcaagcccatctttctaaagcccgggatgcgcccggatgccctcaccgttcctttctcctgaggtgtttgtgtgtgtgtgtgtgtgagacggagtttcgctcttgttgcccaggctggagtgcagtggcgcaatctcggctcaccgcaacctccgccttctgggttcaagtgattctcctgcctcagcctcccgagcagcggggattataggcacccgccaccacgcccggctaatttttgtatttttagtcgagggggggttcgccatgttggtcaggctggtctcgaactcctgatctcaggtgacccacccaccttggcctcccaaagtgctgggattacaggcttgagccaccacgcccgacctctcccgaggttctgatggcttctcccgatgtttccttatgtgggaatggaatccacagtagtgggtccctaattgccttctgtgagaaaagacaggaacaggcttcaggaggggagcttcctgctgcaggcagcgtgttcagggcctctggatccacgagggccgatgcccggggggccggctgtgttacctggagcacttgctccgtggatctcttcggtagaacacgcgctcagcggtagctggagctccagctcttggcagcgctcagatcctatgcctgtactgtaaccgtcgccccaggttcctcccgtggctgggaagctgcagtaaaggcacgttcaggactcaggaccgtggctgcagcagtggccagacggctgagggcgtgcgctgctcctgggccagacttgtctgcccagccccgaaccttttccagcaccgtgtttgttgagattctccagtcttccgaggctgctgctgatggtgacactaagctgaaaactgtacggggtgtcgtgacaaggtactgcagcgattatggcatgattgatgatatgatctacttctccagtgatgctgtgactagcagagtgcttctgaatgttggacaggaagtgattgcagttgtggaagaaaataaagtgtccaatggactgaaagcaatcagggtagaagctgtctctgataagtgggaagacgacagcagaaaccatgggagtccctcagactgcggcccccgagtgttgattggctgtgtgacttccctggtggagggcgcaggctgtatcagtcagaccacctacttctctctggagagtgtgtgcgaaggcttcgagccctgcaagggagactgggtggaggctgagtaccggatccggcctggcacgtggagcagcgaagccacctcagtgaagccactgagatacaagcgcgtggacaaggtagcgtgccgactagtggctcctctctgtgcttctggcagacctgccatcaggggtaacttgcacggcccaggcttctcctgcatgtgttggaagcctggaaaaataaagctttgtcatggccaaa

SEQ ID NO: 155412 - DNA, 3941 bp, Homo sapiens
  Payload ID: 10553
  Gene Symbol: MOV10L1
  Gene Name: Mov10 RISC complex RNA helicase like 1
  Uniprot ID: Q9BXT6
  ENST ID: ENST00000540615
  CDS Start-End: 221-3718
ataggtctttgagtgcagtgcgggccggcaggcaacgctgggcccggcctttcctcatctccgctggcggggatccccgttcgcctcaggaggcttccgaccccacagcatcccgccgctctgggcgcccgtcctctgtgaggtctctccggtgacaccagcccctcttcccgccctcactttgtgtgtttacgccgagcagctgccaagtcgtctctccatgtcgttcctccctgtccgcagcgtcattggcggtggtgacactaagctgaaaactgtacggggtgtcgtgacaaggtactgcagcgattatggcatgattgatgatatgatctacttctccagtgatgctgtgactagcagagtgcttctgaatgttggacaggaagtgattgcagttgtggaagaaaataaagtgtccaatggactgaaagcaatcagggtagaagctgtctctgataagtgggaagacgacagcagaaaccatgggagtccctcagactgcggcccccgagtgttgattggctgtgtgacttccctggtggagggcgcaggctgtatcagtcagaccacctacttctctctggagagtgtgtgcgaaggcttcgagccctgcaagggagactgggtggaggctgagtaccggatccggcctggcacgtggagcagcgaagccacctcagtgaagccactgagatacaagcgcgtggacaaggtctgcatctctagcctctgtggaaggaacggggtgttagaggaaagcatcttctttaccttggactccttgaaactgccagatgggtacacaccccggagaggtgacgtggtcaatgcagtggtggtggagagcagccagtcatgctatgtctggagggcactttgtatgaccctagtgaagaggcgagacgccgcccctgttcatgaggccactcatttctatggaacgattttgctgaagaacaaaggtgatattgaagttacacaggtgacgcattttggaaccctaaaggaaggaagaagtaaaaccatggtgatctggatagagaataaaggagacattcctcaaaacttagtcagctgtaaactggctggctgggataaatctaaacaattcagattccaaatgctggataaagaccagatgtgccccgtggtatcttttgtttctgttcctgagaaggagaattcatcagatgaaaatattaattcattaaatagccacacaaaaaacaaaacctctcagatgtcggagagcagtttggtgaacaacagaggaatctctccaggtgattgtacctgtaaaggagaaaatggagaaaaagacaacattctatcaaggaagcagatgacagagcctgagcctggggggcttgtccctccagggggaaaaaccttcattgtggtcatctgtgacggaaaaaatcctggccgctgcaaggagctccttttgctctgtttttccgatttcctaattgggcgataccttgaagtaaatgttatcagtggggaggagtcactaattgctgcgcgcgaaccattttcttggaaaaagcttaaaagttcacaagcgttaacatccgcaaaaactacagttgttgtgaccgcacagaaaaggaactcaagacgacaacttccaagttttcttccccaatatccaatcccagatagacttagaaaatgtgtggaacaaaaaattgacatcctgactttccagccattacttgcagagcttctgaacatgtcaaattacaaggagaagttttcgactttgctgtggcttgaggagatttatgcagaaatggaactgaaagagtataacatgagcgggatcatcttaagaaggaatggggatctgctggttctggaggtcccagggttggccgaagggaggccttctctctacgcaggtgataaactgattttaaaaactcaagagtacaatggacatgccatcgaatacatcagctacgtgactgagattcatgaagaagatgtaactcttaaaattaatccagaatttgaacaagcctataactttgaacctatggatgtggaatttacatataataggaccacaagcagacggtgtcactttgcacttgaacacgtcatccacttaggtgtaaaagtgttgtttccagaagaaattattttacagtctccacaagtgacgggaaattggaaccatgcacaagacaccaaaagcagtggacagtccaccagcaaaaagaataggaaaacaatgacggaccaagctgagcatggaacagaggagaggcgtgttggtgacaaggacctgccggtgctggcaccctttactgcagagatgagcgattgggtagatgaaattcagacccctaaagcaagaaagatggagtttttcaacccagtgctaaatgaaaatcagaagttagcagttaaaaggattctgagtggtgactgccgtcccctcccgtatattctctttggacctcctggtactggaaagacagtgacaataatagaggctgttttacaggtacactttgccttgccggacagtcggattttagtctgtgcgccctccaacagtgctgctgacctcgtgtgtctgcggctgcacgagagcaaggtgctacagccggccaccatggtccgggtgaacgccacctgcaggttcgaggagatagttattgacgccgtcaaaccgtattgcagagacggagaagacatctggaaagcctcacgcttccggataatcatcaccacatgcagcagctcagggctgttttaccaaataggagtgagagttgggcacttcactcacgtgtttgtggacgaggctgggcaggcaagtgagccggaatgcctcattcctctggggctgatgtcggacatcagtggccagatcgtgctggcaggagaccccatgcagctcggcccagtcattaagtccagactcgccatggcctatgggctgaacgtgtcctttttggaacggctgatgtctcgacccgcgtaccagagggacgaaaatgctttcggtgcttgtggcgcacataatcccctgttggtcacaaagctggtgaagaactaccggtcccacgaggccctgctgatgctgccctcacggctgttctaccacagggaactcgaggtctgtgcggaccccacagtggtgacctccttgctgggctgggagaagttgcctaagaaaggcttccctctcatcttccatggtgtgcggggcagcgaggcacgggagggaaaaagcccatcgtggttcaacccggccgaggccgtccaggtcctgcgctactgctgcctcctggcccacagcatctccagtcaggtgtctgccagcgacattggcgtcatcacgccctaccggaagcaggtggagaaaatcagaattcttttgcgtaatgttgatctgatggatataaaggttggatcagtagaggagtttcaaggacaagagtatctggtcatcatcatttcgaccgtacggtcaaatgaagatagatttgaagatgatcgatattttttgggtttcttgtccaactcaaaaagatttaatgttgcaatcaccagacccaaagctttgctgatagtgctgggaaacccccatgttctcgttcgactgtggcgagggggtggcagacccctcctacccagtggtgccagaatccacaggaccagagaagcatcaggagcccagctgatctgcagtggctgacagcagggaggccatgtgctcagcctggccacgttgccgttacagtctgctccgtggctcctgtggcctgcccttgtctcgcagccaggcagggtcgtgtgtgggtgtggggctgccaggttggacgcagctgctgctgccctgactttggcatatgccagcctgttcctgccacagggcagtcactgccgcctaccctgaaataaaccctcgagtgaccccc

SEQ ID NO: 155413 - DNA, 3889 bp, Homo sapiens
  Payload ID: 10553
  Gene Symbol: MOV10L1
  Gene Name: Mov10 RISC complex RNA helicase like 1
  Uniprot ID: Q9BXT6
  ENST ID: ENST00000545383
  CDS Start-End: 85-3720
atgacgtcactcccaccaggcacctcgccttgtcaggagctgccaggcagcggcggtgacggcagcctaggccgggcgagggccatgctgagcctcgcagccaagctggtggccttcttctggaggacggcggacacccctagggaggaagccgggcagctggagcccgagctcgcggaaggtgacactaagctgaaaactgtacggggtgtcgtgacaaggtactgcagcgattatggcatgattgatgatatgatctacttctccagtgatgctgtgactagcagagtgcttctgaatgttggacaggaagtgattgcagttgtggaagaaaataaagtgtccaatggactgaaagcaatcagggtagaagctgtctctgataagtgggaagacgacagcagaaaccatgggagtccctcagactgcggcccccgagtgttgattggctgtgtgacttccctggtggagggcgcaggctgtatcagtcagaccacctacttctctctggagagtgtgtgcgaaggcttcgagccctgcaagggagactgggtggaggctgagtaccggatccggcctggcacgtggagcagcgaagccacctcagtgaagccactgagatacaagcgcgtggacaaggtctgcatctctagcctctgtggaaggaacggggtgttagaggaaagcatcttctttaccttggactccttgaaactgccagatgggtacacaccccggagaggtgacgtggtcaatgcagtggtggtggagagcagccagtcatgctatgtctggagggcactttgtatgaccctagtgaagaggcgagacgccgcccctgttcatgaggccactcatttctatggaacgattttgctgaagaacaaaggtgatattgaagttacacaggtgacgcattttggaaccctaaaggaaggaagaagtaaaaccatggtgatctggatagagaataaaggagacattcctcaaaacttagtcagctgtaaactggctggctgggataaatctaaacaattcagattccaaatgctggataaagaccagatgtgccccgtggtatcttttgtttctgttcctgagaaggagaattcatcagatgaaaatattaattcattaaatagccacacaaaaaacaaaacctctcagatgtcggagagcagtttggtgaacaacagaggaatctctccaggtgattgtacctgtaaaggagaaaatggagaaaaagacaacattctatcaaggaagcagatgacagagcctgagcctggggggcttgtccctccagggggaaaaaccttcattgtggtcatctgtgacggaaaaaatcctggccgctgcaaggagctccttttgctctgtttttccgatttcctaattgggcgataccttgaagtaaatgttatcagtggggaggagtcactaattgctgcgcgcgaaccattttcttggaaaaagcttaaaagttcacaagcgttaacatccgcaaaaactacagttgttgtgaccgcacagaaaaggaactcaagacgacaacttccaagttttcttccccaatatccaatcccagatagacttagaaaatgtgtggaacaaaaaattgacatcctgactttccagccattacttgcagagcttctgaacatgtcaaattacaaggagaagttttcgactttgctgtggcttgaggagatttatgcagaaatggaactgaaagagtataacatgagcgggatcatcttaagaaggaatggggatctgctggttctggaggtcccagggttggccgaagggaggccttctctctacgcaggtgataaactgattttaaaaactcaagagtacaatggacatgccatcgaatacatcagctacgtgactgagattcatgaagaagatgtaactcttaaaattaatccagaatttgaacaagcctataactttgaacctatggatgtggaatttacatataataggaccacaagcagacggtgtcactttgcacttgaacacgtcatccacttaggtgtaaaagtgttgtttccagaagaaattattttacagtctccacaagtgacgggaaattggaaccatgcacaagacaccaaaagcagtggacagtccaccagcaaaaagaataggaaaacaatgacggaccaagctgagcatggaacagaggagaggcgtgttggtgacaaggacctgccggtgctggcaccctttactgcagagatgagcgattgggtagatgaaattcagacccctaaagcaagaaagatggagtttttcaacccagtgctaaatgaaaatcagaagttagcagttaaaaggattctgagtggtgactgccgtcccctcccgtatattctctttggacctcctggtactggaaagacagtgacaataatagaggctgttttacaggtacactttgccttgccggacagtcggattttagtctgtgcgccctccaacagtgctgctgacctcgtgtgtctgcggctgcacgagagcaaggtgctacagccggccaccatggtccgggtgaacgccacctgcaggttcgaggagatagttattgacgccgtcaaaccgtattgcagagacggagaagacatctggaaagcctcacgcttccggataatcatcaccacatgcagcagctcagggctgttttaccaaataggagtgagagttgggcacttcactcacgtgtttgtggacgaggctgggcaggcaagtgagccggaatgcctcattcctctggggctgatgtcggacatcagtggccagatcgtgctggcaggagaccccatgcagctcggcccagtcattaagtccagactcgccatggcctatgggctgaacgtgtcctttttggaacggctgatgtctcgacccgcgtaccagagggacgaaaatgctttcggtgcttgtggcgcacataatcccctgttggtcacaaagctggtgaagaactaccggtcccacgaggccctgctgatgctgccctcacggctgttctaccacagggaactcgaggtctgtgcggaccccacagtggtgacctccttgctgggctgggagaagttgcctaagaaaggcttccctctcatcttccatggtgtgcggggcagcgaggcacgggagggaaaaagcccatcgtggttcaacccggccgaggccgtccaggtcctgcgctactgctgcctcctggcccacagcatctccagtcaggtgtctgccagcgacattggcgtcatcacgccctaccggaagcaggtggagaaaatcagaattcttttgcgtaatgttgatctgatggatataaaggttggatcagtagaggagtttcaaggacaagagtatctggtcatcatcatttcgaccgtacggtcaaatgaagatagatttgaagatgatcgatattttttgggtttcttgtccaactcaaaaagatttaatgttgcaatcaccagacccaaagctttgctgatagtgctgggaaacccccatgttctcgttcgagacccctgttttggtgctttgctggaatacagtattacaaacggtgtttacatgggatgcgatttacctcctgcactgcagtctctgcaaaactgtggcgagggggtggcagacccctcctacccagtggtgccagaatccacaggaccagagaagcatcaggagcccagctgatctgcagtggctgacagcagggaggccatgtgctcagcctggccacgttgccgttacagtctgctccgtggctcctgtggcctgcccttgtctcgcagccaggcagggtcgtgtgtgggtgtggggctgccaggttggacgcagctgctgctgccctgactttggcata

SEQ ID NO: 155414 - DNA, 2484 bp, Homo sapiens
  Payload ID: 10554
  Gene Symbol: MPHOSPH10
  Gene Name: M-phase phosphoprotein 10 (U3 small nucleolar ribonucleoprotein)
  Uniprot ID: O00566
  ENST ID: ENST00000244230
  CDS Start-End: 353-2398
aggtcaggggcgtggcgaaggtcgctgctttcctgctacaacgggcctactttagctaaaacagaaacgtaaggccaggacgggtcaccctttgtgggcccctgaaaaatacaaaacgaagtttggagagagttgaaaggcgtttgggctgaccatggagatttttgtttcccaccctcctgcgaaagcgctcgcgctgccattggctctggctgagggcgagtccggaacctgtgcgccgcggaactttcggctctgaaatccaagttgcgctgggcgcatctttgccgcgcggtttccgggcggctcccttcccttgcatgctgcattgtgtcgggagttgctgacagccatggcgccgcaggtctggcgtcgacggaccctggagcggtgtctgacggaagtcggcaaagccacgggtcggcccgagtgcttcctcacgattcaagagggattggcatcaaagttcacttctttaacaaaagtgctttatgactttaataaaatattagagaatggtaggatccatggaagccccttgcaaaaacttgtgatagaaaattttgatgatgagcagatttggcaacaactggaattgcaaaatgaaccaattttacaatactttcagaatgcagttagtgaaacaattaatgatgaagatatcagtcttctcccagagagtgaagaacaggaacgtgaagaggatggttcagagatagaggctgatgacaaggaggacctagaagatttagaggaggaggaagtgtccgacatgggtaatgatgatcctgaaatgggtgagagagctgaaaactcaagcaaatctgatctgaggaaaagccccgttttcagtgatgaggattctgaccttgactttgatatcagcaaattggaacagcagagcaaggtgcaaaacaaaggacagggaaaaccaagagaaaagtccatagtagatgataaattcttcaaactctctgaaatggaggcctatttagaaaacatagaaaaagaagaggaacgaaaagatgataatgatgaggaggaggaagatattgatttttttgaagatattgattctgatgaagatgaagggggactgtttggaagtaaaaaacttaagtcaggtaaaagttccagaaatctgaaatacaaagatttttttgatccagttgaaagtgatgaagacataacaaatgttcatgatgatgagctggattcaaacaaagaagatgatgaaattgctgaagaagaagcagaagaactaagtatttcggaaacggatgaagatgatgaccttcaagaaaatgaagacaataaacaacataaagaaagcttgaaaagagtgacctttgctttaccagatgatgcggaaactgaagatacaggtgttttaaatgtaaagaaaaattctgatgaagttaaatcctcctttgaaaaaagacaggaaaagatgaatgaaaaaattgcatctttagaaaaagagttgttagaaaaaaagccgtggcagcttcagggggaagtgacagcacagaagaggccagagaacagcctcctggaggagaccctacactttgaccatgctgtccggatggcacctgtgattacagaggaaaccacccttcaactggaagatatcattaaacagaggataagagatcaggcttgggatgatgtagtacgtaaagaaaaacctaaagaggatgcatatgaatataaaaagcgtttaaccttagaccatgagaagagtaaattgagccttgctgaaatttatgaacaggagtacatcaaactcaaccagcaaaaaacagcagaagaagaaaatccagaacatgtagaaattcagaagatgatggattccctcttcttaaaattggatgccctctcaaacttccactttatccctaaaccgcctgtaccagagattaaagttgtgtcaaatctgccagccataaccatggaggaagtagccccagtgagtgttagtgatgcagctctcctggccccagaggagatcaaggagaaaaataaagctggagatataaaaacagctgctgaaaaaacagctacagacaagaaacgagagcgaaggaaaaagaaatatcaaaagcgtatgaaaataaaagagaaggagaagcggagaaaactgcttgaaaagagcagtgtagatcaagcagggaaatacagcaaaacagtagcttcggagaagttaaaacagctgaccaaaactggcaaagcttccttcataaaggatgaaggtaaagacaaggccttaaagtcctctcaagcattcttttctaaattacaagatcaagtaaaaatgcaaatcaatgatgcaaagaaaacagaaaagaaaaagaagaaaagacaggatatttctgttcataaattaaagctgtaatatattttgaatataatgtaaatattaatgtgtaagcttatattgtgtcattgttctgttttataataaaattcttgagaaccttc

SEQ ID NO: 155415 - DNA, 2068 bp, Homo sapiens
  Payload ID: 10554
  Gene Symbol: MPHOSPH10
  Gene Name: M-phase phosphoprotein 10 (U3 small nucleolar ribonucleoprotein)
  ENST ID: ENST00000498451
  CDS Start-End: 35-1423
gcatgctgcattgtgtcgggagttgctgacagccatggcgccgcaggtctggcgtcgacggaccctggagcggtgtctgacggaagtcggcaaagccacgggtcggcccgagtgcttcctcacgattcaagagggattggcatcaaagttcacttctttaacaaaagtgctttatgactttaataaaatattagagaatggtaggatccatggaagccccttgcaaaaacttgtgatagaaaattttgatgatgagcagatttggcaacaactggaattgcaaaatgaaccaattttacaatactttcagaatgcagttagtgaaacaattaatgatgaagatatcagtcttctcccagagagtgaagaacaggaacgtgaagaggatggttcagagatagaggctgatgacaaggaggacctagaagatttagaggaggaggaagtgtccgacatgggtaatgatgatcctgaaatgggtgagagagctgaaaactcaagcaaatctgatctgaggaaaagccccgttttcagtgatgaggattctgaccttgactttgatatcagcaaattggaacagcagagcaaggtgcaaaacaaaggacagggaaaaccaagagaaaagtccatagtagatgataaattcttcaaactctctgaaatggaggcctatttagaaaacatagaaaaagaagaggaacgaaaagatgataatgatgaggaggaggaagatattgatttttttgaagatattgattctgatgaagatgaagggggactgtttggaagtaaaaaacttaagtcaggtaaaagttccagaaatctgaaatacaaagatttttttgatccagttgaaagtgatgaagacataacaaatgttcatgatgatgagctggattcaaacaaagaagatgatgaaattgctgaagaagaagcagaagaactaagtatttcggaaacggatgaagatgatgaccttcaagaaaatgaagacaataaacaacataaagaaagcttgaaaagagtgacctttgctttaccagatgatgcggaaactgaagatacaggtgttttaaatgtaaagaaaaattctgatgaagttaaatcctcctttgaaaaaagacaggaaaagatgaatgaaaaaattgcatctttagaaaaagagttgttagaaaaaaagccgtggcagcttcagggggaagtgacagcacagaagaggccagagaacagcctcctggaggagaccctacactttgaccatgctgtccggatgggtatggtgccctcttctgtagttttcatgtctgtgctttttccatggttccatttcatacaaagatttggggtggtgtttcttttccctcaactttttattttaaaaacttgtaaacacatggcttggcatggtagctcacacctgtaatcccggcactttgggaggccgaggcagacggatcacctgaggtcaggagtttgagaccagcctggccaacatggtgaaaccccgtctctactaaaaatacaaaaatcagccagatacggtggcagatttcagaatcccatctactcggaaggctgaggcaggagaattgcttgaacccagaaaggggaggttgcagtgagccaaggttgtgccagtgtgctccagcgtgggcagcctgggcaacagagcgacactctgtcaaaaaagaaaaaatcaacttataaacacagaagagttgaaaaaatactacagtgaacacctatatgctattcaattggattcaccagttaccattttgttatatttgctttctctccctagcatatgtaagattgtatatgtgccctttttttaagtaagttgccaatctcatggcacttcacttttaagtacttttgcagatatcgtctaagaactaggacattctcctatgtaatcacagtaccattaatccacccaaaaaatttaacaatacgctaatgatacctaatgtatagtttgtaatcagctttcttgtagtaatctgttttgaaggcttgcatcctgtcatggtccactgattaaattttgaacttcaacctgaaa

SEQ ID NO: 155416 - DNA, 1103 bp, Homo sapiens
  Payload ID: 10555
  Gene Symbol: MPHOSPH6
  Gene Name: M-phase phosphoprotein 6
  Uniprot ID: Q99547
  ENST ID: ENST00000258169
  CDS Start-End: 52-534
gcatgtgcggtgaggctcgcggccggagtgcggcgctgggcggaagctaccatggcggccgagcgaaagacaaggttgtccaagaatctactgcgcatgaagtttatgcaaaggggactggactcagaaaccaagaaacaactagaagaagaagaaaagaaaatcattagtgaagagcactggtacttggatttgccagagcttaaagagaaagagagtttcataatagaagagcagagtttcttactatgtgaagatcttctctatggaagaatgtcattcagaggatttaatcctgaggttgagaaattgatgcttcagatgaatgctaagcacaaagcagaagaagttgaagatgaaacagtagagcttgatgtgtcagatgaagagatggctagaagatatgagaccttggtggggacaattgggaaaaagtttgccagaaagagagaccatgccaattatgaagaagatgaaaatggagacataacaccaattaaagcaaagaagatgttcttaaagccccaggattaagatggatgccttaagcgatggcccaggggtgcttggtggaagtcagcagggcatctggagctcatcccaatggtgtctctatagttattaatactgtaacgtttacttgtaaagagattatcattttagaaacatgctgtttttgaaacagatgtgtgatggatgttgtacatcctttgcttcttggtattcattcagagtggatttttagcccctgatctacaaatgtacattgttacagggctgcttcctaaagattttttttacctcaggtttctcttaatatagttctccagtcactgaccttgaattgacttacataaactactgccaatgtttaaattgcccttatgtttatatttattatgtcaagccaattcgtacatacaatttggaatcaaatgtcataagaatttattatataaatttatcaagaataaaaatgcctctccagccttaagtatttacatgctcccaggtcattgtcagtttatggtattatgttgttttatttaaagcattgaattgatagaaaaatttgctctgtaataaaaatctactttcacata

SEQ ID NO: 155417 - DNA, 392 bp, Homo sapiens
  Payload ID: 10555
  Gene Symbol: MPHOSPH6
  Gene Name: M-phase phosphoprotein 6
  ENST ID: ENST00000569021
  CDS Start-End: 23-190
gcggcgctgggcggaagctaccatggcggccgagcgaaagacaaggttgtccaagaatctactgcgcatgaagtttatgcaaaggggactggactcagaaaccaagaaacaactagaagaagaagaaaagaaaatcattagtgaagagcactggtacttggatttgccagagcttaaagagaaagagtaggtttattaaaattgatactgatgatgcttgtggcattcagaaggaaactcctggtaaatttaactcatcattccggtgacataaagcccatgaaattgtttctgttcagtttattgatttagtagcacaactaaaaaatattaaacctatagaagttgtacatggatttatacatttttactactccccctcccagccacta

SEQ ID NO: 155418 - DNA, 723 bp, Homo sapiens
  Payload ID: 10555
  Gene Symbol: MPHOSPH6
  Gene Name: M-phase phosphoprotein 6
  ENST ID: ENST00000563100
  CDS Start-End: 163-591
cgctgggcggaagctaccatggcggccgagcgaaagacaaggttgtccaagaatctactgcgcatgaagtcatcatattgggacagatgaaggagatgacccagacacccagtccttaaggtctccagaaaagatagatgctcagaaagttcagatgtgtttatgcaaaggggactggactcagaaaccaagaaacaactagaagaagaagaaaagaaaatcattagtgaagagcactggtacttggatttgccagagcttaaagagaaagagagtttcataatagaagagcagagtttcttactatgtgaagatcttctctatggaagaatgtcattcagaggatttaatcctgaggttgagaaattgatgcttcagatgaatgctaagcacaaagcagaagaagttgaagatgaaacagtagagcttgatgtgtcagatgaagagatggctagaagatatgagaccttggtggggacaattgggaaaaagtttgccagaaagagagaccatgccaattatgaagaagatgaaaatggagacataacaccaattaaagcaaagaagatgttcttaaagccccaggattaagatggatgccttaagcgatggcccaggggtgcttggtggaagtcagcagggcatctggagctcatcccaatgataagtacctaggacttctgagaactactgatttaatttcgctcccaggaagtgaatgag

SEQ ID NO: 155419 - DNA, 617 bp, Homo sapiens
  Payload ID: 10555
  Gene Symbol: MPHOSPH6
  Gene Name: M-phase phosphoprotein 6
  ENST ID: ENST00000563504
  CDS Start-End: 107-502
ggcgctgggcggaagctaccatggcggccgagcgaaagacaaggttgtccaagaatctactgcgcatgaaggtgcggggacgctgagagcgccactccgggcgtttatgcaaaggggactggactcagaaaccaagaaacaactagaagaagaagaaaagaaaatcattagtgaagagcactggagtttcataatagaagagcagagtttcttactatgtgaagatcttctctatggaagaatgtcattcagaggatttaatcctgaggttgagaaattgatgcttcagatgaatgctaagcacaaagcagaagaagttgaagatgaaacagtagagcttgatgtgtcagatgaagagatggctagaagatatgagaccttggtggggacaattgggaaaaagtttgccagaaagagagaccatgccaattatgaagaagatgaaaatggagacataacaccaattaaagcaaagaagatgttcttaaagccccaggattaagatggatgccttaagcgatggcccaggggtgcttggtggaagtcagcagggcatctggagctcatcccaatggtgtctctatagttattaatactgtaacgtttacttgtaaaga

SEQ ID NO: 155420 - DNA, 432 bp, Homo sapiens
  Payload ID: 10555
  Gene Symbol: MPHOSPH6
  Gene Name: M-phase phosphoprotein 6
  ENST ID: ENST00000568016
  CDS Start-End: 41-334
gaggctcgcggccggagtgcggcgctgggcggaagctaccatggcggccgagcgaaagacaaggttgtccaagaatctactgcgcatgaagtttatgcaaaggggactggactcagaaaccaagaaacaactagaagaagaagaaaagaaaatcattagtgaagagcactggtacttggatttgccagagcttaaagagaaagagagtttcataatagaagagcagagtttcttactatgtgaagatcttctctatggaagaatgtcattcagaggatttaatcctgaggttgaggtgtttctccaccaggtaccatttctactcattatatagaaaataacaagtcttgaaatatcgccatagctatttaaagaaattggaggcattgcagtctagttttatggtagagaaattgatgcttcagatgaatg

SEQ ID NO: 155421 - DNA, 4235 bp, Homo sapiens
  Payload ID: 10556
  Gene Symbol: MPHOSPH8
  Gene Name: M-phase phosphoprotein 8
  Uniprot ID: Q99549
  ENST ID: ENST00000361479
  CDS Start-End: 69-2651
ggaacgcgaggggctgctggggtgtttgtcgcagcgggttttcctcggcggtttgcggagctgctaggatggagcaggttgcggagggagcaagggtgaccgcagtccctgtgtcagctgccgacagcactgaggagttggccgaagtcgaagaaggagttggagtagtgggcgaagataatgacgcagccgcgagaggagcggaggcctttggcgacagtgaggaggacggagaggatgtgttcgaggtggagaagatcctggacatgaagaccgaggggggtaaagttctttacaaagttcgctggaaaggctatacatcggatgatgatacctgggagcccgagattcacctggaggactgtaaagaagtgcttcttgaatttaggaagaaaattgcagagaacaaagccaaagcagtcaggaaggatattcagagactatccttaaataacgacatatttgaggcgaactctgatagcgatcagcaaagtgagacaaaagaagatacttccccaaagaagaaaaagaaaaaattgaggcagagagaagagaaaagcccagatgatctgaaaaagaaaaaagcaaaggccgggaagctaaaagacaagtccaaaccagacctggagagctccttggaaagtttagtttttgatttaaggacaaagaaaagaatttctgaagccaaagaagaactaaaggagtccaaaaagcccaaaaaagatgaagtaaaagaaacaaaagaattaaagaaagttaaaaagggtgaaataagagatttaaagacgaaaacaagagaagatcccaaagaaaatagaaaaacaaaaaaagaaaaatttgtcgaatcccaggtggaatctgaatcaagtgtacttaatgattctccctttccagaggatgacagtgaagggctacattccgacagcagagaagagaaacaaaacactaaaagtgcaagagagagagcagggcaggacatggggctggagcatggctttgagaagcccctagacagtgccatgagtgctgaggaggataccgatgtcagaggcaggaggaaaaagaagaccccgagaaaggctgaggacactagagagaacaggaagctagagaacaagaacgctttcttagagaagaaaactgtgcctaaaaagcagaggaatcaagacagaagcaaaagtgctgcagagttagagaagctgatgcctgtatctgcccaaacgccaaagggccggaggttgagcggggaagagagaggcctctggtccacggactcagccgaggaggacaaagaaaccaaaagaaatgaatccaaagaaaaatatcagaaaaggcatgattctgacaaggaagaaaaaggcagaaaagagccaaaaggattaaagacacttaaggaaatcagaaatgcatttgatttatttaaattaactccagaagaaaaaaatgatgtttctgagaataatcggaaaagggaagaaataccactggattttaaaaccatagacgatcacaaaaccaaggaaaacaaacagtcacttaaagaaaggagaaacaccagagacgaaacggatacttgggcatacattgctgcagaaggtgatcaggaggttttagacagcgtgtgccaagcagatgagaattcagatggcaggcagcagattctgagtttgggcatggacctgcagttggaatggatgaagttggaagatttccaaaagcaccttgatgggaaagatgagaattttgctgcaacagatgcaattccaagtaatgtgttaagggatgctgtgaaaaatggggattatattactgtaaaagttgcacttaattcaaatgaagaatataacctggaccaagaggattccagtggaatgacactggtgatgcttgccgccgccggagggcaggacgacctcctgcgactcctcatcacaaaaggcgcgaaagtgaacggtcggcagaagaacgggaccaccgccctcattcatgctgcagagaagaactttttaacaacagtggctattcttttggaagcaggagcttttgtaaatgtccagcaaagcaatggtgagactgcactgatgaaggcctgtaaaagaggaaattcagacatcgtacgactcgtaattgaatgtggagctgactgcaatattttgtcaaagcaccagaatagtgccctgcactttgcgaagcagtctaacaatgtgcttgtgtacgacttgctgaagaaccatttagagacactttcaagagtagcagaagagacaataaaggattactttgaagctcgccttgctctgctagaaccagtttttccaatcgcatgtcatcgactctgtgagggtccagatttttcaacagatttcaattacaaacccccacagaacataccagaaggctctggcatcctgctgtttatcttccatgcaaactttttgggtaaagaagttattgctcggctctgtggaccgtgtagtgtacaagctgtagttctgaatgataaatttcagcttcctgtttttctggacagtcattttgtttactcattcagccctgttgcaggtcccaataaactcttcataaggttgacagaagcaccctctgccaaggttaagttgctaataggtgcatacagagtgcagctgcagtgaccaaacagaagggactgggcggagttctcttcagaccgattcctatactctctttgacagcagtttggaattcttctagcacatctatgtaaagttttgtctgtaaacctcttgcagttaagcctgttgtctgttgtagtctgtaagatgcgacatagctgtgtctgtgccagtatgccggaatctcagtgcagtgtccagactgcgtatttcagtttttccacaatgtggatagtacatatgaggattatttaagaaaattaaagacttcactttcttttttctggagacggagtttcgctcttgttgcccaggctggagtgcaatggtgcgatctcggctcactgcaagctctgcctcctgggttcaagtgattctcctgcctcagcctcctgagtagctgggattacagacacccgccatggcacccagctaattttgtatttttagtagagatggggtttatccatgttggtcaggctggtcttgaactcctgacctcaggtgatccgcccgcctcggcctcccaaagtgcttggattacaggcatgagccaccgcacccagcaagagttattttcttaacttgaaattttctactagccctggtgaacttctgtgcttaaaaaaaaaaaaaaaaaaaggaaaaattcagctctaaaacatttgcttacagcaagggagccatgttatattcaagttacccaagcaccaaataaagtgtgggtttgctgcccttgaaagggttgggaggcctgatctttttctagtagacagttgccacacattccccaagcacaaaaggtggagatggcagtcactttgtaaatatgctgtagtcacttatcatcttttcaaagggtaacaagagaatctaagatgtagtaagaatgtaaaccagtacactatgagacctaaaagagagtattaaatgtgaacttttagcagagcgtggtggctcacacctataatcccagcgctttggaggctgaggttggaggattgcttaagtccaggagttcaagaccagcctgggtaacatggggtggaacaagcctgtagtcccagatactcaggaggctgaggtgaaaggattgcttgagccagggaggtcaaggctgcagtgagccgtgaaaggccactgcactccagcctgagtgacagaatgagaccttgtctcaaaaaaaaaaaaaagtttcttggaacctatacggtttttttttgttttttttttttgaaaagccagaccttgtgcccttgttttgaacaccgactgggaagatggggcttaggtaacagccaaacctggctgtcagctgtgtgggagccaccaccctctctgggaagagttcctgcttctgtatggcaagcataaatcaagctcagtctgggttatggagaagttgaaaattgttttgttcctcattagtttataattgtatgaaatacgattttaatgaaaacttttcagaattcacgtttgtgtagatatttcagagaaccatttttactttacatcctaaaactgccttttcctatggttttgtcaataaaacactatgatgttggtctgtttccttttata

SEQ ID NO: 155422 - DNA, 717 bp, Homo sapiens
  Payload ID: 10556
  Gene Symbol: MPHOSPH8
  Gene Name: M-phase phosphoprotein 8
  ENST ID: ENST00000449056
  CDS Start-End: 1-452
cagaagagacaataaaggattactttgaagctcgccttgctctgctagaaccagtttttccaatcgcatgtcatcgactctgtgagggtccagatttttcaacagatttcaattacaaacccccacagaacataccagaaggctctggcatcctgctgtttatcttccatgcaaactttttgggtaaagaagttattgctcggctctgtggaccgtgtagtgtacaagctgtagttctgaatgataaatttcagcttcctgtttttctgacagggtctcgctctgttgtccaggctggagtgcagtggcgcggattacagctcactggagtcttgacttcccaggcacaagcaatcctcccacctcagcctcctaactacctgggactaaaaatgacagtcattttgtttactcattcagccctgttgcaggtcccaataaactcttcataaggttgacagaagcaccctctgccaaggttaagttgctaataggtgcatacagagtgcagctgcagtgaccaaacagaagggactgggcggagttctcttcagaccgattcctatactctctttgacagcagtttggaattcttctagcacatctatgtaaagttttgtctgtaaacctcttgcagttaagcctgttgtctgttgtagtctgtaagatgcgacatagctgtgtctgtgccagtatgccggaatctcagtgcagtgt

SEQ ID NO: 155423 - DNA, 1048 bp, Homo sapiens
  Payload ID: 10556
  Gene Symbol: MPHOSPH8
  Gene Name: M-phase phosphoprotein 8
  ENST ID: ENST00000414242
  CDS Start-End: 1-934
aaagaaagttaaaaagggtgaaataagagatttaaagacgaaaacaagagaagatcccaaagaaaatagaaaaacaaaaaaagaaaaatttgtcgaatcccaggtggaatctgaatcaagtgtacttaatgattctccctttccagaggatgacagtgaagggctacattccgacagcagagaagagaaacaaaacactaaaagtgcaagagagagagcagggcaggacatggggctggagcatggctttgagaagcccctagacagtgccatgagtgctgaggaggataccgatgtcagaggcaggaggaaaaagaagaccccgagaaaggctgaggacactagagagaacaggaagctagagaacaagaacgctttcttagagaagaaaactgtgcctaaaaagcagaggaatcaagacagaagcaaaagtgctgcagagttagagaagctgatgcctgtatctgcccaaacgccaaagggccggaggttgagcggggaagagagaggcctctggtccacggactcagccgaggaggacaaagaaaccaaaagaaatgaatccaaagaaaaatatcagaaaaggcatgattctgacaaggaagaaaaaggcagaaaagagccaaaaggattaaagacacttaaggaaatcagaaatgcatttgatttatttaaattaactccagaagaaaaaaatgatgtttctgagaataatcggaaaagggaagaaataccactggattttaaaaccatagacgatcacaaaaccaaggaaaacaaacagtcacttaaagaaaggagaaacaccagagacgaaacggatacttgggcatacattgctgcagaaggtgatcaggaggttttagacagcgtgtgccaagcagatgagaattcaggtgagtttggaatcattttgcagaatttttcaaggtagtgcaccatattattttactgtactcttctctgtatttctgatctcaacgatcaaaaaataatggagtcgaagagtttatttggatctcctgaataaataacattttatattgaa

SEQ ID NO: 155424 - DNA, 3097 bp, Homo sapiens
  Payload ID: 10557
  Gene Symbol: MPHOSPH9
  Gene Name: M-phase phosphoprotein 9
  ENST ID: ENST00000302373
  CDS Start-End: 1-2523
gcttccttagcttcctgtgaaggaaattcttcaaacaaacaagtatcttcggaaagtcaaatgggttttttttctctaagcagtgagagaaatgaatctgttatccattatcctgaatccacagaacctgaaatacagcaagaaatgtccacgtcacaaccagactgcaatgtggatagttgctcagtaagcagtggatatggcaccttttgtatctcagaattaaatctgtacaaatctaaagaccctaaggagttcatggagcacatagatgttcccaaaggacagtatgtagcacctgcggtgccggctgagtcacttgtagatggtgtgaaaaatgagaatttttatatacagactcctgaagagtgtcatgtgtctttaaaggaagatgtatccatttctcctggtgaatttgaacataattttcttggtgaaaataaggtttctgaagtatacagtgggaaaacaaatagtaatgctataacatcatgggcacaaaaactgaagcagaaccaaccaaagagagcacatgtagaagatggaggttcaagatctaaacaaggaaatgagcaaagtaagaagacaccaattgagaaatctgattttgctgctgctacacatcctcgtgctttttacctcagtaaaccagatgaaactccaaatgcttggatgtctgattcaggaacaggattgacttactggaaactagaggaaaaggatatgcaccactctttgcctgaaactttagagaagacgttcatatcattgtcttccacagatgtgtcaccaaaccaggtcctgactctagatcctacgttacacatgaagccaaagcagcagatttcagggattcaacctcacggccttccgaatgcccttgatgacagaatatccttttccccggactctgttctagagcctagtatgtctagtccctctgacatagactcattttcacaagcaagtaatgtcacttctcagttacctggatttccaaaatatccctcacacacaaaagcttctccggtggactcttggaaaaatcagacattccaaaacgaaagtaggaccagttccacgtttccgtcagtatataccattactagtaatgatatctcggtcaacactgtagatgaagaaaacactgtcatggttgcttcggcctcagtcagtcagtcccagcttccaggtacagccaacagtgtcccagaatgcatttcattgacttccttggaagatcctgtgatattgtctaagattaggcagaatctgaaggaaaagcatgctcgacacatagcagatcttcgagcttattatgaatcagaaataaatagtttgaaacagaagctggaggcaaaagaaatctctggagttgaagattggaagataaccaatcaaattcttgtagacagatgtggccaattagatagtgctttgcatgaagctactagtcgcgtgagaacacttgaaaataagaataacttactggaaattgaagtgaatgatttgagagaacgcttcagtgcagccagcagtgcttccaaaattttgcaggaacgaattgaagaaatgagaacaagcagtaaagaaaaagacaataccatcattcgactaaaatctagactgcaagatttagaagaagcatttgagaatgcttacaaactctcagatgataaagaagctcaactaaaacaagagaacaaaatgtttcaagatcttttaggagagtatgagtcccttggaaaagaacacaggagagtaaaggatgcattaaatacaactgagaacaaattgcttgatgcatatactcagatttctgatttgaaaagaatgatttcaaaacttgaagctcaggtcaagcaagtagaacatgaaaatatgttaagccttcgtcataattctagaattcacgtgagaccctcgcgtgccaacacactagcaacttcagacgtcagcaggcggaaatggctgattccaggtgcagagtattccatctttactggccagcctctggacacccaggacagtaacgtggataaccagctggaggaaacctgtagcctagggcaccgttcacctctggaaaaggattcttcacctggaagttcatcaacaagcttgttgataaaaaagcaaagagagacttcagacacgccgatcatgagagctttaaaagaacttgatgagggaaaaatatttaaaaattgggggacacagacagagaaagaggacacctcaaatataaatcctcggcaaactgaaacttcagttaatgcaagtcgttctccagaaaagtgtgcccaacagagacaaaagagacttaattcggcctcacagagatcatcatctttaccaccttcaaatcgtaaatcaagtactccaacaaaaagagagattatgctaacaccagtgactgtggcttatagtccaaagcgatcccctaaagaaaacttgtccccaggatttagtcatctgcttagcaaaaatgagagcagtccaattcgaaaaaacttattctgagaaagccaccgataaccatgttaatcatagctcttgccctgaaccggtgccaaatggagtgaagaaagtatctgtgagaacagcctgggagaagaataaatcagttagctacgaacagtgtaagccggtttcagtcactccacaggggaatgattttgaatatacagcaaaaattcggaccctagctgaaacagaacgattttttgatgaacttacaaaagaaaaggaccagattgaggcagcactaagcaggatgccttctcctggaggacgaatcactttacagacaagattaaatcaggaagccttggaagatcgtttggaaaggattaatcgagaactgggttcagttcgcatgacgctaaagaaattccatgttttgcgcacctctgcaaatctttgagatttgtagccattaaattttgagacatttttgtttgcactaatgtataattatgcagtcagaaaaggcaaactattttgtactgtttataagccttcaaacagtagttttacaatcatgctattcttacacttgctattttatacttcaaatggccacatattttcaaga

SEQ ID NO: 155425 - DNA, 1090 bp, Homo sapiens
  Payload ID: 10557
  Gene Symbol: MPHOSPH9
  Gene Name: M-phase phosphoprotein 9
  ENST ID: ENST00000539336
  CDS Start-End: 1-1090
accaggtggttacagctattcaatttggtggaaaaacaatgccaagaacagatagttgcccagcaggagcagttccacaaccaaattcaaaacctgaaatacagcaagaaatgtccacgtcacaaccagactgcaatgtggatagttgctcagtaagcagtggatatggcaccttttgtatctcagaattaaatctgtacaaatctaaagaccctaaggagttcatggagcacatagatgttcccaaaggacagtatgtagcacctgcggtgccggctgagtcacttgtagatggtgtgaaaaatgagaatttttatatacagactcctgaagagtgtcatgtgtctttaaaggaagatgtatccatttctcctggtgaatttgaacataattttcttggtgaaaataaggtttctgaagtatacagtgggaaaacaaatagtaatgctataacatcatgggcacaaaaactgaagcagaaccaaccaaagagagcacatgtagaagatggaggttcaagatctaaacaaggaaatgagcaaagtaagaagacaccaattgagaaatctgattttgctgctgctacacatcctcgtgctttttacctcagtaaaccagatgaaactccaaatgcttggatgtctgattcaggaacaggattgacttactggaaactagaggaaaaggatatgcaccactctttgcctgaaactttagagaagacgttcatatcattgtcttccacagatgtgtcaccaaaccagtctaatactagtaatgagatgaagctaccgtcactgaaggatatttattataaaaaacaaagggaaaacaagcagttacctgagaggaatctcacttctgcttccaacccaaatcatccaccagaggtcctgactctagatcctacgttacacatgaagccaaagcagcagatttcagggattcaacctcacggccttccgaatgcccttgatgacagaatatccttttccccggactctgttctagagcctagtatgtctagtccctctgacatagactcattttcacaagcaagtaatgtcacttctcagttacctggatttcc

SEQ ID NO: 155426 - DNA, 400 bp, Homo sapiens
  Payload ID: 10557
  Gene Symbol: MPHOSPH9
  Gene Name: M-phase phosphoprotein 9
  ENST ID: ENST00000537854
  CDS Start-End: 255-400
actggagagacgccgggcgcgcgcgcgctccctcgggtaacggtcgcgagaggccgcttgcatgaccctgacatcggcagcgggagcggcggccagactctcttggaagtttaggatatttcacagttctgaatgttagccactgaaaatgccagtagatgatgaagcctctgaagatgacacggattcatttttctcaaacagcccaagaacctttattttccaataagagaatataacaatttctgtacactatggaagagtttgacttggtgaaaaccttacacaaaacttcatcttctgtaggatctgatgaaaattctcttcattctcttggactgaacttaaatactgatagtaatgctataacatcatgggcacaaaaactgaagcagaacca

SEQ ID NO: 155427 - DNA, 570 bp, Homo sapiens
  Payload ID: 10557
  Gene Symbol: MPHOSPH9
  Gene Name: M-phase phosphoprotein 9
  ENST ID: ENST00000541437
  CDS Start-End: 192-570
gaccctgacatcggcagcgggagcggcggccagactctcttggaagtttaggatatttcacagttctgaatgttagccactgaaaatgccagtagatgatgaagcctctgaagatgacacggattcatttttctcaaacagcccaagaacctttattttccaataagagaatataacaatttctgtacactatggaagagtttgacttggtgaaaaccttacacaaaacttcatcttctgtaggatctgatgaaaattctcttcattctcttggactgaacttaaatactgatagaagtagtccccaccttagtacaaatggggtatcctctttctcagggaagaccagaccatctgtaattcaaggtacagttgaagtcctaacttctttaatgcaagagctacaaaacagtggaaagactgattcggaactttggaaaaactgtgagaccaggtggttacagctattcaatttggtggaaaaacaatgccaagaacagatagttgcccagcaggagcagttccacaaccaaattcaaaacctgaaatacagcaagaaatgtccacgtc

SEQ ID NO: 155428 - DNA, 3414 bp, Homo sapiens
  Payload ID: 10557
  Gene Symbol: MPHOSPH9
  Gene Name: M-phase phosphoprotein 9
  ENST ID: ENST00000539024
  CDS Start-End: 1-2026
acaaaaactgaagcagaaccaaccaaagagagcacatgtagaagatggaggttcaagatctaaacaaggaaatgagcaaagtaagaagacaccaattgagaaatctgattttgctgctgctacacatcctcgtgctttttacctcagtaaaccagatgaaactccaaatgcttggatgtctgattcaggaacaggattgacttactggaaactagaggaaaaggatatgcaccactctttgcctgaaactttagagaagacgttcatatcattgtcttccacagatgtgtcaccaaaccaggtcctgactctagatcctacgttacacatgaagccaaagcagcagatttcagggattcaacctcacggccttccgaatgcccttgatgacagaatatccttttccccggactctgttctagagcctagtatgtctagtccctctgacatagactcattttcacaagcaagtaatgtcacttctcagttacctggatttccaaaatatccctcacacacaaaagcttctccggtggactcttggaaaaatcagacattccaaaacgaaagtaggaccagttccacgtttccgtcagtatataccattactagtaatgatatctcggtcaacactgtagatgaagaaaacactgtcatggttgcttcggcctcagtcagtcagtcccagcttccaggtacagccaacagtgtcccagaatgcatttcattgacttccttggaagatcctgtgatattgtctaagattaggcagaatctgaaggaaaagcatgctcgacacatagcagatcttcgagcttattatgaatcagaaataaatagtttgaaacagaagctggaggcaaaagaaatctctggagttgaagattggaagataaccaatcaaattcttgtagacagatgtggccaattagatagtgctttgcatgaagctactagtcgcgtgagaacacttgaaaataagaataacttactggaaattgaagtgaatgatttgagagaacgcttcagtgcagccagcagtgcttccaaaattttgcaggaacgaattgaagaaatgagaacaagcagtaaagaaaaagacaataccatcattcgactaaaatctagactgcaagatttagaagaagcatttgagaatgcttacaaactctcagatgataaagaagctcaactaaaacaagagaacaaaatgtttcaagatcttttaggagagtatgagtcccttggaaaagaacacaggagagtaaaggatgcattaaatacaactgagaacaaattgcttgatgcatatactcagatttctgatttgaaaagaatgatttcaaaacttgaagctcaggtcaagcaagtagaacatgaaaatatgttaagccttcgtcataattctagaattcacgtgagaccctcgcgtgccaacacactagcaacttcagacgtcagcaggcggaaatggctgattccaggtgcagagtattccatctttactggccagcctctggacacccaggacagtaacgtggataaccagctggaggaaacctgtagcctagggcaccgttcacctctggaaaaggattcttcacctggaagttcatcaacaagcttgttgataaaaaagcaaagagagacttcagacacgccgatcatgagagctttaaaagaacttgatgagggaaaaatatttaaaaattgggggacacagacagagaaagaggacacctcaaatataaatcctcggcaaactgaaacttcagttaatgcaagtcgttctccagaaaagtgtgcccaacagagacaaaagagacttaattcggcctcacagagatcatcatctttaccaccttcaaatcgtaaatcaagtactccaacaaaaagagagattatgctaacaccagtgactgtggcttatagtccaaagcgatcccctaaagaaaacttgtccccaggatttagtcatctgcttagcaaaaatgagagcagtccaattcgaaaaaacttattctgagaaagccaccgataaccatgttaatcatagctcttgccctgaaccggtgccaaatggagtgaagaaagtatctgtgagaacagcctgggagaagaataaatcagttagctacgaacagtgtaagccggtttcagtcactccacaggggaatgattttgaatatacagcaaaaattcggaccctagctgaaacagaacgattttttgatgaacttacaaaagaaaaggaccagattgaggcagcactaagcaggatgccttctcctggaggacgaatcactttacagacaagattaaatcaggtgaaatgtcttagcttgaatctgctttagaggcttgatgccagtcagtgttccagttatctaagaggggtttaaaaaatcatggcacagtgaaaattagacacactgaagcagcagtcaaaacttttagcttttacgggaagtgtttgattatagcaattttataactgcaagctagctttcaggaataaaaattgattttacctttagacttagagaagaaggtgttcatgcccttgtattttcaagaaactaacttgagagcaaatggcaatatgcttttcaacagattttacactaagttagtgctcacagattgcctctctttttgtttgatttctccctcctcaaatctgtaatttatttctgaactcctttccattagcaagcagataaaatggttacactttggaaactgaatagctgtagaggttcaaaaagtgagccgtaggccgggcgcaggggctcacgcctataatcccagcactttgggaggctgaggctggtgtatcacctgaggtcaggagttccagccactgtgcccagcccccaacttctttttttctgactttgtctttttgttctgataaatattagtcaataatttataggctgggcgtggtggctcatgccggtaatcccagcactttgggaggctgatgcaggcgggtcacctgaggtcaggagttcgagaccagcctggcccacatggtgaaaccccgtctctactaaagtacaaaaattagccgggcatggtgtgggggtgggcgcctgtaattccagctactcgggaggctgaggcaggagaattgctcgaacctggaaggtggaggttgcagtgagccaagatggtgccactgcactccagcctgggtaatagagcaagactcagtcttaaaaaaaaaaaaaaataaactttcaattgaacttttcatgttatgaaatatctttctataacatccttttaaattaacgtacaatattccatcagcagtaacgtatttaaccaagaatgttttagtagaaatttgggttgcttctaattttggatatcataaataaggctgcaataaagttcttaaacata

SEQ ID NO: 155429 - DNA, 567 bp, Homo sapiens
  Payload ID: 10557
  Gene Symbol: MPHOSPH9
  Gene Name: M-phase phosphoprotein 9
  ENST ID: ENST00000535049
  CDS Start-End: 211-351
cgcgagaggccgcttgcatgaccctgacatcggcagcgggagcggcggccagactctcttggaagtttaggatatttcacagttctgaatgttagccactgaaaatgccagtagatgatgaagcctctgaagatgacacggattcatttttctcaaacagcccaagaacctttattttccaataagagaatataacaatttctgtacactatggaagagtttgacttggtgaaaaccttacacaaaacttcatcttctgtaggatctgatgaaaattctcttcattctcttggactgaacttaaatactgatagggaagaccagaccatctgtaattcaaggtacagttgaagtcctaacttctttaatgcaagagctacaaaacagtggaaagactgattcggaactttggaaaaactgtgagaccaggtggttacagctattcaatttggtggaaaaacaatgccaagaacagatagttgcccagcaggagcagttccacaaccaaattcaacatatacaggaggagataaaaaatttagtcaaattacagactagtagtgcttc

SEQ ID NO: 155430 - DNA, 6136 bp, Homo sapiens
  Payload ID: 10557
  Gene Symbol: MPHOSPH9
  Gene Name: M-phase phosphoprotein 9
  ENST ID: ENST00000541076
  CDS Start-End: 83-3544
gaagatgacacggattcatttttctcaaacagcccaagaacctttattttccaataagagaatataacaatttctgtacactatggaagagtttgacttggtgaaaaccttacacaaaacttcatcttctgtaggatctgatgaaaattctcttcattctcttggactgaacttaaatactgatagaagtagtccccaccttagtacaaatggggtatcctctttctcagggaagaccagaccatctgtaattcaaggtacagttgaagtcctaacttctttaatgcaagagctacaaaacagtggaaagactgattcggaactttggaaaaactgtgagcatatacaggaggagataaaaaatttagtcaaattacagactagtagtgcttccttagcttcctgtgaaggaaattcttcaaacaaacaagtatcttcggaaagtcaaatgggttttttttctctaagcagtgagagaaatgaatctgttatccattatcctgaatccacagaacctgaaatacagcaagaaatgtccacgtcacaaccagactgcaatgtggatagttgctcagtaagcagtggatatggcaccttttgtatctcagaattaaatctgtacaaatctaaagaccctaaggagttcatggagcacatagatgttcccaaaggacagtatgtagcacctgcggtgccggctgagtcacttgtagatggtgtgaaaaatgagaatttttatatacagactcctgaagagtgtcatgtgtctttaaaggaagatgtatccatttctcctggtgaatttgaacataattttcttggtgaaaataaggtttctgaagtatacagtgggaaaacaaatagtaatgctataacatcatgggcacaaaaactgaagcagaaccaaccaaagagagcacatgtagaagatggaggttcaagatctaaacaaggaaatgagcaaagtaagaagacaccaattgagaaatctgattttgctgctgctacacatcctcgtgctttttacctcagtaaaccagatgaaactccaaatgcttggatgtctgattcaggaacaggattgacttactggaaactagaggaaaaggatatgcaccactctttgcctgaaactttagagaagacgttcatatcattgtcttccacagatgtgtcaccaaaccagtctaatactagtaatgagatgaagctaccgtcactgaaggatatttattataaaaaacaaagggaaaacaagcagttacctgagaggaatctcacttctgcttccaacccaaatcatccaccagaggtcctgactctagatcctacgttacacatgaagccaaagcagcagatttcagggattcaacctcacggccttccgaatgcccttgatgacagaatatccttttccccggactctgttctagagcctagtatgtctagtccctctgacatagactcattttcacaagcaagtaatgtcacttctcagttacctggatttccaaaatatccctcacacacaaaagcttctccggtggactcttggaaaaatcagacattccaaaacgaaagtaggaccagttccacgtttccgtcagtatataccattactagtaatgatatctcggtcaacactgtagatgaagaaaacactgtcatggttgcttcggcctcagtcagtcagtcccagcttccaggtacagccaacagtgtcccagaatgcatttcattgacttccttggaagatcctgtgatattgtctaagattaggcagaatctgaaggaaaagcatgctcgacacatagcagatcttcgagcttattatgaatcagaaataaatagtttgaaacagaagctggaggcaaaagaaatctctggagttgaagattggaagataaccaatcaaattcttgtagacagatgtggccaattagatagtgctttgcatgaagctactagtcgcgtgagaacacttgaaaataagaataacttactggaaattgaagtgaatgatttgagagaacgcttcagtgcagccagcagtgcttccaaaattttgcaggaacgaattgaagaaatgagaacaagcagtaaagaaaaagacaataccatcattcgactaaaatctagactgcaagatttagaagaagcatttgagaatgcttacaaactctcagatgataaagaagctcaactaaaacaagagaacaaaatgtttcaagatcttttaggagagtatgagtcccttggaaaagaacacaggagagtaaaggatgcattaaatacaactgagaacaaattgcttgatgcatatactcagatttctgatttgaaaagaatgatttcaaaacttgaagctcaggtcaagcaagtagaacatgaaaatatgttaagccttcgtcataattctagaattcacgtgagaccctcgcgtgccaacacactagcaacttcagacgtcagcaggcggaaatggctgattccaggtgcagagtattccatctttactggccagcctctggacacccaggacagtaacgtggataaccagctggaggaaacctgtagcctagggcaccgttcacctctggaaaaggattcttcacctggaagttcatcaacaagcttgttgataaaaaagcaaagagagacttcagacacgccgatcatgagagctttaaaagaacttgatgagggaaaaatatttaaaaattgggggacacagacagagaaagaggacacctcaaatataaatcctcggcaaactgaaacttcagttaatgcaagtcgttctccagaaaagtgtgcccaacagagacaaaagagacttaattcggcctcacagagatcatcatctttaccaccttcaaatcgtaaatcaagtactccaacaaaaagagagattatgctaacaccagtgactgtggcttatagtccaaagcgatcccctaaagaaaacttgtccccaggatttagtcatctgcttagcaaaaatgagagcagtccaattcgatttgatatacttttggatgatttagatactgttcctgtgtctacattacaacgtaccaatccaagaaagcaactccagtttcttcctctagatgactcggaagaaaaaacttattctgagaaagccaccgataaccatgttaatcatagctcttgccctgaaccggtgccaaatggagtgaagaaagtatctgtgagaacagcctgggagaagaataaatcagttagctacgaacagtgtaagccggtttcagtcactccacaggggaatgattttgaatatacagcaaaaattcggaccctagctgaaacagaacgattttttgatgaacttacaaaagaaaaggaccagattgaggcagcactaagcaggatgccttctcctggaggacgaatcactttacagacaagattaaatcaggaagccttggaagatcgtttggaaaggattaatcgagaactgggttcagttcgcatgacgctaaagaaattccatgttttgcgcacctctgcaaatctttgagatttgtagccattaaattttgagacatttttgtttgcactaatgtataattatgcagtcagaaaaggcaaactattttgtactgtttataagccttcaaacagtagttttacaatcatgctattcttacacttgctattttatacttcaaatggccacatattttcaagatatttttgttatgctcaggaatctcttgtatattttactatttaaaaagcattatttttaaatagtatctgtctccaatttatatcaagaataaggaaatataaacagaggaagcagcttgtttctaaacaaatagtgttatccttttacaattaactgcacatcaattttatagacttgttctacattgtaaatacaattcagtttttaaaaaataaagcttaatagcttccataatgatagactagtacatgctgaatacataaacaattacagtgtaccttggatttcagttgtgttgaggtttttaaaaaatgataatgcaattcgtatttgaaacgtgtcttagagtgaatatcagaatagtaataatggactcttggaaagctttgaaaactacatgaatataactcattttctttaaactttattgtctgtaagagaaaaaagagagattgtaattctctaattttatcttttctaaaaaagttaaacaattggagagccctctctggagggctctcagagtagctctctgcccattgttctgaattaacttgtgtcccaccctggacaataaatggacagataaaccctttgaaatacaagccaccaccccgtgagggattaagagggcagcctggttttcttagtgtgcatggcttcagctgtccgtcatagttgtcatctggatatgttcacccctttccactccttcaccctggccaaaaggaaaatatttccactgtaggtgctgtaagaacactagactttagatcatcacaatctactgtatttgttaatggacagggagtgtgtccggatggagcctggtgccttcccctcggccttgcagagggctccagcccactgcctctgtggtagccgctggctctcagaagtagcacgtgggcaggagtctctcctctgatccaggagcattggcaggtttgtgttgggactgctggttaagttggagctgtgtaactacttagtttttggtagccaatcagaacgcagtgccccacatattccagctcggtacatgttgataaacagactcatccaaactttcaaaatggattcgtactaaacatgctcaggttttaaattttggtttgcttttgagcttttcctctttatgtggctcttaataataagtagttagaatgaaccaagccatcccagttattccaagcaggctctcaaatgacctttgagcacccttcacctggctggtccccaggccaggggtccacagccctgctcccttctcagcaaggagggtggcctgtctgacagtgcagttgaacctttgctccctactctgcaacttttgaagacttcaggctaatcaaaattacttataattagaatcaagtgcctttattcttgttttttatttttattttattttatttatttatttttttagatggagttttgcccttgttgcccaggctggagtgcaatggcatgatctcagctcactgcaacctctgcctcccgggttcaagcgattctcctgcctcagcctgctgggtagctgggattacaggcatctgccaccacgcccggctaattttgtgtgtgtgtatatgtctatgtgtgtgtgtgtatgtatatatcttttttttttttttagtagagatggtgtttcaccatattggccaggctggtctcaaactcctgaactcatgtgatccgcctgccttggcccctcaaagtgctgggattacaggcatgagccaccacacccggcctattcttggtattctttattcttggttttctagcctttagaaaaaaaaaatctagtcttggtaaagaaaatgttcattttaatcaagctccagtacagcttgtgtcaagacctagtaagaccacctttaatgtgttcctggatatgacattaaaaactaacttgaaaattgttaggatatttccttgttccctacttttattgtaaaatctactacattcttaagaattaaaaaatgccatttcagaagagatgatagttttatcttgccaaggaattatcttcttagtagcctatattggcttattccaaaaaaggcgttaacctccatcaaaacatcttctgcgcctctctctcagcatatgctttgatatttgaagtgtgtaatagattggagctatcagtcacttatttctaaaaaatgtattcttttttcttcatagctgtgaagagggataccaaggaaagttctttctgctgtctttctcttcggtaatgcttatcttatgaacactcaactgaaaaaacactccacctaaaagcaggaaagatggcaattctaaatagcagctattatccccgggtataaactatttttgttgttggcttggggctttgctgcaggtattaatagtttaaaaagaaaaaaaaaaaaaaaa

SEQ ID NO: 155431 - DNA, 3634 bp, Homo sapiens
  Payload ID: 10557
  Gene Symbol: MPHOSPH9
  Gene Name: M-phase phosphoprotein 9
  ENST ID: ENST00000545556
  CDS Start-End: 196-465
gcatgaccctgacatcggcagcgggagcggcggccagactctcttggaagtttaggatatttcacagttctgaatgttagccactgaaaatgccagtagatgatgaagcctctgaagatgacacggattcatttttctcaaacagcccaagaacctttattttccaataagagaatataacaatttctgtacactatggaagagtttgacttggtgaaaaccttacacaaaacttcatcttctgtaggatctgatgaaaattctcttcattctcttggactgaacttaaatactgatagaagtagtccccaccttagtacaaatggggtatcctctttctcagggaagaccagaccatctgtaattcaaggtacagttgaagtcctaacttctttaatgcaagagctacaaaacagtggaaagactgattcggaactttggaaaaactgtgagaatgtagagtaagcgaaatgaaagattacctggtttaagaattcgatagcagcaactgctaagtaccaggtggttacagctattcaatttggtggaaaaacaatgccaagaacagatagttgcccagcaggagcagttccacaaccaaattcaacatatacaggaggagataaaaaatttagtcaaattacagactagtagtgcttccttagcttcctgtgaaggaaattcttcaaacaaacaagtatcttcggaaagtcaaatgggttttttttctctaagcagtgagagaaatgaatctgttatccattatcctgaatccacagaacctgaaatacagcaagaaatgtccacgtcacaaccagactgcaatgtggatagttgctcagtaagcagtggatatggcaccttttgtatctcagaattaaatctgtacaaatctaaagaccctaaggagttcatggagcacatagatgttcccaaaggacagtatgtagcacctgcggtgccggctgagtcacttgtagatggtgtgaaaaatgagaatttttatatacagactcctgaagagtgtcatgtgtctttaaaggaagatgtatccatttctcctggtgaatttgaacataattttcttggtgaaaataaggtttctgaagtatacagtgggaaaacaaatagtaatgctataacatcatgggcacaaaaactgaagcagaaccaaccaaagagagcacatgtagaagatggaggttcaagatctaaacaaggaaatgagcaaatctgattttgctgctgctacacatcctcgtgctttttacctcagtaaaccagatgaaactccaaatgcttggatgtctgattcaggaacaggattgacttactggaaactagaggaaaaggatatgcaccactctttgcctgaaactttagagaagacgttcatatcattgtcttccacagatgtgtcaccaaaccagtctaatactagtaatgagatgaagctaccgtcactgaaggatatttattataaaaaacaaagggaaaacaagcagttacctgagaggaatctcacttctgcttccaacccaaatcatccaccagaggtaaagttgtccacattctgccgagtgaacgtgaacaatgcttcctgactctaacttttacctcaagcttcattttccctaggagatctaaagcctactcacttcaaaacaagcaaaacaaagccgagttctgagggattaggcagaatctgaaggaaaagcatgctcgacacatagcagatcttcgagcttattatgaatcagaaataaatagtttgaaacagaagctggaggcaaaagaaatctctggagttgaagattggaagataaccaatcaaattcttgtagacagatgtggccaattagatagtgctttgcatgaagctactagtcgcgtgagaacacttgaaaataagaataacttactggaaattgaagtgaatgatttgagagaacgcttcagtgcagccagcagtgcttccaaaattttgcaggaacgaattgaagaaatgagaacaagcagtaaagaaaaagacaataccatcattcgactaaaatctagactgcaagatttagaagaagcatttgagaatgcttacaaactctcagatgataaagaagctcaactaaaacaagagaacaaaatgtttcaagatcttttaggagagtatgagtcccttggaaaagaacacaggagagtaaaggatgcattaaatacaactgagaacaaattgcttgatgcatatactcagatttctgatttgaaaagaatgatttcaaaacttgaagctcaggtcaagcaagtagaacatgaaaatatgttaagccttcgtcataattctagaattcacgtgagaccctcgcgtgccaacacactagcaacttcagacgtcagcaggcggaaatggctgattccaggtgcagagtattccatctttactggccagcctctggacacccaggacagtaacgtggataaccagctggaggaaacctgtagcctagggcaccgttcacctctggaaaaggattcttcacctggaagttcatcaacaagcttgttgataaaaaagcaaagagagacttcagacacgccgatcatgagagctttaaaagaacttgatgagggaaaaatatttaaaaattgggggacacagacagagaaagaggacacctcaaatataaatcctcggcaaactgaaacttcagttaatgcaagtcgttctccagaaaagtgtgcccaacagagacaaaagagacttaattcggcctcacagagatcatcatctttaccaccttcaaatcgtaaatcaagtactccaacaaaaagagagattatgctaacaccagtgactgtggcttatagtccaaagcgatcccctaaagaaaacttgtccccaggatttagtcatctgcttagcaaaaatgagagcagtccaattcgatttgatatacttttggatgatttagatactgttcctgtgtctacattacaacgtaccaatccaagaaagcaactccagtttcttcctctagatgactcggaagaaaaaacttattctgagaaagccaccgataaccatgttaatcatagctcttgccctgaaccggtgccaaatggagtgaagaaagtatctgtgagaacagcctgggagaagaataaatcagttagctacgaacagtgtaagccggtttcagtcactccacaggggaatgattttgaatatacagcaaaaattcggaccctagctgaaacagaacgattttttgatgaacttacaaaagaaaaggaccagattgaggcagcactaagcaggatgccttctcctggaggacgaatcactttacagacaagattaaatcaggaagccttggaagatcgtttggaaaggattaatcgagaactgggttcagttcgcatgacgctaaagaaattccatgttttgcgcacctctgcaaatctttgagatttgtagccattaaattttgagacatttttgtttgcactaatgtataattatgcagtcagaaaaggcaaactattttgtactgtttataagccttcaaacagtagttttacaatcatgctattcttacacttgctattttatacttcaaatggccacatattttcaaga

SEQ ID NO: 155432 - DNA, 573 bp, Homo sapiens
  Payload ID: 10557
  Gene Symbol: MPHOSPH9
  Gene Name: M-phase phosphoprotein 9
  ENST ID: ENST00000545406
  CDS Start-End: 321-573
atccagcagatcactccacagctttgctcccagcctgtccacctcaccctcggtcaacttcccctgagcctgctgctgtctcttgagcccactgtgagatccagatagatacccactgaggaggaagcaggatggagacatgggatcaggcgttgctttcttactctcttggaagtttaggatatttcacagttctgaatgttagccactgaaaatgccagtagatgatgaagcctctgaagatgacacggattcatttttctcaaacagcccaagaacctttattttccaataagagaatataacaatttctgtacactatggaagagtttgacttggtgaaaaccttacacaaaacttcatcttctgtaggatctgatgaaaattctcttcattctcttggactgaacttaaatactgatagaagtagtccccaccttagtacaaatggggtatcctctttctcagggaagaccagaccatctgtaattcaaggtacagttgaagtcctaacttctttaatgcaagagctacaaaacagtggaaagactgattcggaactttggaaaaact

SEQ ID NO: 155433 - DNA, 856 bp, Homo sapiens
  Payload ID: 10557
  Gene Symbol: MPHOSPH9
  Gene Name: M-phase phosphoprotein 9
  ENST ID: ENST00000541603
  CDS Start-End: 1-647
caagtactccaacaaaaagagagattatgctaacaccagtgactgtggcttatagtccaaagcgatcccctaaagaaaacttgtccccaggatttagtcatctgcttagcaaaaatgagagcagtccaattcgatttgatatacttttggatgatttagatactgttcctgtgtctacattacaacgtaccaatccaagaaagcaactccagtttcttcctctagatgactcggaagaaaaaacttattctgagaaagccaccgataaccatgttaatcatagctcttgccctgaaccggtgccaaatggagtgaagaaagtatctgtgagaacagcctgggagaagaataaatcagttagctacgaacagtgtaagccggtttcagtcactccacaggggaatgattttgaatatacagcaaaaattcggaccctagctgaaacagaacgattttttgatgaacttacaaaagaaaaggaccagattgaggcagcactaagcaggatgccttctcctggaggacgaatcactttacagacaagattaaatcagacccctcagatatgtgaggaatcaagccataaatgtgcatttgctggacattatgtaccatgtcatctctatgactacagatttcaaggataatttttacatctaacaatttcactgtaacagtgaccgataatgtgagaaatgtgctttttacagtgctgctggtgggtagacaagtgcttgctgcagttgtttctgaatctagccagatgctggagtcgtgaagctgtaagctccgcgggagcagggaccatctctctttcttgcactacaggcactcaataaatacttgtggctgtgaa

SEQ ID NO: 155434 - DNA, 6351 bp, Homo sapiens
  Payload ID: 10557
  Gene Symbol: MPHOSPH9
  Gene Name: M-phase phosphoprotein 9
  Uniprot ID: Q99550
  ENST ID: ENST00000606320
  CDS Start-End: 208-3759
gagaggccgcttgcatgaccctgacatcggcagcgggagcggcggccagactctcttggaagtttaggatatttcacagttctgaatgttagccactgaaaatgccagtagatgatgaagcctctgaagatgacacggattcatttttctcaaacagcccaagaacctttattttccaataagagaatataacaatttctgtacactatggaagagtttgacttggtgaaaaccttacacaaaacttcatcttctgtaggatctgatgaaaattctcttcattctcttggactgaacttaaatactgatagaagtagtccccaccttagtacaaatggggtatcctctttctcagggaagaccagaccatctgtaattcaaggtacagttgaagtcctaacttctttaatgcaagagctacaaaacagtggaaagactgattcggaactttggaaaaactgtgagaccaggtggttacagctattcaatttggtggaaaaacaatgccaagaacagatagttgcccagcaggagcagttccacaaccaaattcaacatatacaggaggagataaaaaatttagtcaaattacagactagtagtgcttccttagcttcctgtgaaggaaattcttcaaacaaacaagtatcttcggaaagtcaaatgggttttttttctctaagcagtgagagaaatgaatctgttatccattatcctgaatccacagaacctgaaatacagcaagaaatgtccacgtcacaaccagactgcaatgtggatagttgctcagtaagcagtggatatggcaccttttgtatctcagaattaaatctgtacaaatctaaagaccctaaggagttcatggagcacatagatgttcccaaaggacagtatgtagcacctgcggtgccggctgagtcacttgtagatggtgtgaaaaatgagaatttttatatacagactcctgaagagtgtcatgtgtctttaaaggaagatgtatccatttctcctggtgaatttgaacataattttcttggtgaaaataaggtttctgaagtatacagtgggaaaacaaatagtaatgctataacatcatgggcacaaaaactgaagcagaaccaaccaaagagagcacatgtagaagatggaggttcaagatctaaacaaggaaatgagcaaagtaagaagacaccaattgagaaatctgattttgctgctgctacacatcctcgtgctttttacctcagtaaaccagatgaaactccaaatgcttggatgtctgattcaggaacaggattgacttactggaaactagaggaaaaggatatgcaccactctttgcctgaaactttagagaagacgttcatatcattgtcttccacagatgtgtcaccaaaccagtctaatactagtaatgagatgaagctaccgtcactgaaggatatttattataaaaaacaaagggaaaacaagcagttacctgagaggaatctcacttctgcttccaacccaaatcatccaccagaggtcctgactctagatcctacgttacacatgaagccaaagcagcagatttcagggattcaacctcacggccttccgaatgcccttgatgacagaatatccttttccccggactctgttctagagcctagtatgtctagtccctctgacatagactcattttcacaagcaagtaatgtcacttctcagttacctggatttccaaaatatccctcacacacaaaagcttctccggtggactcttggaaaaatcagacattccaaaacgaaagtaggaccagttccacgtttccgtcagtatataccattactagtaatgatatctcggtcaacactgtagatgaagaaaacactgtcatggttgcttcggcctcagtcagtcagtcccagcttccaggtacagccaacagtgtcccagaatgcatttcattgacttccttggaagatcctgtgatattgtctaagattaggcagaatctgaaggaaaagcatgctcgacacatagcagatcttcgagcttattatgaatcagaaataaatagtttgaaacagaagctggaggcaaaagaaatctctggagttgaagattggaagataaccaatcaaattcttgtagacagatgtggccaattagatagtgctttgcatgaagctactagtcgcgtgagaacacttgaaaataagaataacttactggaaattgaagtgaatgatttgagagaacgcttcagtgcagccagcagtgcttccaaaattttgcaggaacgaattgaagaaatgagaacaagcagtaaagaaaaagacaataccatcattcgactaaaatctagactgcaagatttagaagaagcatttgagaatgcttacaaactctcagatgataaagaagctcaactaaaacaagagaacaaaatgtttcaagatcttttaggagagtatgagtcccttggaaaagaacacaggagagtaaaggatgcattaaatacaactgagaacaaattgcttgatgcatatactcagatttctgatttgaaaagaatgatttcaaaacttgaagctcaggtcaagcaagtagaacatgaaaatatgttaagccttcgtcataattctagaattcacgtgagaccctcgcgtgccaacacactagcaacttcagacgtcagcaggcggaaatggctgattccaggtgcagagtattccatctttactggccagcctctggacacccaggacagtaacgtggataaccagctggaggaaacctgtagcctagggcaccgttcacctctggaaaaggattcttcacctggaagttcatcaacaagcttgttgataaaaaagcaaagagagacttcagacacgccgatcatgagagctttaaaagaacttgatgagggaaaaatatttaaaaattgggggacacagacagagaaagaggacacctcaaatataaatcctcggcaaactgaaacttcagttaatgcaagtcgttctccagaaaagtgtgcccaacagagacaaaagagacttaattcggcctcacagagatcatcatctttaccaccttcaaatcgtaaatcaagtactccaacaaaaagagagattatgctaacaccagtgactgtggcttatagtccaaagcgatcccctaaagaaaacttgtccccaggatttagtcatctgcttagcaaaaatgagagcagtccaattcgatttgatatacttttggatgatttagatactgttcctgtgtctacattacaacgtaccaatccaagaaagcaactccagtttcttcctctagatgactcggaagaaaaaacttattctgagaaagccaccgataaccatgttaatcatagctcttgccctgaaccggtgccaaatggagtgaagaaagtatctgtgagaacagcctgggagaagaataaatcagttagctacgaacagtgtaagccggtttcagtcactccacaggggaatgattttgaatatacagcaaaaattcggaccctagctgaaacagaacgattttttgatgaacttacaaaagaaaaggaccagattgaggcagcactaagcaggatgccttctcctggaggacgaatcactttacagacaagattaaatcaggaagccttggaagatcgtttggaaaggattaatcgagaactgggttcagttcgcatgacgctaaagaaattccatgttttgcgcacctctgcaaatctttgagatttgtagccattaaattttgagacatttttgtttgcactaatgtataattatgcagtcagaaaaggcaaactattttgtactgtttataagccttcaaacagtagttttacaatcatgctattcttacacttgctattttatacttcaaatggccacatattttcaagatatttttgttatgctcaggaatctcttgtatattttactatttaaaaagcattatttttaaatagtatctgtctccaatttatatcaagaataaggaaatataaacagaggaagcagcttgtttctaaacaaatagtgttatccttttacaattaactgcacatcaattttatagacttgttctacattgtaaatacaattcagtttttaaaaaataaagcttaatagcttccataatgatagactagtacatgctgaatacataaacaattacagtgtaccttggatttcagttgtgttgaggtttttaaaaaatgataatgcaattcgtatttgaaacgtgtcttagagtgaatatcagaatagtaataatggactcttggaaagctttgaaaactacatgaatataactcattttctttaaactttattgtctgtaagagaaaaaagagagattgtaattctctaattttatcttttctaaaaaagttaaacaattggagagccctctctggagggctctcagagtagctctctgcccattgttctgaattaacttgtgtcccaccctggacaataaatggacagataaaccctttgaaatacaagccaccaccccgtgagggattaagagggcagcctggttttcttagtgtgcatggcttcagctgtccgtcatagttgtcatctggatatgttcacccctttccactccttcaccctggccaaaaggaaaatatttccactgtaggtgctgtaagaacactagactttagatcatcacaatctactgtatttgttaatggacagggagtgtgtccggatggagcctggtgccttcccctcggccttgcagagggctccagcccactgcctctgtggtagccgctggctctcagaagtagcacgtgggcaggagtctctcctctgatccaggagcattggcaggtttgtgttgggactgctggttaagttggagctgtgtaactacttagtttttggtagccaatcagaacgcagtgccccacatattccagctcggtacatgttgataaacagactcatccaaactttcaaaatggattcgtactaaacatgctcaggttttaaattttggtttgcttttgagcttttcctctttatgtggctcttaataataagtagttagaatgaaccaagccatcccagttattccaagcaggctctcaaatgacctttgagcacccttcacctggctggtccccaggccaggggtccacagccctgctcccttctcagcaaggagggtggcctgtctgacagtgcagttgaacctttgctccctactctgcaacttttgaagacttcaggctaatcaaaattacttataattagaatcaagtgcctttattcttgttttttatttttattttattttatttatttatttttttagatggagttttgcccttgttgcccaggctggagtgcaatggcatgatctcagctcactgcaacctctgcctcccgggttcaagcgattctcctgcctcagcctgctgggtagctgggattacaggcatctgccaccacgcccggctaattttgtgtgtgtgtatatgtctatgtgtgtgtgtgtatgtatatatcttttttttttttttagtagagatggtgtttcaccatattggccaggctggtctcaaactcctgaactcatgtgatccgcctgccttggcccctcaaagtgctgggattacaggcatgagccaccacacccggcctattcttggtattctttattcttggttttctagcctttagaaaaaaaaaatctagtcttggtaaagaaaatgttcattttaatcaagctccagtacagcttgtgtcaagacctagtaagaccacctttaatgtgttcctggatatgacattaaaaactaacttgaaaattgttaggatatttccttgttccctacttttattgtaaaatctactacattcttaagaattaaaaaatgccatttcagaagagatgatagttttatcttgccaaggaattatcttcttagtagcctatattggcttattccaaaaaaggcgttaacctccatcaaaacatcttctgcgcctctctctcagcatatgctttgatatttgaagtgtgtaatagattggagctatcagtcacttatttctaaaaaatgtattcttttttcttcatagctgtgaagagggataccaaggaaagttctttctgctgtctttctcttcggtaatgcttatcttatgaacactcaactgaaaaaacactccacctaaaagcaggaaagatggcaattctaaatagcagctattatccccgggtataaactatttttgttgttggcttggggctttgctgcaggtattaatagtttaaaaagaaaaaaaaaaaaaaaa

SEQ ID NO: 155435 - DNA, 553 bp, Homo sapiens
  Payload ID: 10557
  Gene Symbol: MPHOSPH9
  Gene Name: M-phase phosphoprotein 9
  ENST ID: ENST00000606704
  CDS Start-End: 1-93
aaaaatgagagcagtccaattcgatactgttcctgtgtctacattacaacgtaccaatccaagaaagcaactccagtttcttcctctagatgactcggaagaaaaaacttattctgagaaagccaccgataaccatgttaatcatagctcttgccctgaaccggtgccaaatggagtgaagaaagtatctgtgagaacagcctgggagaagaataaatcagttagctacgaacagtgtaagccggtttcagtcactccacaggggaatgattttgaatatacagcaaaaattcggaccctagctgaaacagaacgattttttgatgaacttacaaaagaaaaggaccagattgaggcagcactaagcaggatgccttctcctggaggacgaatcactttacagacaagattaaatcaggaagccttggaagatcgtttggaaaggattaatcgagaactgggttcagttcgcatgacgctaaagaaattccatgttttgcgcacctctgcaaatctttgagatttgtagccattaaattttgagacatttttg

SEQ ID NO: 155436 - DNA, 485 bp, Homo sapiens
  Payload ID: 10557
  Gene Symbol: MPHOSPH9
  Gene Name: M-phase phosphoprotein 9
  ENST ID: ENST00000606326
  CDS Start-End: 1-165
aatcagacattccaaaacgaaagtaggaccagttccacgtttccgtcagtatataccattactagtaatgatatctcggtcaacactgtagatgaagaaaacactgtcatggttgcttcggcctcagtcagtcagtcccagcttccaggattaggcagaatctgaaggaaaagcatgctcgacacatagcagatcttcgagcttattatgaatcagaaataaatagtttgaaacagaagctggaggcaaaagaaatctctggagttgaagattggaagataaccaatcaaattcttgtagacagatgtggccaattagatagtgctttgcatgaagctactagtcgcgtgagaacacttgaaaataagaataacttactggaaattgaagtgaatgatttgagagaacgcttcagtgcagccagcagtgcttccaaaattttgcaggaacgaattgaagaaatgagaacaagcagtaaagaaaaa

SEQ ID NO: 155437 - DNA, 662 bp, Homo sapiens
  Payload ID: 10557
  Gene Symbol: MPHOSPH9
  Gene Name: M-phase phosphoprotein 9
  ENST ID: ENST00000606321
  CDS Start-End: 1-492
agaattcacgtgagaccctcgcgtgccaacacactagcaacttcagacgtcagcaggcggaaatggctgattccaggtgcagagtattccatctttactggccagcctctggacacccaggacagtaacgtggataaccagctggaggaaacctgtagcctagggcaccgttcacctctggaaaaggattcttcacctggaagttcatcaacaagcttgttgataaaaaagcaaagagagacttcagacacgccgatcatgagagctttaaaagaacttgatgagggaaaaatatttaaaaattgggggacacagacagagaaagaggacacctcaaatataaatcctcggcaaactgaaacttcagttaatgcaagtcgttctccagaaaagtgtgcccaacagagacaaaagagacttaattcggcctcacagagatcatcatctttaccaccttcaaatcgtaaatcaagtactccaagtaagagttagatgtgtacatctcttgggttcaaaagcgtgatctctgagtcaaatctatttgtgcccgctgcttgcctgtttctggtttctcttgtatcctcagcacctagtagagtactctgagcagaggacccctaaataagatcttgttcataaataaaattgtctgatcacataga

SEQ ID NO: 155438 - DNA, 7668 bp, Homo sapiens
  Payload ID: 10558
  Gene Symbol: MPLKIP
  Gene Name: M-phase specific PLK1 interacting protein
  Uniprot ID: Q8TAP9
  ENST ID: ENST00000306984
  CDS Start-End: 93-632
tggtaaaggactagcagttctctgcggagggccggttgatacagttccggtgggagaacgcggctgcgaggttttcggctttggctcctgatatgcagcgacagaattttcggcccccaactcctccttaccctggtccgggtggaggaggttggggtagcggaagcagcttccggggaaccccgggcgggggcggaccacggccgccctcccctcgagacgggtacgggagtccgcaccacacgccgccgtacgggccccggtctaggccgtacgggagcagtcactctccgcgacacggcggcagcttcccggggggccggttcgggtctccgtcccctggcggctaccctggctcctactccaggtcccccgcggggtcccagcagcaattcggctactccccagggcagcagcagacccacccccagggttctccaaggacatctacaccatttggatcagggcgtgttagagaaaaaagaatgtctaatgagttggaaaattatttcaagccttcaatgcttgaagatccttgggctggcctagaaccagtatctgtagtggatataagccaacaatacagcaatactcaaacattcacaggcaaaaaaggaagatacttttgttaacatttctgaaattcaactggaagcttcatgtgtcaggaacatcttggacaaaactttaagttgtgttgatataaatttacccaaagatgatgactttgattggataattagtaaggtctttttgttatttttcatcgtatcaggtattgttgatattagagaaaaaagtaggataacttgcaacatttagctctggaagtacctaccacattttagagatttaccgtttccatatatttaacattcctggttacataatggacatttgtcttttaatgttttttcaatgttttaaaataaaacattttgtcttctagctattgtggttttgtggtatgataaagaagtagacttactacagtaatgctttgtagtcacttagagttcataggtaaatgttttgcaaattatttttgaaaatgaaataggtaaaccatcctttgagctgtagacagctctgtatttgttcgtaaataatgaggatgagaataacagagttctgttcatactcattttatctaatgcttctgttaaaatgcattaaaacttgaagccccagaaacccatttaagcataactttatactcatttaactggaaaaggcaagaatagaccatgcattgctaaatcaaagtgttctatctgaatttctctatacctcttagcattatggagttagtttctcttgaggccaaagaagatagctaccagcagcctcaaatcacttccattgcaaaaagaacatctctcatctccatcaatccaagagaagacaaatttgccatacttagatcatgtttctgtattattgaaccaattaactgtggccaaggccacagtgagacctaattaacttgaatcatggacacatcaccataatgagacaggattctgtgaccttgaacaccactgggcctacctggagtagagaagtggttttccaaattaagggatgctatggatatatacctatagttctggagagaaaaatatggaagaattgttaccccaactattttttaaaaatcaagtggttttttgtttgttttttgagatggagtctgttgcccaagctggagtgcagtggtgcaatcttggctcactgcaaccttcggctcctgagtagctgggactacaggcacatgtcaccatgcctggctaatttttgtatttttagtagagaccatgttttgttttttttgtttgttttgttttgtttttgaaatagggtctcactctgttgcccacgctggagtgcagtggcgcaatcttggctcactgcaacgtccgcctcccaggttcatacgagtctcccgcctcgacctcctgagtagctgggaatacaggcacgcgcctggctcatttttgtattttgaatagagatggggtttcaccgtgttggccaggctggtctcgattgaactcctggtctcaagtgatcccctaccttggcttcccaaagtgctgggatttcaggcatgagccaccgtgcccagcccagaacatgtatttttagtatttttagtatttttagtttcaccatgttgaccaggctggtctcgaactcatgatctcaaatgatccacccatctcagcctcccacagtgctgagtttacaggcgtgagccaccatgcccggccaaaatcaggtgttttaacatgtaacacagactctaggcattttgaagttacaaaatacgaagatagagctagtaaaacttttgtttcaacattcccagaaagaaacgtgtaaaaacaaaatggtcacacctcctatttgaaccatacccacagaaatttgttcattaggtatttcacagagactagaaaataagaatggaaggcttttagattaataaaagctccatgaaagccaggattttggaaatgctgtttctacaagttactagctggatgagttcacttctctatgcctcaattttctcatgtgtaagatgagaaaattaatagtacctgtgtcatagaggtgttgtgttggaggattaaatgaatttatgtatgaaactcttaagccagagcctggcacatagtaagcactcaataagtggtagctgttactttctcatttacccccatttccttagtttttagaatagtgtctgcaagatagtaggtacttaagtgataaatggatgtagaaattctgattgtaactactatattgttctacctacaccctgtatataaaagggataacttagtaatttttccccagtattttaaagaaaaagtccttattcccaacattatgtctttccagatatgttgaggtcatgatgtataatggaaattaaagcaaagggaatacttttttaaatactttattgaactttataggtaagaaatgttgtctttaggaaatgacatttggagataatttactgaagcatctcttagatcattgggttattagtaaagacgaaaacagaagttaggattttgtgccagtgtatttatatcatatttggaagacattcaaactgtaactcttctaatggtctacgtacattttatttcactgtaagtgtaacataaaacaaaggtaaaatttcttgctaacgcttaccaacatctacttctagagacctggcctgagttttttaagaaaaatttttgtcctcaggaaagatgcatacactgtaagtagtgtattcagttatcaaaattcttgtggcattggccatttggtttgttaccgttactctatttttatttatctgagtaaaaggaattgattattctttaaaatgaaagggattgttttttaatgttctaggatacacattttacctctataaaaatgctgaataactttttagaaaaacttacaattaagtatacatcttaaaaattcatatgcttaaaggatggaagtgtagtctatagtagagtcttcaaacaagggtctacatactcctgggaatattaaactttctaagggatatgcaggcataaatagctttaagggaatgcaaattcagatcgcagtgcccatgtaaatcctttattaaaattgacctacataaaaacatatccatatcaagggatcatgccagttctttttccctgctgccttttggtaatcactggtctcccattttacaaaagaaacctatggcaagttgtgttttgcagaaatgaccccaacaatatttaaagtctcatacccttctcgaaccttgccactacccttatcaagatgtggagttacgtcccttccctttgaacattaacagactttttttttttttcaaagagttagagggtctccttataggggcctccctgtattacccaggctggtctctaactcttaggcttaaggggtcctccagcctcggcctcccaaagtgctggaattacaggtgtgagccaccacgcttggccccttagccaacttctgactgccataattaagagaatatgatggaagttaatctattttcattgtgggtaaagtgtggtgttaaaaatgagttataggccaggcactatggctcacacctgtaatcccagcactttgggagcccaggtgggcagatcacttgaggttcggagtttgagaccagcctggccaatatggtaaagcctcgtctccactaaaaacacaaaaataagctgggcatggtggcgcgcgcctgtaataccagctactggggaggctgaggcagaagaatcacttgaacccaggaggcagaggttgcagtgagccgagatagtgccactgcactccagcctgggtgacagagtgatactccatctcaaaaaaaaaaaaaaataagttatattggcccgtgtggagatgttcagaattcagatgtattatcaagttgggaaataatgatgaaagtgttcagtgaccttgcctttttgtttctggactattcaaaaaatcatttcctttgtgggtacattgtgtgaaaggaaagcaaagagcatgagtttaacatgaaggaaaagataccttatttttaggcaaaaagcaaatggtgaggctctttgcctcatctacctaagaattaaaatattcaagattagtaaaaaagcatgattagttttggtgaatctcctgtgaagcaaactctgtatttccaccattcttttttttttttttttttttttgagacgaagtcttgttctgtcacccatgctggagtgcagtggcacgatctcagctcactacaacctctgcctcccaagttcaagcaattctcctgcctcagcctcccgagtagttgggactacaggcatgtgccaccacacccagctaattttttgtatttttagtagaggcagggtttcaccctgttagccaggatggtctcaatctcctgacctcatgatctgcccagcctcagcctcccaaagtgctgggattacaggcgtgagccaccgcgcccggccctccaccattcttgataattataaagagcctgatgaagatatctcaattcctgtctcagtagcatagtttgcatgatatcaaggaggaggaagttaaaagtttcatgtttacttctgacatactaacattacatcttcaagttaaaaacattttagaagtaagttcatgaatttatattttctgaaacattttcagattcttaagagaaacattttcattaacccttgccagtacatttattattaggttctataaattccatattaattgttttacataggccaaagtctcctgctattgtcactcaaccatttctctgtatcattcattcctaccatatacttaggtttaagttaacagaaatatgttgtagtttttactgtaaataagacacataatcgcctggttggaaggtagtgagttatcttaattgattgttcagtcagttacagatcgaactctttgttctcgtcttccccccgcttctcactgctgcacttgactagtctgaaaaaaaaaaatacatagtagtcatcagtacacctgatataagccctgaacttcctaatgacctctttttttgtgtgtgtgtgacagagtcttactgtgttgcccaggctggagtgcagtggtgtgatctcggctcactgcaacctccgcctcctgggttcaagcagttctcctgccttagcctcctgagtagatgggattacaggtgcaagccaccatgcctggctaatttttatatttttagtagagatggagtttcgccatgttggccaggctggttttgaacagctgacctcaggtgatccacccacctcagcctcccaaagtgctgggcttacatgggtgaggcagtgcacccagcctgaattacctcttttattttgctcataatttccataatttatcatctaatttaagatgctttgagattcactattattttatatgccacttagtaaaaatactgccagttaagctgtgacatgtcattgattataagatacatcttaatttcagagatgttaaatacatgtcttagtttgataaaataccatacaatacttttcttttttttgagaccgatcctgctatgttgcccaggctggtctccaactcctgcctcagcctcccaagtagctgggattacaggtgtgtgacactacacccagctcacatacaatactgttttttgtttgtttgtttgttttttgagacagagtcttgccctgtcgcccaggctgcagtgcagtggcgtgatctcgcctcactgcaacctccacctcccgggttcaagcaattcttctgcctcagcctcccaagtaactgggacaacaggcacgcaccaccacaccctgctaattttttatatttggtagagatggggtttcaccatattggcaaggctggtctcgaactcctgacctcgtgatctgcccacctcggcctcccaaagtgctgagattacaggcctaagccaccgttcctggcctatagtactcttaaaagcagaacatatacttagatataagtaggtatatagaagtaaatgtctccaaaaggtagtgtaggacaatacatttgaaaattggctttaacccatcctggctaacacagtgaaaccccgtctctactaaaaataaaaaaaaaaaaatagccaggcatggtggcgggcgcctgtagtcccagctagtcgggaggctgaggcaggagaatggcatgaacccgggaggcagaggttgcagtgagttaagatggcgccactgcactccagcctgggcgacagagcgagactctgtctcaaaataaaaaaaaaaaaaagaaaatcggctttatttaattagggttaactcttctcagatacttgtatttgttcaaattcattaaaaaccataattgaggctgggcgcggtggctcacgcctgtaatcccagcactttgggaggccgaggcgggcagatcatgaggtcaggagttcgagaccagcctgcccaacatggtgaaaccccgtctctactaaaaatacaaaaattagacatggtggcatgtgcctgtatcccagctacttgggaggctgaggcaggagaattgcttgagcccaggaagtgaaggttgcagtgagccaagatctcaccactgcactccagcctgggcaacacagggagatcctgtctcaaaaaagaaaaaaatttttacagttgaaagattgccaacaatctaaatgaccataggagaaaggataaataagttgcatatttgcacagtataacaagatagttgattaaattagagccatttgatacaacatgaataaatctaaaattgtgtacaaacaaaagccaaagcaaaacttatgtgatattctttacgtcaaatttaaaagtctgcaaaacaatatgctgtactctctataaatggtaaatataaggtcatagtgtaaatacaaatgaaggtaacatgctttagatatagtaattattttggggtgggttcagggagatacaagcttcagatggacatggatgtgtgagtggatatgtatttcaagtcaaccaaatttggaaaatgttaaaatttattaaacctcaccatggaatacacgta

SEQ ID NO: 155439 - DNA, 1950 bp, Homo sapiens
  Payload ID: 10559
  Gene Symbol: MPL
  Gene Name: MPL proto-oncogene, thrombopoietin receptor
  Uniprot ID: P40238
  ENST ID: ENST00000372470
  CDS Start-End: 43-1950
gaagggaggatgggctaaggcaggcacacagtggcggagaagatgccctcctgggccctcttcatggtcacctcctgcctcctcctggcccctcaaaacctggcccaagtcagcagccaagatgtctccttgctggcatcagactcagagcccctgaagtgtttctcccgaacatttgaggacctcacttgcttctgggatgaggaagaggcagcgcccagtgggacataccagctgctgtatgcctacccgcgggagaagccccgtgcttgccccctgagttcccagagcatgccccactttggaacccgatacgtgtgccagtttccagaccaggaggaagtgcgtctcttctttccgctgcacctctgggtgaagaatgtgttcctaaaccagactcggactcagcgagtcctctttgtggacagtgtaggcctgccggctccccccagtatcatcaaggccatgggtgggagccagccaggggaacttcagatcagctgggaggagccagctccagaaatcagtgatttcctgaggtacgaactccgctatggccccagagatcccaagaactccactggtcccacggtcatacagctgattgccacagaaacctgctgccctgctctgcagaggcctcactcagcctctgctctggaccagtctccatgtgctcagcccacaatgccctggcaagatggaccaaagcagacctccccaagtagagaagcttcagctctgacagcagagggtggaagctgcctcatctcaggactccagcctggcaactcctactggctgcagctgcgcagcgaacctgatgggatctccctcggtggctcctggggatcctggtccctccctgtgactgtggacctgcctggagatgcagtggcacttggactgcaatgctttaccttggacctgaagaatgttacctgtcaatggcagcaacaggaccatgctagctcccaaggcttcttctaccacagcagggcacggtgctgccccagagacaggtaccccatctgggagaactgcgaagaggaagagaaaacaaatccaggactacagaccccacagttctctcgctgccacttcaagtcacgaaatgacagcattattcacatccttgtggaggtgaccacagccccgggtactgttcacagctacctgggctcccctttctggatccaccaggctgtgcgcctccccaccccaaacttgcactggagggagatctccagtgggcatctggaattggagtggcagcacccatcgtcctgggcagcccaagagacctgttatcaactccgatacacaggagaaggccatcaggactggaaggtgctggagccgcctctcggggcccgaggagggaccctggagctgcgcccgcgatctcgctaccgtttacagctgcgcgccaggctcaacggccccacctaccaaggtccctggagctcgtggtcggacccaactagggtggagaccgccaccgagaccgcctggatctccttggtgaccgctctgcatctagtgctgggcctcagcgccgtcctgggcctgctgctgctgaggtggcagtttcctgcacactacaggagactgaggcatgccctgtggccctcacttccagacctgcaccgggtcctaggccagtaccttagggacactgcagccctgagcccgcccaaggccacagtctcagatacctgtgaagaagtggaacccagcctccttgaaatcctccccaagtcctcagagaggactcctttgcccctgtgttcctcccaggcccagatggactaccgaagattgcagccttcttgcctggggaccatgcccctgtctgtgtgcccacccatggctgagtcagggtcctgctgtaccacccacattgccaaccattcctacctaccactaagctattggcagcagccttga

SEQ ID NO: 155440 - DNA, 1743 bp, Homo sapiens
  Payload ID: 10559
  Gene Symbol: MPL
  Gene Name: MPL proto-oncogene, thrombopoietin receptor
  ENST ID: ENST00000413998
  CDS Start-End: 1-1650
atgccctcctgggccctcttcatggtcacctcctgcctcctcctggcccctcaaaacctggcccaagtcagcagccaagatgtctccttgctggcatcagactcagagcccctgaagtgtttctcccgaacatttgaggacctcacttgcttctgggatgaggaagaggcagcgcccagtgggacataccagctgctgtatgcctacccgcgggagaagccccgtgcttgccccctgagttcccagagcatgccccactttggaacccgatacgtgtgccagtttccagaccaggaggaagtgcgtctcttctttccgctgcacctctgggtgaagaatgtgttcctaaaccagactcggactcagcgagtcctctttgtggacagtgtaggcctgccggctccccccagtatcatcaaggccatgggtgggagccagccaggggaacttcagatcagctgggaggagccagctccagaaatcagtgatttcctgaggtacgaactccgctatggccccagagatcccaagaactccactggtcccacggtcatacagctgattgccacagaaacctgctgccctgctctgcagaggcctcactcagcctctgctctggaccagtctccatgtgctcagcccacaatgccctggcaagatggaccaaagcagacctccccaagtagagaagcttcagctctgacagcagagggtggaagctgcctcatctcaggactccagcctggcaactcctactggctgcagctgcgcagcgaacctgatgggatctccctcggtggctcctggggatcctggtccctccctgtgactgtggacctgcctggagatgcagtggcacttggactgcaatgctttaccttggacctgaagaatgttacctgtcaatggcagcaacaggaccatgctagctcccaaggcttcttctaccacagcagggcacggtgctgccccagagacaggtaccccatctgggagaactgcgaagaggaagagaaaacaaatccaggactacagaccccacagttctctcgctgccacttcaagtcacgaaatgacagcattattcacatccttgtggaggtgaccacagccccgggtactgttcacagctacctgggctcccctttctggatccaccaggctgtgcgcctccccaccccaaacttgcactggagggagatctccagtgggcatctggaattggagtggcagcacccatcgtcctgggcagcccaagagacctgttatcaactccgatacacaggagaaggccatcaggactggaaggtgctggagccgcctctcggggcccgaggagggaccctggagctgcgcccgcgatctcgctaccgtttacagctgcgcgccaggctcaacggccccacctaccaaggtccctggagctcgtggtcggacccaactagggtggagaccgccaccgagaccgcctggatctccttggtgaccgctctgcatctagtgctgggcctcagcgccgtcctgggcctgctgctgctgaggtggcagtttcctgcacactacaggtaccgcccccgccaggcaggagactggcggtggaccaggtggagccgaaggcctgtaaacaggcattcttggttcgctctgtgaccccagatctccgtccaccgcccgtgcgcacctacggcttcgccacttcctgcacgtcacctctgggactcgccgcggctccttacactctaa

SEQ ID NO: 155441 - DNA, 1740 bp, Homo sapiens
  Payload ID: 10559
  Gene Symbol: MPL
  Gene Name: MPL proto-oncogene, thrombopoietin receptor
  ENST ID: ENST00000612993
  CDS Start-End: 1-1740
atgccctcctgggccctcttcatggtcacctcctgcctcctcctggcccctcaaaacctggcccaagtcagcagccaagatgtctccttgctggcatcagactcagagcccctgaagtgtttctcccgaacatttgaggacctcacttgcttctgggatgaggaagaggcagcgcccagtgggacataccagctgctgtatgcctacccgcgggagaagccccgtgcttgccccctgagttcccagagcatgccccactttggaacccgatacgtgtgccagtttccagaccaggaggaagtgcgtctcttctttccgctgcacctctgggtgaagaatgtgttcctaaaccagactcggactcagcgagtcctctttgtggacagtgtaggcctgccggctccccccagtatcatcaaggccatgggtgggagccagccaggggaacttcagatcagctgggaggagccagctccagaaatcagtgatttcctgaggtacgaactccgctatggccccagagatcccaagaactccactggtcccacggtcatacagctgattgccacagaaacctgctgccctgctctgcagaggcctcactcagcctctgctctggaccagtctccatgtgctcagcccacaatgccctggcaagatggaccaaagcagacctccccaagtagagaagcttcagctctgacagcagagggtggaagctgcctcatctcaggactccagcctggcaactcctactggctgcagctgcgcagcgaacctgatgggatctccctcggtggctcctggggatcctggtccctccctgtgactgtggacctgcctggagatgcagtggcacttggactgcaatgctttaccttggacctgaagaatgttacctgtcaatggcagcaacaggaccatgctagctcccaaggcttcttctaccacagcagggcacggtgctgccccagagacaggtaccccatctgggagaactgcgaagaggaagagaaaacaaatccaggactacagaccccacagttctctcgctgccacttcaagtcacgaaatgacagcattattcacatccttgtggaggtgaccacagccccgggtactgttcacagctacctgggctcccctttctggatccaccaggctgtgcgcctccccaccccaaacttgcactggagggagatctccagtgggcatctggaattggagtggcagcacccatcgtcctgggcagcccaagagacctgttatcaactccgatacacaggagaaggccatcaggactggaaggtgctggagccgcctctcggggcccgaggagggaccctggagctgcgcccgcgatctcgctaccgtttacagctgcgcgccaggctcaacggccccacctaccaaggtccctggagctcgtggtcggacccaactagggtggagaccgccaccgagaccgcctggatctccttggtgaccgctctgcatctagtgctgggcctcagcgccgtcctgggcctgctgctgctgaggtggcagtttcctgcacactacaggtaccgcccccgccaggcaggagactggcggtggaccaggtggagccgaaggtgtaaacaggcattcttggttcgctctgtgaccccagatctccgtccaccgcccgtgcgcacctacggcttcgcccttcctgcacgtcacctctgggactcgccgcggctccttacactctaa

SEQ ID NO: 155442 - DNA, 1567 bp, Homo sapiens
  Payload ID: 10560
  Gene Symbol: MPND
  Gene Name: MPN domain containing
  Uniprot ID: Q8N594
  ENST ID: ENST00000262966
  CDS Start-End: 68-1483
cggggcggggccgcgtgacgtgccgggaagccggagtctagagctccgggcgcggggaggcgcggccatggcagctccggagccgctgtccccggcgggcggtgcgggcgaggaggcgccggaggaggacgaggacgaagcggaggccgaggaccctgagcggccgaatgcgggagcgggcggtggacgcagtggcggcggcggcagtagcgtcagcggaggaggcggcggcggcggggccggggcggggggctgcggcgggcccgggggcgcgctcaccaggcgcgcggtcacactgcgggtgctcctcaaagacgcgctgctggagcctggcgccggggtgctgtccatctactacctggggaagaagttcctgggcgacctgcagccagacggaaggatcatgtggcaggagaccgggcagaccttcaactcacccagcgcctgggccacccactgcaagaagctggtgaaccctgccaagaagtcgggctgtggctgggcctctgtcaagtacaaaggccagaaactggacaagtacaaggccacctggctccggctgcaccagctgcacacgcctgccacggctgctgatgagagcccagccagtgaaggggaggaggaggagttgctgatggaagaggaggaggaggacgttctggcaggggtctcagcagaggacaagagtcggagaccactggggaagagcccttcagagcctgcccacccggaggccacaaccccagggaagcgggtggacagcaagatccgggttccggtccgctactgcatgctgggcagccgcgacttggccaggaacccccacaccctggtggaagtaacatcctttgcagccatcaacaagttccagccgttcaacgtggctgtttctagcaacgtgctgttcctgctggacttccacagtcacctgacacggagtgaggtcgtgggttacctggggggccgctgggacgtcaacagccagatgctgacggtgctcagagccttcccttgtcggagccggctcggggacgcagagactgcagctgccatcgaagaggagatctaccagagcctgttcctgcggggcctgtccctggtgggctggtaccacagccacccacacagcccggcgctgccatctctgcaggacatcgacgcacagatggactaccagctgcggctgcagggctccagcaatggcttccagccctgcctcgccctgctctgctccccttactattctggcaacccaggccccgagtccaagatctcacctttctgggtgatgcctcctcccgagatgctgctggtggagttctacaagggttcccctgacctcgtgaggctccaggaaccctggagccaggagcacacctacctcgacaagcttaagatctccttggccagcaggacgcccaaggaccagagcctgtgtcacgtcctggaacaggtgtgcggcgtcctcaagcaggggagctgagccttccagggcagggtgggctccagttgtcttgagggtccggatgggctcaggtaataaagaaacggaagcagcagccagcca

SEQ ID NO: 155443 - DNA, 1475 bp, Homo sapiens
  Payload ID: 10560
  Gene Symbol: MPND
  Gene Name: MPN domain containing
  Uniprot ID: Q8N594
  ENST ID: ENST00000359935
  CDS Start-End: 41-1396
aagccggagtctagagctccgggcgcggggaggcgcggccatggcagctccggagccgctgtccccggcgggcggtgcgggcgaggaggcgccggaggaggacgaggacgaagcggaggccgaggaccctgagcggccgaatgcgggagcgggcggtggacgcagtggcggcggcggcagtagcgtcagcggaggaggcggcggcggcggggccggggcggggggctgcggcgggcccgggggcgcgctcaccaggcgcgcggtcacactgcgggtgctcctcaaagacgcgctgctggagcctggcgccggggtgctgtccatctactacctggggaagaagttcctgggcgacctgcagccagacggaaggatcatgtggcaggagaccgggcagaccttcaactcacccagcgcctgggccacccactgcaagaagctggtgaaccctgccaagaagtcgggctgtggctgggcctctgtcaagtacaaaggccagaaactggacaagtacaaggccacctggctccggctgcaccagctgcacacgcctgccacggctgctgatgagagcccagccagtgaaggggaggaggaggagttgctgatggaagaggaggaggaggacgttctggcaggggtctcagcagaggacaagagtcggagaccactggggaagagcccttcagagcctgcccacccggaggccacaaccccagggaagcgggtggacagcaagatccgggttccggtccgctactgcatgctgggcagccgcgacttggccaggaacccccacaccctggtggaagtaacatcctttgcagccatcaacaagttccagccgttcaacgtggctgtttctagcaacgtgctgttcctgctgatctaccagagcctgttcctgcggggcctgtccctggtgggctggtaccacagccacccacacagcccggcgctgccatctctgcaggacatcgacgcacagatggactaccagctgcggctgcagggctccagcaatggcttccagccctgcctcgccctgctctgctccccttactattctggcaacccaggccccgagtccaagatctcacctttctgggtgatgcctcctcccgagcaaaggcccagtgactatggcatccccatggatgtggagatggcctacgtccaggacagcttcctgaccaatgacatccttcacgagatgatgctgctggtggagttctacaagggttcccctgacctcgtgaggctccaggaaccctggagccaggagcacacctacctcgacaagcttaagatctccttggccagcaggacgcccaaggaccagagcctgtgtcacgtcctggaacaggtgtgcggcgtcctcaagcaggggagctgagccttccagggcagggtgggctccagttgtcttgagggtccggatgggctcaggtaataaagaaacggaagcagcagcc

SEQ ID NO: 155444 - DNA, 407 bp, Homo sapiens
  Payload ID: 10560
  Gene Symbol: MPND
  Gene Name: MPN domain containing
  ENST ID: ENST00000594162
  CDS Start-End: 1-330
gacttccacagtcacctgacacggagtgaggtcgtgggttacctggggggccgctgggacgtcaacagccagatgctgacggtgctcagagccttcccttgtcggagccggctcggggacgcagagactgcagctgccatcgaagaggagatgctgctggtggagttctacaagggttcccctgacctcgtgaggctccaggaaccctggagccaggagcacacctacctcgacaagcttaagatctccttggccagcaggacgcccaaggaccagagcctgtgtcacgtcctggaacaggtgtgcggcgtcctcaagcaggggagctgagccttccagggcagggtgggctccagttgtcttgagggtccggatgggctcaggtaataaagaaacggaagcagcag

SEQ ID NO: 155445 - DNA, 379 bp, Homo sapiens
  Payload ID: 10560
  Gene Symbol: MPND
  Gene Name: MPN domain containing
  ENST ID: ENST00000601877
  CDS Start-End: 1-366
agaccactggggaagagcccttcagagcctgcccacccggaggccacaaccccagggaagcgggtggacagcaagatccgggttccggtccgctactgcatgctgggcagccgcgacttggccaggaacccccacaccctggtggaagtaacatcctttgcagccatcaacaagttccagccgttcaacgtggctgtttctagcaacgtgctgttcctgctggtgtgtggcccaccctgtctaggggcaaggggctccggagcccagtcggtgggcagcgggcggggctcccctgcgtatcagctccatgagagctggggccttgtctgctttgtttgctactggtacactgtgggtgctcaataaatgtatgaaggag

SEQ ID NO: 155446 - DNA, 1547 bp, Homo sapiens
  Payload ID: 10560
  Gene Symbol: MPND
  Gene Name: MPN domain containing
  ENST ID: ENST00000594716
  CDS Start-End: 29-1288
agagctccgggcgcggggaggcgcggccatggcagctccggagccgctgtccccggcgggcggtgcgggcgaggaggcgccggaggaggacgaggacgaagcggaggccgaggaccctgagcggccgaatgcgggagcgggcggtggacgcagtggcggcggcggcagtagcgtcagcggaggaggcggcggcggcggggccggggcggggggctgcggcgggcccgggggcgcgctcaccaggcgcgcggtcacactgcgggtgctcctcaaagacgcgctgctggagcctggcgccggggtgctgtccatctactacctggggaagaagttcctgggcgacctgcagccagacggaaggatcatgtggcaggagaccgggcagaccttcaactcacccagcgcctgggccacccactgcaagaagctggtgaaccctgccaagaagtcgggctgtggctgggcctctgtcaagtacaaaggccagaaactggacaagtacaaggccacctggctccggctgcaccagctgcacacgcctgccacggctgctgatgagagcccagccagtgaaggggaggaggaggagttgctgatggaagaggaggaggaggacgttctggcaggggtctcagcagaggacaagagtcggagaccactggggaagagcccttcagagcctgcccacccggaggccacaaccccagggaagcgggtggacagcaagatccgggttccggtccgctactgcatgctgggcagccgcgacttggccaggaacccccacaccctggtggaagtaacatcctttgcagccatcaacaagttccagccgttcaacgtggctgtttctagcaacgtgctgttcctgctggacttccacagtcacctgacacggagtgaggtcgtgggttacctggggggccgctgggacgtcaacagccagatgctgacggtgctcagagccttcccttgtcggagccggctcggggacgcagagactgcagctgccatcgaagaggagatctaccagagcctgttcctgcggggcctgtccctggtgggctggtaccacagccacccacacagcccggcgctgccatctctgcaggacatcgacgcacagatggactaccagctgcggctgcagggctccagcaatggcttccagccctgcctcgccctgctctgctccccttactattctggcaacccaggccccgagtccaagatctcacctttctgggtgatgcctcctcccgaggtgccgatcccggtgcagagctgagccggggtgtgcactctcccgttcccagcccgggcactgccaattgtccccagctgccatgggctgcgggctggtgaggcttctctcactggtctgtgtccctgccagcaaaggcccagtgactatggcatccccatggatgtggagatggcctacgtccaggacagcttcctgaccaatgacatccttcacgagatgatgctgctggtggagttctacaagggttcccctgacctcgtgaggctccaggaaccctgga

SEQ ID NO: 155447 - DNA, 1445 bp, Homo sapiens
  Payload ID: 10560
  Gene Symbol: MPND
  Gene Name: MPN domain containing
  ENST ID: ENST00000597036
  CDS Start-End: 1-1409
cggagccgctgtccccggcgggcggtgcgggcgaggaggcgccggaggaggacgaggacgaagcggaggccgaggaccctgagcggccgaatgcgggagcgggcggtggacgcagtggcggcggcggcagtagcgtcagcggaggaggcggcggcggcggggccggggcggggggctgcggcgggcccgggggcgcgctcaccaggcgcgcggtcacactgcgggtgctcctcaaagacgcgctgctggagcctggcgccggggtgctgtccatctactacctggggaagaagttcctgggcgacctgcagccagacggaaggatcatgtggcaggagaccgggcagaccttcaactcacccagcgcctgggccacccactgcaagaagctggtgaaccctgccaagaagtcgggctgtggctgggcctctgtcaagtacaaaggccagaaactggacaagtacaaggccacctggctccggctgcaccagctgcacacgcctgccacggctgctgatgagagcccagccagtgaaggggaggaggaggagttgctgatggaagaggaggaggaggacgttctggcaggggtctcagcagaggacaagagtcggagaccactggggaagagcccttcagagcctgcccacccggaggccacaaccccagggaagcgggtggacagcaagatccgggttccggtccgctactgcatgctgggcagccgcgacttggccaggaacccccacaccctggtggaagtaacatcctttgcagccatcaacaagttccagccgttcaacgtggctgtttctagcaacgtgctgttcctgctggacttccacagtcacctgacacggagtgaggtcgtgggttacctggggggccgctgggacgtcaacagccagatgctgacggtgctcagagccttcccttgtcggagccggctcggggacgcagagactgcagctgccatcgaagaggaggacatcgacgcacagatggactaccagctgcggctgcagggctccagcaatggcttccagccctgcctcgccctgctctgctccccttactattctggcaacccaggccccgagtccaagatctcacctttctgggtgatgcctcctcccgagcaaaggcccagtgactatggcatccccatggatgtggagatggcctacgtccaggacagcttcctgaccaatgacatccttcacgagatgatgctgctggtggagttctacaagggttcccctgacctcgtgaggctccaggaaccctggagccaggagcacacctacctcgacaagcttaagatctccttggccagcaggacgcccaaggaccagagcctgtgtcacgtcctggaacaggtgtgcggcgtcctcaagcaggggagctgagccttccagggcagggtgggctccagttgtcttgag

SEQ ID NO: 155448 - DNA, 1578 bp, Homo sapiens
  Payload ID: 10560
  Gene Symbol: MPND
  Gene Name: MPN domain containing
  ENST ID: ENST00000596722
  CDS Start-End: 1-1512
ggcgggcccagcggggcggaggcgcggggcgcggggctgcaggggcgcggggctgcagagccgtggggcgagcggcctccctgcagcctctcgctgtccgcagctccggagccgctgtccccggcgggcggtgcgggcgaggaggcgccggaggaggacgaggacgaagcggaggccgaggaccctgagcggccgaatgcgggagcgggcggtggacgcagtggcggcggcggcagtagcgtcagcggaggaggcggcggcggcggggccggggcggggggctgcggcgggcccgggggcgcgctcaccaggcgcgcggtcacactgcgggtgctcctcaaagacgcgctgctggagcctggcgccggggtgctgtccatctactacctggggaagaagttcctgggcgacctgcagccagacggaaggatcatgtggcaggagaccgggcagaccttcaactcacccagcgcctgggccacccactgcaagaagctggtgaaccctgccaagaagtcgggctgtggctgggcctctgtcaagtacaaaggccagaaactggacaagtacaaggccacctggctccggctgcaccagctgcacacgcctgccacggctgctgatgagagcccagccagtgaaggggaggaggaggagttgctgatggaagaggaggaggaggacgttctggcaggggtctcagcagaggacaagagtcggagaccactggggaagagcccttcagagcctgcccacccggaggccacaaccccagggaagcgggtggacagcaagatccgggttccggtccgctactgcatgctgggcagccgcgacttggccaggaacccccacaccctggtggaagtaacatcctttgcagccatcaacaagttccagccgttcaacgtggctgtttctagcaacgtgctgttcctgctggacttccacagtcacctgacacggagtgaggtcgtgggttacctggggggccgctgggacgtcaacagccagatgctgacggtgctcagagccttcccttgtcggagccggctcggggacgcagagactgcagctgccatcgaagaggagatctaccagagcctgttcctgcggggcctgtccctggtgggctggtaccacagccacccacacagcccggcgctgccatctctgcaggacatcgacgcacagatggactaccagctgcggctgcagggctccagcaatggcttccagccctgcctcgccctgctctgctccccttactattctggcaacccaggccccgagtccaagatctcacctttctgggtgatgcctcctcccgagatgctgctggtggagttctacaagggttcccctgacctcgtgaggctccaggaaccctggagccaggagcacacctacctcgacaagcttaagatctccttggccagcaggacgcccaaggaccagagcctgtgtcacgtcctggaacaggtgtgcggcgtcctcaagcaggggagctgagccttccagggcagggtgggctccagttgtcttgagggtccggatgggctcaggtaataaagaaac

SEQ ID NO: 155449 - DNA, 1611 bp, Homo sapiens
  Payload ID: 10560
  Gene Symbol: MPND
  Gene Name: MPN domain containing
  ENST ID: ENST00000599840
  CDS Start-End: 36-1541
ggagtctagagctccgggcgcggggaggcgcggccatggcagctccggagccgctgtccccggcgggcggtgcgggcgaggaggcgccggaggaggacgaggacgaagcggaggccgaggaccctgagcggccgaatgcgggagcgggcggtggacgcagtggcggcggcggcagtagcgtcagcggaggaggcggcggcggcggggccggggcggggggctgcggcgggcccgggggcgcgctcaccaggcgcgcggtcacactgcgggtgctcctcaaagacgcgctgctggagcctggcgccggggtgctgtccatctactacctggggaagaagttcctgggcgacctgcagccagacggaaggatcatgtggcaggagaccgggcagaccttcaactcacccagcgcctgggccacccactgcaagaagctggtgaaccctgccaagaagtcgggctgtggctgggcctctgtcaagtacaaaggccagaaactggacaagtacaaggccacctggctccggctgcaccagctgcacacgcctgccacggctgctgatgagagcccagccagtgaaggggaggaggaggagttgctgatggaagaggaggaggaggacgttctggcaggggtctcagcagaggacaagagtcggagaccactggggaagagcccttcagagcctgcccacccggaggccacaaccccagggaagcgggtggacagcaagatccgggttccggtccgctactgcatgctgggcagccgcgacttggccaggaacccccacaccctggtggaagtaacatcctttgcagccatcaacaagttccagccgttcaacgtggctgtttctagcaacgtgctgttcctgctggacttccacagtcacctgacacggagtgaggtcgtgggttacctggggggccgctgggacgtcaacagccagatgctgacggtgctcagagccttcccttgtcggagccggctcggggacgcagagactgcagctgccatcgaagaggagatctaccagagcctgttcctgcggggcctgtccctggtgggctggtaccacagccacccacacagcccggcgctgccatctctgcaggacatcgacgcacagatggactaccagctgcggctgcagggctccagcaatggcttccagccctgcctcgccctgctctgctccccttactattctggcaacccaggccccgagtccaagatctcacctttctgggtgatgcctcctcccgagcaaaggcccagtgactatggcatccccatggatgtggagatggcctacgtccaggacagcttcctgaccaatgacatccttcacgagatgatgctgctggtggagttctacaagggttcccctgacctcgtgaggctccaggaaccctggagccaggagcacacctacctcgacaagcttaagatctccttggccagcaggacgcccaaggaccagagcctgtgtcacgtcctggaacaggtgtgcggcgtcctcaagcaggggagctgagccttccagggcagggtgggctccagttgtcttgagggtccggatgggctcaggtaataaagaaacggaa

SEQ ID NO: 155450 - DNA, 998 bp, Homo sapiens
  Payload ID: 10561
  Gene Symbol: MPV17
  Gene Name: MpV17 mitochondrial inner membrane protein
  Uniprot ID: P39210
  ENST ID: ENST00000233545
  CDS Start-End: 48-578
gagggacggtgggggtgaccccctctcctcttggcttgacaggaagcatggcactctggcgggcataccagcgggccctggccgctcacccgtggaaagtacaggtcctgacagctgggtccctgatgggcctgggtgacattatctcacagcagctggtggagaggcggggtctgcaggaacaccagagaggccggactctgaccatggtgtccctgggctgtggctttgtgggccctgtggtaggaggctggtacaaggttttggatcggttcatccctggcaccaccaaagtggatgcactgaagaagatgttgttggatcaggggggctttgccccgtgttttctaggctgctttctcccactggtaggggcacttaatggactgtcagcccaggacaactgggccaaactacagcgggattatcctgatgcccttatcaccaactactatctatggcctgctgtgcagttagccaacttctacctggtcccccttcattacaggttggccgttgtccaatgtgttgctgttatctggaactcctacctgtcctggaaggcacatcggctctaagcctgcctcactccatcgtttccaccttgcagtgatgcagcttgaccctggaacggtcagacaacctcctcaaagtgggcataccagtttccacggggttgggttgccggtcagagcttaagaggactagcaccctgcaatgcccctcttcactctaaaatgtacactgactgctttagagcccttgataatagtcttattcccaccacatactaggcactccataaatatctgttgaaccttcatgaccttatcaactttacacccatatcccagcaaatgccactcatccccactcttcatagacacatttgttactctaaccctgcctaggcttcttgtagctccagctctttagagactcccggaaccctttatatggtgcctcagtaaatatgttattaaatatgtaatccggaa

SEQ ID NO: 155451 - DNA, 2011 bp, Homo sapiens
  Payload ID: 10561
  Gene Symbol: MPV17
  Gene Name: MpV17 mitochondrial inner membrane protein
  ENST ID: ENST00000357186
  CDS Start-End: 1231-1593
acagtgactatgatactgcctcctaagcaaggacacaccccagtgatgagaaataggcaaaccatggtcttgaaatgcctaggagtataggctggggtttggagggaaatagttggatgacctcaggaaatagaaaaaaacaggcagctgctttttggagagagtggagatgagatcagtgcctacctggaacaaaaccctctggcattctagactggctgaatatgtagtgtagggactttatcatctgtcagaaaatctcctttaagaagaagcgatcaagaagtttagtcctggccaggtgtggtggctcacgcctgtaatcccaacactttgggaggccaaggcaggcggattacttgaggtcagaagttcaagaccagcctggccaatgtatggtgaaaccccgtctctaccaaaaatgtaaaaaattagccaggtgtgatggcacacacctgcaatcccagctactcaggaggctgaggcagaagaatcatttgaacctgggatgcagaggttgcagtgagccgagatcctgccactgcactccagcctgggtgacggagcgagactccgtctcaaaaagagttcagcccctatcctgtacagatgagaaaatagacctggaggaaacccaagtctatcaacagcagagaccacaacccatgtcagtgcaaagaagccaagtgttgcactaccctattgggatccagctcacattgagccagttttgttttttgagctgttacgcaagtgccttctgtcgaagagaagctttactcaattctacagggcagcccccttcctattttcagtggtagaaaagatgagacctggggatccacacttgaggctgtagattggtgctggcagccctgcttctgcaactgagtctcagccctagtcttgaccttgttctttttctctaacaagccttttctctttctaaccctccctcccaatatacccacttcatactatccattgttcatacacttctctacctttattcctcttctcatattcctcccttcgccagagtgtctttttccaccatcttcacctgagttcaattcatccttcaaggtcccggctcaaattccaccttcaccaaagagcttcccagttttctccagtaaaaaatagtttccctcccttgtgttcccaagggggaagggaggaaaaaggataaacaagcattaagcacttgatccattttaggcacttcgcatgtgtcacttgtatgagggccctgtggtaggaggctggtacaaggttttggatcggttcatccctggcaccaccaaagtggatgcactgaagaagatgttgttggatcaggggggctttgccccgtgttttctaggctgctttctcccactggtaggggcacttaatggactgtcagcccaggacaactgggccaaactacagcgggattatcctgatgcccttatcaccaactactatctatggcctgctgtgcagttagccaacttctacctggtcccccttcattacaggttggccgttgtccaatgtgttgctgttatctggaactcctacctgtcctggaaggcacatcggctctaagcctgcctcactccatcgtttccaccttgcagtgatgcagcttgaccctggaacggtcagacaacctcctcaaagtgggcataccagtttccacggggttgggttgccggtcagagcttaagaggactagcaccctgcaatgcccctcttcactctaaaatgtacactgactgctttagagcccttgataatagtcttattcccaccacatactaggcactccataaatatctgttgaaccttcatgaccttatcaactttacacccatatcccagcaaatgccactcatccccactcttcatagacacatttgttactctaaccctgcctaggcttcttgtagctccagctctttagagactcccggaaccctttatatggtgcctcagtaaatatgttattaaatatgtaatccgg

SEQ ID NO: 155452 - DNA, 1005 bp, Homo sapiens
  Payload ID: 10561
  Gene Symbol: MPV17
  Gene Name: MpV17 mitochondrial inner membrane protein
  Uniprot ID: P39210
  ENST ID: ENST00000380044
  CDS Start-End: 57-587
gcggaagttcctaggccagcctgtcacgtgggagggaggctcggcgctcaggaagcatggcactctggcgggcataccagcgggccctggccgctcacccgtggaaagtacaggtcctgacagctgggtccctgatgggcctgggtgacattatctcacagcagctggtggagaggcggggtctgcaggaacaccagagaggccggactctgaccatggtgtccctgggctgtggctttgtgggccctgtggtaggaggctggtacaaggttttggatcggttcatccctggcaccaccaaagtggatgcactgaagaagatgttgttggatcaggggggctttgccccgtgttttctaggctgctttctcccactggtaggggcacttaatggactgtcagcccaggacaactgggccaaactacagcgggattatcctgatgcccttatcaccaactactatctatggcctgctgtgcagttagccaacttctacctggtcccccttcattacaggttggccgttgtccaatgtgttgctgttatctggaactcctacctgtcctggaaggcacatcggctctaagcctgcctcactccatcgtttccaccttgcagtgatgcagcttgaccctggaacggtcagacaacctcctcaaagtgggcataccagtttccacggggttgggttgccggtcagagcttaagaggactagcaccctgcaatgcccctcttcactctaaaatgtacactgactgctttagagcccttgataatagtcttattcccaccacatactaggcactccataaatatctgttgaaccttcatgaccttatcaactttacacccatatcccagcaaatgccactcatccccactcttcatagacacatttgttactctaaccctgcctaggcttcttgtagctccagctctttagagactcccggaaccctttatatggtgcctcagtaaatatgttattaaatatgtaatccgg

SEQ ID NO: 155453 - DNA, 749 bp, Homo sapiens
  Payload ID: 10561
  Gene Symbol: MPV17
  Gene Name: MpV17 mitochondrial inner membrane protein
  ENST ID: ENST00000399052
  CDS Start-End: 52-384
agttcctaggccagcctgtcacgtgggagggaggctcggcgctcaggaagcatggcactctggcgggcataccagcgggccctggccgctcacccgtggaaagtacaggtcctgacagctgacttctggggaggaaggcagcactgctggccccatgccagtagctatacctgccgacccaggcctcctggactgaaggacacgcttcctgctcctcactccaagaagccacttcttgcccctctgccttctgcgcatgaaactcaaaagccacaaaagaatattgctgtctgccatccccacgaggtgacaaggagcagaatgatggaatttgggggagtaaagacagagaggaagtgcattagtctagggaatgtcctttgatatgcaggccctttggggcctcacttgggcaggaacacccagcaggggagcagccacaggggcctcctggtgccactgacctctgagcccatctcagcccatgccaggaataccctggcctccttggtcctccttgagagaaggcctgggttcagttccaactgcactccttaccaagtcatctcatctctcaaagactcatcattaaatgggggtgtaggctgggtgccgtggctcacacctataatcccaacactttgggcggccaaggcaggtggatcacctggggtcaggagtttgagaccagcctggctaacatggtgaaaccccatctctactaaaaatacaaaaatcagccaggtgtg

SEQ ID NO: 155454 - DNA, 906 bp, Homo sapiens
  Payload ID: 10561
  Gene Symbol: MPV17
  Gene Name: MpV17 mitochondrial inner membrane protein
  ENST ID: ENST00000402310
  CDS Start-End: 9-521
caggaagcatggcactctggcgggcataccagcgggccctggccgctcacccgtggaaagtacaggtcctgacagctgggtccctgatgggcctgggtgacattatctcacagcagctggtggagaggcggggtctgcaggaacaccagagaggccggactctgaccatggtgtccctgggctgtggctttgtgggccctgtggtaggaggctggtacaaggttttggatcggttcatccctggcaccaccaaagtggatgcactgaagaagatgttgttggatcaggggggctttgccccgtgttttctaggctgctttctcccactggtaggggcacttaatggactgtcagcccaggacaactgggccaaactacagcgggattatcctgatgcccttatcaccaactactatgttggccgttgtccaatgtgttgctgttatctggaactcctacctgtcctggaaggcacatcggctctaagcctgcctcactccatcgtttccaccttgcagtgatgcagcttgaccctggaacggtcagacaacctcctcaaagtgggcataccagtttccacggggttgggttgccggtcagagcttaagaggactagcaccctgcaatgcccctcttcactctaaaatgtacactgactgctttagagcccttgataatagtcttattcccaccacatactaggcactccataaatatctgttgaaccttcatgaccttatcaactttacacccatatcccagcaaatgccactcatccccactcttcatagacacatttgttactctaaccctgcctaggcttcttgtagctccagctctttagagactcccggaaccctttatatggtgcctcagtaaatatgttattaaatatgtaatccggaa

SEQ ID NO: 155455 - DNA, 859 bp, Homo sapiens
  Payload ID: 10561
  Gene Symbol: MPV17
  Gene Name: MpV17 mitochondrial inner membrane protein
  ENST ID: ENST00000405983
  CDS Start-End: 18-593
ctcggcgctcaggaagcatggcactctggcgggcataccagcgggccctggccgctcacccgtggaaagtacaggtcctgacagctgcccatcccaggagatgtcctgacaacacctgtgtaccctgcatagggtccctgatgggcctgggtgacattatctcacagcagctggtggagaggcggggtctgcaggaacaccagagaggccggactctgaccatggtgtccctgggctgtggctttgtgggccctgtggtaggaggctggtacaaggttttggatcggttcatccctggcaccaccaaagtggatgcactgaagaagatgttgttggatcaggggggctttgccccgtgttttctaggctgctttctcccactggtaggggcacttaatggactgtcagcccaggacaactgggccaaactacagcgggattatcctgatgcccttatcaccaactactatctatggcctgctgtgcagttagccaacttctacctggtcccccttcattacaggttggccgttgtccaatgtgttgctgttatctggaactcctacctgtcctggaaggcacatcggctctaagcctgcctcactccatcgtttccaccttgcagtgatgcagcttgaccctggaacggtcagacaacctcctcaaagtgggcataccagtttccacggggttgggttgccggtcagagcttaagaggactagcaccctgcaatgcccctcttcactctaaaatgtacactgactgctttagagcccttgataatagtcttattcccaccacatactaggcactccataaatatctgttgaaccttcatgaccttatcaactttacacc

SEQ ID NO: 155456 - DNA, 603 bp, Homo sapiens
  Payload ID: 10561
  Gene Symbol: MPV17
  Gene Name: MpV17 mitochondrial inner membrane protein
  ENST ID: ENST00000405076
  CDS Start-End: 57-398
gcggaagttcctaggccagcctgtcacgtgggagggaggctcggcgctcaggaagcatggcactctggcgggcataccagcgggccctggccgctcacccgtggaaagtacaggtcctgacagctgggtccctgatgggcctgggtgacattatctcacagcagctggtggagaggcggggtctgcaggaacaccagagaggccggactctgaccatggtgtccctgggctgtggctttgtggattatcctgatgcccttatcaccaactactatctatggcctgctgtgcagttagccaacttctacctggtcccccttcattacaggttggccgttgtccaatgtgttgctgttatctggaactcctacctgtcctggaaggcacatcggctctaagcctgcctcactccatcgtttccaccttgcagtgatgcagcttgaccctggaacggtcagacaacctcctcaaagtgggcataccagtttccacggggttgggttgccggtcagagcttaagaggactagcaccctgcaatgcccctcttcactctaaaatgtacactgactgctttagagcccttgataatagtcttattccca

SEQ ID NO: 155457 - DNA, 665 bp, Homo sapiens
  Payload ID: 10561
  Gene Symbol: MPV17
  Gene Name: MpV17 mitochondrial inner membrane protein
  ENST ID: ENST00000403262
  CDS Start-End: 22-537
gaggctcggcgctcaggaagcatggcactctggcgggcataccagcgggccctggccgctcacccgtggaaagtacaggtcctgacagctgggtccctgatgggcctgggtgacattatctcacagcagctggtggagaggcggggtctgcaggaacaccagagaggccggactctgaccatggtgtccctgggctgtggctttgtgggccctgtggtaggaggctggtacaaggttttggatcggttcatccctggcaccaccaaagtggatgcactgaagaagatgttgttggatcaggggggctttgccccgtgttttctaggctgctttctcccactggtaggggcacttaatggactgtcagcccaggacaactgggccaaactacagcgggattatcctgatgcccttatcaccaactactatctatggcctgctgtgcagttagccaacttctacctggtcccccttcattacagggaggatcctgcttctaccacccttgtctccatcccacctgagctccgtctttgatggcatatctggagggacagtggctggggtgctgcagcctaggttagacagagaggtagaccagaaggccaagtaggagcctggtcagacactcacaataaagacagttgctgaactgcacccaaaaa

SEQ ID NO: 155458 - DNA, 827 bp, Homo sapiens
  Payload ID: 10561
  Gene Symbol: MPV17
  Gene Name: MpV17 mitochondrial inner membrane protein
  ENST ID: ENST00000402722
  CDS Start-End: 36-335
tgtcacgtgggagggaggctcggcgctcaggaagcatggcactctggcgggcataccagcgggccctggccgctcacccgtggaaagtacaggtcctgacagctgcagctggtggagaggcggggtctgcaggaacaccagagaggccggactctgaccatggtgtccctgggctgtggctttgtgggccctgtggtaggaggctggtacaaggttttggatcggttcatccctggcaccaccaaagtggatgcactgaagaagatgttgttggatcaggggggctttgccccgtgttttctaggctgctttctcccactggtaggggcacttaatggactgtcagcccaggacaactgggccaaactacagcgggttggccgttgtccaatgtgttgctgttatctggaactcctacctgtcctggaaggcacatcggctctaagcctgcctcactccatcgtttccaccttgcagtgatgcagcttgaccctggaacggtcagacaacctcctcaaagtgggcataccagtttccacggggttgggttgccggtcagagcttaagaggactagcaccctgcaatgcccctcttcactctaaaatgtacactgactgctttagagcccttgataatagtcttattcccaccacatactaggcactccataaatatctgttgaaccttcatgaccttatcaactttacacccatatcccagcaaatgccactcatccccactcttcatagacacatttgttactctaaccctgcctaggcttcttgtagctccagctctttagagactcccggaaccctttatatgg

SEQ ID NO: 155459 - DNA, 597 bp, Homo sapiens
  Payload ID: 10561
  Gene Symbol: MPV17
  Gene Name: MpV17 mitochondrial inner membrane protein
  ENST ID: ENST00000415514
  CDS Start-End: 18-257
ctcggcgctcaggaagcatggcactctggcgggcataccagcgggccctggccgctcacccgtggaaagtacaggtcctgacagctgacttctggggaggaaggcagcactgctggccccatgccagtagctatacctgccgacccaggcctcctggactgaaggacacgcttcctgctcctcactccaagaagccacttcttgcccctctgccttctgcgcatgaaactcaaaagccacaaaaggccctgtggtaggaggctggtacaaggttttggatcggttcatccctggcaccaccaaagtggatgcactgaagaagatgttgttggatcaggggggctttgccccgtgttttctaggctgctttctcccactggtaggggcacttaatggactgtcagcccaggacaactgggccaaactacagcgggattatcctgatgcccttatcaccaactactatctatggcctgctgtgcagttagccaacttctacctggtcccccttcattacaggttggccgttgtccaatgtgttgctgttatctggaactcctacctgtcctggaaggcacatcggctctaagcctgcct

SEQ ID NO: 155460 - DNA, 905 bp, Homo sapiens
  Payload ID: 10561
  Gene Symbol: MPV17
  Gene Name: MpV17 mitochondrial inner membrane protein
  ENST ID: ENST00000426513
  CDS Start-End: 38-337
cctgtcacgtgggagggaggctcggcgctcaggaagcatggcactctggcgggcataccagcgggccctggccgctcacccgtggaaagtacaggtcctgacagctgcagctggtggagaggcggggtctgcaggaacaccagagaggccggactctgaccatggtgtccctgggctgtggctttgtgggccctgtggtaggaggctggtacaaggttttggatcggttcatccctggcaccaccaaagtggatgcactgaagaagatgttgttggatcaggggggctttgccccgtgttttctaggctgctttctcccactggtaggggcacttaatggactgtcagcccaggacaactgggccaaactacagcgggattatcctgatgcccttatcaccaactactatctatggcctgctgtgcagttagccaacttctacctggtcccccttcattacaggttggccgttgtccaatgtgttgctgttatctggaactcctacctgtcctggaaggcacatcggctctaagcctgcctcactccatcgtttccaccttgcagtgatgcagcttgaccctggaacggtcagacaacctcctcaaagtgggcataccagtttccacggggttgggttgccggtcagagcttaagaggactagcaccctgcaatgcccctcttcactctaaaatgtacactgactgctttagagcccttgataatagtcttattcccaccacatactaggcactccataaatatctgttgaaccttcatgaccttatcaactttacacccatatcccagcaaatgccactcatccccactcttcatagacacatttgttactctaaccctgcctaggcttcttgtagctccagctctttagagactcccggaacc

SEQ ID NO: 155461 - DNA, 575 bp, Homo sapiens
  Payload ID: 10561
  Gene Symbol: MPV17
  Gene Name: MpV17 mitochondrial inner membrane protein
  ENST ID: ENST00000428910
  CDS Start-End: 229-575
ggagggaggctcggcgctcaggaagcatggcactctggcgggcataccagcgggccctggccgctcacccgtggaaagtacaggtcctgacagctggcctcctggactgaaggacacgcttcctgctcctcactccaagaagccacttcttgcccctctgccttctgcgcatgaaactcaaaagccacaaaagaatattgctgtctgccatccccacgagggtccctgatgggcctgggtgacattatctcacagcagctggtggagaggcggggtctgcaggaacaccagagaggccggactctgaccatggtgtccctgggctgtggctttgtgggccctgtggtaggaggctggtacaaggttttggatcggttcatccctggcaccaccaaagtggatgcactgaagaagatgttgttggatcaggggggctttgccccgtgttttctaggctgctttctcccactggtaggggcacttaatggactgtcagcccaggacaactgggccaaactacagcgggattatcctgatgcccttatcaccaactactatctatggcctgctgtgca

SEQ ID NO: 155462 - DNA, 482 bp, Homo sapiens
  Payload ID: 10561
  Gene Symbol: MPV17
  Gene Name: MpV17 mitochondrial inner membrane protein
  ENST ID: ENST00000430991
  CDS Start-End: 1-365
ggtccctgatgggcctgggtgacattatctcacagcagctggtggagaggcggggtctgcaggaacaccagagaggccggactctgaccatggtgtccctgggctgtggctttgtgggccctgtggtaggaggctggtacaaggttttggatcggttcatccctggcaccaccaaagtggatgcactgaagaagatgttgttggatcaggattatcctgatgcccttatcaccaactactatctatggcctgctgtgcagttagccaacttctacctggtcccccttcattacaggttggccgttgtccaatgtgttgctgttatctggaactcctacctgtcctggaaggcacatcggctctaagcctgcctcactccatcgtttccaccttgcagtgatgcagcttgaccctggaacggtcagacaacctcctcaaagtgggcataccagtttccacggggttgggttgccggtcagagc

SEQ ID NO: 155463 - DNA, 5820 bp, Homo sapiens
  Payload ID: 10562
  Gene Symbol: MPV17L
  Gene Name: MPV17 mitochondrial membrane protein-like
  Uniprot ID: Q2QL34
  ENST ID: ENST00000287594
  CDS Start-End: 145-588
aatcgctccggagcttctggagggggcagatgcaggtgccggctgctgcagtgcagtagctgctggaggctggggaggcccggacccggtgcaggaagacgccgaccacgcgggctcctgatcgcgggcgcccacagcgcggacatggcgggctggtggccggcgttgtcgcgcgcggcccggcgccacccgtggcccaccaacgtgctgctttacggctcgctcgtctcggccggggacgcgctgcaacagcggctgcagggccgcgaggccaactggcgccagacgcggcgcgtggccacgttggtggtgaccttccacgccaacttcaactacgtgtggctgcgcctgctggagcgcgcgctcccgggccgagcgccgcacgccctgctggccaagttgctgtgcgaccaggtggtcggtgcgcccatcgcggtctcggccttctatgtcgagtggactgatgtactggccctttgtacagctgaccaacttcagccttgttcctgttcaatggagaacagcttacgctggagtctgtggttttctctgggccaccttcatctgtttttcccagcagagtggtgacggcacattcaagtcagctttcaccattttatatacaaaggggaccagtgccacagaagggtacccgaagaaatgagaagtcaaggactctcttaaagggaccacattttttacctaaaatgcacagaattgcctgcagacaaaatatttgatgtgccaattatgcacttcattttgaggaattactactatttatagacccactttttaaaaaattatcaatgattatttttgaattgtattcagacttttttcctgttctagtctgaaatattacttctctaatattttggttaatatgaataatagtggcaaaatggcattttagaattattaatatttctaatattttaacacaagtttcaggaaacttggttttgattgttcacatttctattctaaaatctcaggttatctcctgaacacttttgggcagatgaagttttataccaaaaaatagttcttagagtgaattttaatttacatagaactcaatcgaaatgaagatttaataaccagatttctttctccaaaacatacacaatttgttattttagtaaatacctttttttttttttttttttttgtggtggagtcttgctgtctccccggctggagcgcagtggcacgatcgcggctcactgcagcctccatcctctgggttcaagcaattctcctgcctcaggctcctgagtagctgggattacaggcacgtgacaccaggcccagctgatttttgtatttttgttcatttgcttttgtttttgacacagagtctcgctctgtcgcccaggctggaatgcagttgtgagatctcggctcactgcaagctccgcctcccgggttcacgccattctgcgtcagcctcccaagtagctgggactacaggcacctgccacgatgcctagctaattttttgtatttttagtagagatgaagtttcaccgtgttggccaggatggtcttgatctcctgaccgcataatccacccacctcggcctcccaaagtgctgggattacaggcgtgagccaccacaaccgacttttttttttttttttttttgagacagagactcgctctgtcacccaggctggagtgcagtggcatgatttcggctcactgcaacctctgtctcctgggttcaaacgatcctactgcctcatccttcggagtagctgggattacaggcaggtgccaccatgcctggctcatttttgtatttttagtagagagggcgttttgccatgttggctaggctggtctctgtccgtcctctgagctcaagctaagccatcatatcccagtgacctgcacatatacatccagatggcctgaagttactgaagatccacagaagtgaaaatagccttaactgatgacattgcaccattgtgatatgttactgccccaccctaactgatcaatgtactttgtaatcctcccacccttaagaaggttctttttaattctccccacccttgagaatgtactttgtgagatccacccctgcccgcaaaacattgctccaaactccaccacctatccccaaacctgtaagaactaatgataatccaccaccctttgctgactccttttttggactcagcccgcctgcactcaggtgaaataaacagccatgttgctcatacaaagcctgtttggtggcctcttcacacggacacgtgagacagtctccaactcctggcctcaactgatccactctcattggcctcccaaggtgctgggattataggcatgagccaccgcacctggctcagtaagtacattttttattatcaaaaacagagtagtgtatgattggcgtattctgtgtagaatgtattttattgatgtcttctatttttataatttttaatgaatgctttttagttttgggcagattcagttgactaaagcacctcatttcccagatacatgaaataaaatacttggtttcttttccaatttcacactgatgttattttgtgaaaatcagtgctttaagataaatatttatactttaaggtaaacatgagaaacttgatctaatatttaatatttattcagttctacactttattaacttctacaccagcagatttaaaaattatgtaactatctcaagaagtttcacttggacgtagtggttcacgcttgtaatcccagcactttgggaggctgaggtgggaggattgcttaaggcaaggagtttgagaccagcctgggcaatacagcaagatcccatctctattttaaagaaaagtttcactttgggaggccaaggcggttggatcacaaggtcaggagatcgagaccatcctggctaacatggtaaaaccccatctctactaaaaatacaaaaaattagccaggcgtggtggtgggcgcctgtagtcccagctactcgggaggctgaggcagacgaatggcatgaacccgggaggcagagattgcagtgagctgagattgtgccactgcactccagcctgggtgacagagtgagactccgtctcaaaaaaaaaaagtttcagtaaattccacctaagaattccaccagagttctgtcatctccaatgtcatgttccacagatttcaagttgtgaagccctgaactgttaatttatcctgagaatgtatatttaagcttaatttaagactatatacctaaaaattgagcatataatttgtataatttgtttatgtaagtttctgtaagtcataaatatgtagtttccaagtggataatttacctgaatgtaaaaggcattaatatattttacattattgggaccatagtacagaaatttctaaatggtttgtaaaataacttgttatttgctttgttgtaaaagtagttaatacaatggaaaaatggtttcgtaataagaagatacattttaacatcaaaacgtaggccgggcacagtggcttacgcctgtaatcccagcactttgggaggccgaggcgggcagatcacgaggtcaggagatcgagaccatcctggctaacatggtgaaacgccatctctactaaaaatacaaaaaattagctgggcatggtggcgggcgcctgtagtcccagctgctctggaggctgaggcaggagaattgcatgaacccgggaggcggagcttgcagtgagcagagatcaggccactgcactccagcctaggcgacagagcgagaatctgtctcaaaacaaacaaacaaacaaaaaactgtacccaagttaattataagtactacctggtgcaaaactttacagaagctgtggtatcacttttatgatagaagaatagtgtttgcattttgtataaaagtacttggggctgggcatgatcgcttatgtctataatccaagtgctttgggaggcgaaggcaggtggatcatctgagcccaggagtttgagaccagcctaggcaacatggcaagagcctgtctctccaaaacctacaaaaattagccaagcatggtggtgtgagcctgtagtcccagctacttggaagactcatgcaggaggatctctcgagctcaggaggcagaagatgaataaataaatggatgcaactgaatgagatgaggtctctcttgaaggagagagcaaaagagatttaaataataacaattataagaaggctgggcgcggtggctcatgcttgtaatcccagcactttgggaggccaaggcaggtggatcggttgaggtcaggagttcaagaccagcatggccaacacagtgaaaccccgtctctattaaaaatacaaaattaaccggacatggtagtgcgtcctgtagtctcagctactcaggtggctgagacaggagaatcgcttgaacctgggaggcataggttgtagtgagccgataaatataaaaagtattaaagtactaacagaagaaaatttccactgatcaccctttagctttaaataatgcagaagcatatgcccagtttacttgtaattaaaaatcatgcatcattcacaatttatcagtcttttttgtttgtacaaaaactaatataagttattctcttttatttgtattgtgattggtttgatgagagggaattaggccacttgagagtttgtgcgtgtttataattttctggctgggcccggtggctcatgcctgtaatcccagcactttgggaggccaaggcgggcggatcacttgagctcaggagtttgagaccaacttgggcaatgtggtgaaaccctatccctaccaaaaatacaaaaattagccgggtgtggtggcttgcacctgtcctcccagctacttgggggtgctgaggcaggaggatcactcaagcccaggaggtggaggttgcagtgagccgagatcacgccactgcactccaggaagggcaacagagcaagactgtgtctataaaaaaaaaaaaaaagaaagaaaagtaaattaactttggtatttcaggttgtatttatatggggacttcacatcaactatgttcactacaattgaccaagttaagtgtagacagtctctttaatagagagattatctggaactgcaattttttttttttttttgagacagagtttcgctttgtagcccaggttggagtgcagtgtcgcgatctcgcctcactgcaacctctgtctcccgggttcacgccattctcctgcctcagcccaagtagcagggactaaaggcgcccgccaccatgacccactaattttttttttttttggatttttagtagagtcggggtttcactgtgttagccaggatggtctcaacctcctgacctcgtgatctgcctgcctctgcctcccagagtgctgggattacaggtgtgagccaccgcgcccggcctggaactgcaatttctaactcatacatcattgctataaaccttatttgtttactgtttctcttccaaggacggtcagtcatcctttaaaattcatttgaagttatgaaaagatagtttttgttacatgggaaatttacttttagtacagtaaaatgttatgtgaatttctacagaatgtttgctagaatgaattatatctaggatatgcttaacaatatattctggaggcagctttcatttgaaattaggttcatcttctgagagtattaaaaagttaatgggtttttgtgcctgaagattttgatgttgcatttggctacatttaatccactttcacccataaggtttagcatctaaaaaaattaaatcactgctaatgcaattaaaa

SEQ ID NO: 155464 - DNA, 1037 bp, Homo sapiens
  Payload ID: 10562
  Gene Symbol: MPV17L
  Gene Name: MPV17 mitochondrial membrane protein-like
  Uniprot ID: Q2QL34
  ENST ID: ENST00000396385
  CDS Start-End: 120-710
gcagatgcaggtgccggctgctgcagtgcagtagctgctggaggctggggaggcccggacccggtgcaggaagacgccgaccacgcgggctcctgatcgcgggcgcccacagcgcggacatggcgggctggtggccggcgttgtcgcgcgcggcccggcgccacccgtggcccaccaacgtgctgctttacggctcgctcgtctcggccggggacgcgctgcaacagcggctgcagggccgcgaggccaactggcgccagacgcggcgcgtggccacgttggtggtgaccttccacgccaacttcaactacgtgtggctgcgcctgctggagcgcgcgctcccgggccgagcgccgcacgccctgctggccaagttgctgtgcgaccaggtggtcggtgcgcccatcgcggtctcggccttctatgtcggtatgagcattctccaaggaaaggatgacatatttttggacctgaaacagaaattctggaatacctatctgagtggactgatgtactggccctttgtacagctgaccaacttcagccttgttcctgttcaatggagaacagcttacgctggagtctgtggttttctctgggccaccttcatctgtttttcccagcagagtggtgacggcacattcaagtcagctttcaccattttatatacaaaggggaccagtgccacagaagggtacccgaagaaatgagaagtcaaggactctcttaaagggaccacattttttacctaaaatgcacagaattgcctgcagacaaaatatttgatgtgccaattatgcacttcattttgaggaattactactatttatagacccactttttaaaaaattatcaatgattatttttgaattgtattcagacttttttcctgttctagtctgaaatattacttctctaatattttggttaatatgaataatagtggcaaaatggcattttagaattattaatatttctaatattttaacacaagtttcaggaaacttggttttgattgttcacatttctattctaaa

SEQ ID NO: 155465 - DNA, 529 bp, Homo sapiens
  Payload ID: 10562
  Gene Symbol: MPV17L
  Gene Name: MPV17 mitochondrial membrane protein-like
  ENST ID: ENST00000564148
  CDS Start-End: 1-159
aactacgtgtggctgcgcctgctggagcgcgcgctcccgggccgagcgccgcacgccctgctggccaagttgctgtgcgaccaggtggtcggtgcgcccatcgcggtctcggccttctatgtcgggtctcactctattccccaggctgaagtgcagtgatgtgatcacagctcattgcagcctcgacctcctgggctcaagcgatcctcccacctctgcctctggagtagctgggactacaggtatgagcattctccaaggaaaggatgacatatttttggacctgaaacagaaattctggaatacctatctgagtggactgatgtactggccctttgtacagctgaccaacttcagccttgttcctgttcaatggagaacagcttacgctggagtctgtggttttctctgggccaccttcatctgtttttcccagcagagtggtgacggcacattcaagtcagctttcaccattttatatacaaaggggaccagtgccacagaagggtacccgaagaaatgagaagtc

SEQ ID NO: 155466 - DNA, 5822 bp, Homo sapiens
  Payload ID: 10562
  Gene Symbol: MPV17L
  Gene Name: MPV17 mitochondrial membrane protein-like
  Uniprot ID: Q2QL34
  ENST ID: ENST00000612041
  CDS Start-End: 145-588
aatcgctccggagcttctggagggggcagatgcaggtgccggctgctgcagtgcagtagctgctggaggctggggaggcccggacccggtgcaggaagacgccgaccacgcgggctcctgatcgcgggcgcccacagcgcggacatggcgggctggtggccggcgttgtcgcgcgcggcccggcgccacccgtggcccaccaacgtgctgctttacggctcgctcgtctcggccggggacgcgctgcaacagcggctgcagggccgcgaggccaactggcgccagacgcggcgcgtggccacgttggtggtgaccttccacgccaacttcaactacgtgtggctgcgcctgctggagcgcgcgctcccgggccgagcgccgcacgccctgctggccaagttgctgtgcgaccaggtggtcggtgcgcccatcgcggtctcggccttctatgtcgagtggactgatgtactggccctttgtacagctgaccaacttcagccttgttcctgttcaatggagaacagcttacgctggagtctgtggttttctctgggccaccttcatctgtttttcccagcagagtggtgacggcacattcaagtcagctttcaccattttatatacaaaggggaccagtgccacagaagggtacccgaagaaatgagaagtcaaggactctcttaaagggaccacattttttacctaaaatgcacagaattgcctgcagacaaaatatttgatgtgccaattatgcacttcattttgaggaattactactatttatagacccactttttaaaaaattatcaatgattatttttgaattgtattcagacttttttcctgttctagtctgaaatattacttctctaatattttggttaatatgaataatagtggcaaaatggcattttagaattattaatatttctaatattttaacacaagtttcaggaaacttggttttgattgttcacatttctattctaaaatctcaggttatctcctgaacacttttgggcagatgaagttttataccaaaaaatagttcttagagtgaattttaatttacatagaactcaatcgaaatgaagatttaataaccagatttctttctccaaaacatacacaatttgttattttagtaaataccttttttttttttttttttttttgtggtggagtcttgctgtctccccggctggagcgcagtggcacgatcgcggctcactgcagcctccatcctctgggttcaagcaattctcctgcctcaggctcctgagtagctgggattacaggcacgtgacaccaggcccagctgatttttgtatttttgttcatttgcttttgtttttgacacagagtctcgctctgtcgcccaggctggaatgcagttgtgagatctcggctcactgcaagctccgcctcccgggttcacgccattctgcgtcagcctcccaagtagctgggactacaggcacctgccacgatgcctagctaattttttgtatttttagtagagatgaagtttcaccgtgttggccaggatggtcttgatctcctgaccgcataatccacccacctcggcctcccaaagtgctgggattacaggcgtgagccaccacaaccgactttttttttttttttttttttgagacagagactcgctctgtcacccaggctggagtgcagtggcatgatttcggctcactgcaacctctgtctcctgggttcaaacgatcctactgcctcatccttcggagtagctgggattacaggcaggtgccaccatgcctggctcatttttgtatttttagtagagagggcgttttgccatgttggctaggctggtctctgtccgtcctctgagctcaagctaagccatcatatcccagtgacctgcacatatacatccagatggcctgaagttactgaagatccacagaagtgaaaatagccttaactgatgacattgcaccattgtgatatgttactgccccaccctaactgatcaatgtactttgtaatcctcccacccttaagaaggttctttttaattctccccacccttgagaatgtactttgtgagatccacccctgcccgcaaaacattgctccaaactccaccacctatccccaaacctgtaagaactaatgataatccaccaccctttgctgactccttttttggactcagcccgcctgcactcaggtgaaataaacagccatgttgctcatacaaagcccgtttggtggcctcttcacacggacacgtgagacagtctccaactcctggcctcaactgatccactctcattggcctcccaaggtgctgggattataggcatgagccaccgcacctggctcagtaagtacattttttattatcaaaaacagagtagtgtatgattggcgtattctgtgtagaatgtattttattgatgtcttctatttttataatttttaatgaatgctttttagttttgggcagattcagttgactaaagcacctcatttcccagatacatgaaataaaatacttggtttcttttccaatttcacactgatgttattttgtgaaaatcagtgctttaagataaatatttatactttaaggtaaacatgagaaacttgatctaatatttaatatttattcagttctacgctttattaacttctacaccagcagatttaaaaattatgtaactatctcaagaagtttcacttggacgtagtggttcacgcttgtaatcccagcactttgggaggctgaggtgggaggattgcttaaggcaaggagtttgagaccagcctgggcaatacagcaagatcccatctctattttaaagaaaagtttcactttgggaggccaaggcggttggatcacaaggtcaggagatcgagaccatcctggctaacatggtaaaaccccatctctactaaaaatacaaaaaattagccaggcgtggtggtgggcgcctgtagtcccagctactcgggaggctgaggcagacgaatggcatgaacccgggaggcagagattgcagtgagctgagattgtgccactgcactccagcctgggtgacagagtgagactccgtctcaaaaaaaaaaagtttcagtaaattccacctaagaattccaccagagttctgtcatctccaatgtcatgttccacagatttcaagttgtgaagccctgaactgttaatttatcctgagaatgtatatttaagcttaatttaagactatatacctaaaaattgagcatataatttgtataatttgtttatgtaagtttctgtaagtcataaatatgtagtttccaagtggataatttacctgaatgtaaaaggcattaatatattttacattattgggaccatagtacagaaatttctaaatggtttgtaaaataacttgttatttgctttgttgtaaaagtagttaatacaatggaaaaatggtttcgtaataagaagatacattttaacatcaaaacgtaggccgggcacagtggcttacgcctgtaatcccagcactttgggaggccgaggcgggcagatcacgaggtcaggagatcgagaccatcctggctaacatggtgaaacgccatctctactaaaaatacaaaaaattagctgggcatggtggcgggcgcctgtagtcccagctgctctggaggctgaggcaggagaattgcatgaacccgggaggcggagcttgcagtgagcagagatcaggccactgcactccagcctaggcgacagagcgagaatctgtctcaaaacaaacaaacaaacaaaaaactgtacccaagttaattataagtactacctggtgcaaaactttacagaagctgtggtatcacttttatgatagaagaatagtgtttgcattttgtataaaagtacttggggctgggcatgatcgcttatgtctataatccaagtgctttgggaggcgaaggcaggtggatcatctgagcccaggagtttgagaccagcctaggcaacatggcaagagcctgtctctccaaaacctacaaaaattagccaagcatggtggtgtgagcctgtagtcccagctacttggaagactcatgcaggaggatctctcgagctcaggaggcagaagatgaataaataaatggatgcaactgaatgagatgaggtctctcttgaaggagagagcaaaagagatttaaataataacaattataagaaggctgggcgcggtggctcatgcttgtaatcccagcactttgggaggccaaggcaggtggatcggttgaggtcaggagttcaagaccagcatggccaacacagtgaaaccccgtctctattaaaaatacaaaattaaccggacatggtagtgcgtcctgtagtctcagctactcaggtggctgagacaggagaatcgcttgaacctgggaggcataggttgtagtgagccgataaatataaaaagtattaaagtactaacagaagaaaatttccactgatcaccctttagctttaaataatgcagaagcatatgcccagtttacttgtaattaaaaatcatgcatcattcacaatttatcagtcttttttgtttgtacaaaaactaatataagttattctcttttatttgtattgtgattggtttgatgagagggaattaggccacttgagagtttgtgcgtgtttataattttctggctgggcccggtggctcatgcctgtaatcccagcactttgggaggccaaggcgggcggatcacttgagctcaggagtttgagaccaacttgggcaatgtggtgaaaccctatccctaccaaaaatacaaaaattagccgggtgtggtggcttgcacctgtcctcccagctacttgggggtgctgaggcaggaggatcactcaagcccaggaggtggaggttgcagtgagccgagatcacgccactgcactccaggaagggcaacagagcaagactgtgtctataaaaaaaaaaaaaagaaagaaaagtaaattaactttggtatttcaggttgtatttatatggggacttcacatcaactatgttcactacaattgaccaagttaagtgtagacagtctctttaatagagagattatctggaactgcaattttttttttttttttgagacagagtttcgctttgtagcccaggttggagtgcagtgtcgcgatctcgcctcactgcaacctctgtctcccgggttcacgccattctcctgcctcagcccaagtagcagggactaaaggcgcccgccaccatgacccactaatttttttttttttttggatttttagtagagtcggggtttcactgtgttagccaggatggtctcaacctcctgacctcgtgatctgcctgcctctgcctcccagagtgctgggattacaggtgtgagccaccgcgcccggcctggaactgcaatttctaactcatacatcattgctataaaccttatttgtttactgtttctcttccaaggacggtcagtcatcctttaaaattcatttgaagttatgaaaagatagtttttgttacatgggcaatttacttttagtacagtaaaatgttatgtgaatttctacagaatgtttgctagaatgaattatatctaggatatgcttaacaatatattctggaggcagctttcatttgaaattaggttcatcttctgagagtattaaaaagttaatgggtttttgtgcctgaagattttgatgttgcatttggctacatttaatccactttcacccataaggtttagcatctaaaaaaattaaatcactgctaatgcaattaaaa

SEQ ID NO: 155467 - DNA, 1037 bp, Homo sapiens; identical to SEQ ID NO: 155464
  Payload ID: 10562
  Gene Symbol: MPV17L
  Gene Name: MPV17 mitochondrial membrane protein-like
  Uniprot ID: Q2QL34
  ENST ID: ENST00000617552
  CDS Start-End: 120-710

SEQ ID NO: 155468 - DNA, 529 bp, Homo sapiens; identical to SEQ ID NO: 155465
  Payload ID: 10562
  Gene Symbol: MPV17L
  Gene Name: MPV17 mitochondrial membrane protein-like
  ENST ID: ENST00000633750
  CDS Start-End: 1-159

SEQ ID NO: 155469 - DNA, 1408 bp, Homo sapiens
  Payload ID: 10563
  Gene Symbol: MPV17L2
  Gene Name: MPV17 mitochondrial membrane protein-like 2
  Uniprot ID: Q567V2
  ENST ID: ENST00000599612
  CDS Start-End: 101-721
gggagccggaggggcgggcaatttgggatcgacagtgactcgcgactggtcggcgcggcgaaagcagagcggcgcgccggttccttggttcctgagggcgatggcgcggggtggctggcgccggctacgccgcctgttatccgcggggcagcttctattccagggccgcgcgctgctcgtcactaacacgctgggctgcggcgcgctcatggcggccggtgatggcgtgcgccagtcctgggagatccgcgcccggcccggccaggttttcgacccacggcgctccgcgagcatgtttgcggtgggctgcagcatgggtcccttcctgcactactggtacttgtcgctggaccgcctattccctgcgtctggcctccgaggcttcccaaatgtcctcaagaaggtcctcgtggatcagctggtagcctctccattgctgggcgtctggtacttcttgggccttggctgcctggagggtcagacagtgggtgagagctgccaggagctgcgggagaagttctgggaattctacaaggcagactggtgcgtgtggcctgctgcgcagttcgtgaacttcctcttcgtgcccccccaatttcgagtcacctacatcaacggcctgacgctgggctgggacacgtacctgtcctacttgaagtaccggagcccagttcctctgacacccccaggctgtgtggccctggacacccgagcagactgaactgtctgcttcctggaccagatgcaagactgtctcctggcggaccaccccctctgacagaaggggaatgggctcctgcagcaagctcgggtcttgagccacgtcccagcaccacttcagctccggagcattgggctgagccgccctttccaagctcacttctgggactgagtttcctcaaccggaacacacccatgaagatggatgatcatcccctagcccttctcagcaggaacctcatgcgacctgtgaccaagatgtcccatcctcagcacagggcccactctgccaaccagtctcaagcaccagcccctcaacactgccatccacctggctctgggccaagccaccaatccagagctccctcaggtcctgggactaaggcggggacatgactgatcccctcagagcaggctcaggcctggagtcggcccccaaaagtttcacatagggccaggcagcctctgtgtttctttccctggtcctgaactgtggaaatgccattaaactctctctataatgtaactgaaactgctggctgggcgcagtggctcccacctgtaatctcagcccttcccgaggctgaggtggaaggattgctcgaggccaggtgttcgagaccagcctgggcaacatagcaagaccctgtctctatttatattgaaaaataaaaataacaaaagaaaa

SEQ ID NO: 155470 - DNA, 6897 bp, Homo sapiens
  Payload ID: 10564
  Gene Symbol: MRE11A
  Gene Name: MRE11 homolog A, double strand break repair nuclease
  Uniprot ID: P49959
  ENST ID: ENST00000323929
  CDS Start-End: 224-2350
agccaatgagagccgaactggacttgaagcatctacgttatccatgaagtgtcgcgagagaaacggacgccgttctctcccgcggaattcaggtttacggccctgcgggttctcagagaatttctagaatttggaatcgagtgcattttctgacatttgagtacagtacccaggggttcttggagaagaacctggtcccagaggagcttgactgaccataaaaatgagtactgcagatgcacttgatgatgaaaacacatttaaaatattagttgcaacagatattcatcttggatttatggagaaagatgcagtcagaggaaatgatacgtttgtaacactcgatgaaattttaagacttgcccaggaaaatgaagtggattttattttgttaggtggtgatctttttcatgaaaataagccctcaaggaaaacattacatacctgcctcgagttattaagaaaatattgtatgggtgatcggcctgtccagtttgaaattctcagtgatcagtcagtcaactttggttttagtaagtttccatgggtgaactatcaagatggcaacctcaacatttcaattccagtgtttagtattcatggcaatcatgacgatcccacaggggcagatgcactttgtgccttggacattttaagttgtgctggatttgtaaatcactttggacgttcaatgtctgtggagaagatagacattagtccggttttgcttcaaaaaggaagcacaaagattgcgctatatggtttaggatccattccagatgaaaggctctatcgaatgtttgtcaataaaaaagtaacaatgttgagaccaaaggaagatgagaactcttggtttaacttatttgtgattcatcagaacaggagtaaacatggaagtactaacttcattccagaacaatttttggatgacttcattgatcttgttatctggggccatgaacatgagtgtaaaatagctccaaccaaaaatgaacaacagctgttttatatctcacaacctggaagctcagtggttacttctctttccccaggagaagctgtaaagaaacatgttggtttgctgcgtattaaagggaggaagatgaatatgcataaaattcctcttcacacagtgcggcagtttttcatggaggatattgttctagctaatcatccagacatttttaacccagataatcctaaagtaacccaagccatacaaagcttctgtttggagaagattgaagaaatgcttgaaaatgctgaacgggaacgtctgggtaattctcaccagccagagaagcctcttgtacgactgcgagtggactatagtggaggttttgaacctttcagtgttcttcgctttagccagaaatttgtggatcgggtagctaatccaaaagacattatccattttttcaggcatagagaacaaaaggaaaaaacaggagaagagatcaactttgggaaacttatcacaaagccttcagaaggaacaactttaagggtagaagatcttgtaaaacagtactttcaaaccgcagagaagaatgtgcagctctcactgctaacagaaagagggatgggtgaagcagtacaagaatttgtggacaaggaggagaaagatgccattgaggaattagtgaaataccagttggaaaaaacacagcgatttcttaaagaacgtcatattgatgccctcgaagacaaaatcgatgaggaggtacgtcgtttcagagaaaccagacaaaaaaatactaatgaagaagatgatgaagtccgtgaggctatgaccagggccagagcactcagatctcagtcagaggagtctgcttctgcctttagtgctgatgaccttatgagtatagatttagcagaacagatggctaatgactctgatgatagcatctcagcagcaaccaacaaaggaagaggccgaggaagaggtcgaagaggtggaagagggcagaattcagcatcgagaggagggtctcaaagaggaagagcagacactggtctggagacttctacccgtagcaggaactcaaagactgctgtgtcagcatctagaaatatgtctattatagatgcctttaaatctacaagacagcagccttcccgaaatgtcactactaagaattattcagaggtgattgaggtagatgaatcagatgtggaagaagacatttttcctaccacttcaaagacagatcaaaggtggtccagcacatcatccagcaaaatcatgtcccagagtcaagtatcgaaaggggttgattttgaatcaagtgaggatgatgatgatgatccttttatgaacactagttctttaagaagaaatagaagataatatatttaatggcactgagaaacatgcaagatacaggaaaaatgaaaatgttacaagctaagagtttacagtttaagattttaagtattgtttcctgagcataactccataagtaagaaatttctagttcacagacatacaatagcattgattcaccttgtttttttaacctggttgttgtagtaagagctttgtttcaatatcactcttgagtaaagattaaaataaagctaccattttacatttctatttcataatgaaaaactatgtcagtattttaatatggttacatttagccaaagttgagggaaagagcttataaaatttaacttcttcataattttagtaatttcctagaggttctgggttttctgaaagtaaaacaatttatgcgaacctatgtctaaattcactgtttgttactatgtatgtttttttccaatgcttcttataagactaaatgattagaagtacctaatagtttgaacagatatgtttttatttaaaagagtagaataacctttcagaattactgagttttttattccagttgtagcaaagatttcaaaagattgtgttcccattaagtggtagtaatttcctttattattctgtatccttaatggtgttctctctctctctctctctctctctctctccctctcccccccgttccccactcttcctttctcctttgctttttcttctctttcatacatatatgcgtgcctagttctaggaggaaacgggttaaaaattgttttaaactacatcttgaaaatattgaagaatttgttttaggtagagtggtcagttgaaccttacagtaaagtatagaaatatatttaatgtggaatgtcaatgccaggatttctcattaacaatattttatctcaactttggttcctgtgatacatttctgaatgggcaattccagaaatcttagtagcccatgttaagcttctattttttacttgttttcggggagaaataagaattagacatcttcagatttaagttaaataatcccattctttataatcctctgtaaaaagatccctgagattattccttcttctagttttatgcgacagctttactttaaaattcaagttatacatcttgggagtacaatggcccgacatttcttcataggtagaaacaaatacttgactcagtgatactcatgaccattagaatagtcatacctggaatgtgtcaaattataagagacagacacttggttagtggctgcctcatatagcacttttgaagaggcctaagtcaaaacttgcaatataacattctattgactttcttaaaaatattttttctgtacctaacttgagcataagggttatttgagcaagtaacattaactcagtggaaggcattgtcctgtgaaatattcttaggcagatctgcccacatctttattgaacttgaaatctaatatttctagtatttgaacaaagcagaaggttaagtcagggaagagcagtgctgtccatgatgtaatggaagctaccaggggaggcagtgtctggatgatgctgtgctacctacccctgcacaagccatgctggctcagtctgagctgtgggccacatcagctagtggctcttctcatgcatcagttaggtgggtctgggtgagagttatagtgagggaatggtcactaaagtatcctgacaagttcctaggaaaaaaggaataaagtttttttccttaaaaaaaaaaaaattgctcttggctgtgaaaagaggtactaaatgcgattcagttcaccgctaaggaaagtgatgacatagcagttacagagggtgataaatctctccagctaattcaggtcattttgtgaatactatgtatcaagccctgaaaatatggtaaataaaacgtgacagggaaacctttttttgattgaatattgttacatagttaaatgtgctatatatccttaatattttatattgatcctgcaaaatctgttggttttaggggagttttgttttttgtttctaacaattttcagacctgttggtataggaatgtagaagtctttcagatgatttgaaagcagctgcatttgctcttggaggctttgggagagcaggaatgaaaacattcagaggaagacatctgtagggaattcttctgttacttaccaaagaataagtgtctttctggtgttttatttcctatcataaaaatacaacagtgcatttacaaggttaaagattcctcgaagttctaggaaattcttgaaaatataagtggtgcttagaaaattcaagcatttaggaatgtgacctttaattcaggtatgtaaaagacttttttcccaaacttttaaaagtaggaaatacaataaatacagaaaagtcatatggttgaataaataattataaattgagcactgatggaatccctctacaggtcaagaaatagcgcagtgtcctggatgcccattatattgttttctcctttctgggtaacaagccctaacttctgtaatttaaaagctcctacttttgccacaaggtggtgcttctgccattagacgcagttaggaggatgcaactgcaaatctaaaattacgaagttagtgtagttgcaataaacttagaacatatgcattaatactaaacctatgcagtaataccataattagccttctaatcatgtaatttgctttacttaggtatttcatttggttcagcctgttatggaatttaccagcttgataaatttgcctataaagttttataaagaaaaggaatattttgttttcataaagaggaaaatccattcttagaaaaaaactgagtaaaaaagtatctcaatgggctgggtgcagtggctcatgcctttaatcccagcactttgggaggccgaggagggggttcacctgaggtcaggagtttgagaccagcctggccaacatggtgaaacctcgtctctactaaaaatacaaaagattagctgggcatggtggtgtgtgcctgtaatcttagctactcaggaggctgaggcaggagaatcgcttgaacccaggaggcagaggttgcagtgagccgagattgtgccattgcactgcagcctgggcaacaagagtgaaactcaatctcaaaaaaaaaaaaagtatctaaatgtaaaatatcttttttggaaatatagaatttaaaagcgactttcccccaaagaaatctgatgtcctttttgtatctgtcataaatttaattcatagtattttgggttttttttgttttttttttttgagacggagtctcgcactcttgcccaggctggagggcaggggcaccatttcggctcactgcaagctccacgccattctcctgcctcagcctcccaagtagctgggactacaggcgcccaccaccacgcctggctaatttttttttttttttttttgtatttttagtagagacagggtttttctgtgttagccaggatggtctcgatctcctgaccttgtgatccacccacctcagcctcccaaagtgctgggattacaggcctgagccaccacgcccagcctattttgtgtttttttaaagctaactaccattaagatcattatagaagtttggtataatgaagatttgggtttttcagtccaatgagtttccatattcttgaatgaaaaagatccacatttcatcatttgcctgtttcattttcttttagtacttttgaacttagtttggtcagaaaatactagaattttagtttgatctaaagaaccagcttatataacttgctgttgccatgtacatttgtatgtctttgctgtgtcaaataactggatctgattttagctctttttaagtggtgaaagcaatgcatttttattcttcaaattcagacattgaatgtgtattaaaatgtgtgtgcttacctttaatcctctccccaccgacaattaggaacacgtttctccaattactgttggcaagactaccaagaaaaattgttgaattagaatcccagcaccgggcacggtggctcacgcctgtgatcctagcactttgggaggccaaagcaggcggatcacctgaggtcaggagttcgagaccagcagggccaacatggcgaaaccccgactctactaaaaatacaaaaattagccaggcatggtggtgggcgcctgtaatcccaactactcaggaggctgaggcaggagaattgcttgaacctgggagttggaggtcacggtgagctgatatcacgccattgcactccagcctgggcaacagagcaagactctgtctcaatcaatctatccatcaatcgataagaaccccagattgtatagctacatgttttagcccccttttcaaagtatatgttctccttggtacttattttgacattctgacttttctacatatgctttatcaacctcttaattaaaccatcattgtctattttgagagataactgcgctgcttcccgttgtgtgttttaaatgttattgttcagtttgagtcaaataaaaggatatttaatctgtggtgccttga

SEQ ID NO: 155471 - DNA, 2588 bp, Homo sapiens
  Payload ID: 10564
  Gene Symbol: MRE11A
  Gene Name: MRE11 homolog A, double strand break repair nuclease
  Uniprot ID: P49959
  ENST ID: ENST00000323977
  CDS Start-End: 297-2339
acgttatccatgaagtgtcgcgagagaaacggacgccgttctctcccgcggaattcaggtttacggccctgcgggttctcagaggcaagttcagaccgtgttgttttcttttcacggatcctgccctttcttcccgaaaagaagacagccttgggtcgcgattgtggggcttcgaagagtccagcagtgggaatttctagaatttggaatcgagtgcattttctgacatttgagtacagtacccaggggttcttggagaagaacctggtcccagaggagcttgactgaccataaaaatgagtactgcagatgcacttgatgatgaaaacacatttaaaatattagttgcaacagatattcatcttggatttatggagaaagatgcagtcagaggaaatgatacgtttgtaacactcgatgaaattttaagacttgcccaggaaaatgaagtggattttattttgttaggtggtgatctttttcatgaaaataagccctcaaggaaaacattacatacctgcctcgagttattaagaaaatattgtatgggtgatcggcctgtccagtttgaaattctcagtgatcagtcagtcaactttggttttagtaagtttccatgggtgaactatcaagatggcaacctcaacatttcaattccagtgtttagtattcatggcaatcatgacgatcccacaggggcagatgcactttgtgccttggacattttaagttgtgctggatttgtaaatcactttggacgttcaatgtctgtggagaagatagacattagtccggttttgcttcaaaaaggaagcacaaagattgcgctatatggtttaggatccattccagatgaaaggctctatcgaatgtttgtcaataaaaaagtaacaatgttgagaccaaaggaagatgagaactcttggtttaacttatttgtgattcatcagaacaggagtaaacatggaagtactaacttcattccagaacaatttttggatgacttcattgatcttgttatctggggccatgaacatgagtgtaaaatagctccaaccaaaaatgaacaacagctgttttatatctcacaacctggaagctcagtggttacttctctttccccaggagaagctgtaaagaaacatgttggtttgctgcgtattaaagggaggaagatgaatatgcataaaattcctcttcacacagtgcggcagtttttcatggaggatattgttctagctaatcatccagacatttttaacccagataatcctaaagtaacccaagccatacaaagcttctgtttggagaagattgaagaaatgcttgaaaatgctgaacgggaacgtctgggtaattctcaccagccagagaagcctcttgtacgactgcgagtggactatagtggaggttttgaacctttcagtgttcttcgctttagccagaaatttgtggatcgggtagctaatccaaaagacattatccattttttcaggcatagagaacaaaaggaaaaaacaggagaagagatcaactttgggaaacttatcacaaagccttcagaaggaacaactttaagggtagaagatcttgtaaaacagtactttcaaaccgcagagaagaatgtgcagctctcactgctaacagaaagagggatgggtgaagcagtacaagaatttgtggacaaggaggagaaagatgccattgaggaattagtgaaataccagttggaaaaaacacagcgatttcttaaagaacgtcatattgatgccctcgaagacaaaatcgatgaggaggtacgtcgtttcagagaaaccagacaaaaaaatactaatgaagaagatgatgaagtccgtgaggctatgaccagggccagagcactcagatctcagtcagaggagtctgcttctgcctttagtgctgatgaccttatgagtatagatttagcagaacagatggctaatgactctgatgatagcatctcagcagcaaccaacaaaggaagaggccgaggaagaggtcgaagaggtggaagagggcagaattcagcatcgagaggagggtctcaaagaggaagagcctttaaatctacaagacagcagccttcccgaaatgtcactactaagaattattcagaggtgattgaggtagatgaatcagatgtggaagaagacatttttcctaccacttcaaagacagatcaaaggtggtccagcacatcatccagcaaaatcatgtcccagagtcaagtatcgaaaggggttgattttgaatcaagtgaggatgatgatgatgatccttttatgaacactagttctttaagaagaaatagaagataatatatttaatggcactgagaaacatgcaagatacaggaaaaatgaaaatgttacaagctaagagtttacagtttaagattttaagtattgtttcctgagcataactccataagtaagaaatttctagttcacagacatacaatagcattgattcaccttgtttttttaacctggttgttgtagtaagagctttgtttcaatatcactcttgagtaaagattaaaataaagctaccattttacatttcta

SEQ ID NO: 155472 - DNA, 2604 bp, Homo sapiens
  Payload ID: 10564
  Gene Symbol: MRE11A
  Gene Name: MRE11 homolog A, double strand break repair nuclease
  ENST ID: ENST00000393241
  CDS Start-End: 234-2357
aaacggacgccgttctctcccgcggaattcaggtttacggccctgcgggttctcagaggcaagttcagaccgtgttgttttcttttcacggatcctgccctttcttcccgaaaagaagacagccttggaatttctagaatttggaatcgagtgcattttctgacatttgagtacagtacccaggggttcttggagaagaacctggtcccagaggagcttgactgaccataaaaatgagtactgcagatgcacttgatgatgaaaacacatttaaaatattagttgcaacagatattcatcttggatttatggagaaagatgcagtcagaggaaatgatacgtttgtaacactcgatgaaattttaagacttgcccaggaaaatgaagtggattttattttgttaggtggtgatctttttcatgaaaataagccctcaaggaaaacattacatacctgcctcgagttattaagaaaatattgtatgggtgatcggcctgtccagtttgaaattctcagtgatcagtcagtcaactttggttttagtaagtttccatgggtgaactatcaagatggcaacctcaacatttcaattccagtgtttagtattcatggcaatcatgacgatcccacaggggcagatgcactttgtgccttggacattttaagttgtgctggatttgtaaatcactttggacgttcaatgtctgtggagaagatagacattagtccggttttgcttcaaaaaggaagcacaaagattgcgctatatggtttaggatccattccagatgaaaggctctatcgaatgtttgtcaataaaaaagtaacaatgttgagaccaaaggaagatgagaactcttggtttaacttatttgtgattcatcagaacaggagtaaacatggaagtactaacttcattccagaacaatttttggatgacttcattgatcttgttatctggggccatgaacatgagtgtaaaatagctccaaccaaaaatgaacaacagctgttttatatctcacaacctggaagctcagtggttacttctctttccccaggagaagctgtaaagaaacatgttggtttgctgcgtattaaagggaggaagatgaatatgcataaaattcctcttcacacagtgcggcagtttttcatggaggatattgttctagctaatcatccagacatttttaacccagataatcctaaagtaacccaagccatacaaagcttctgtttggagaagattgaagaaatgcttgaaaatgctgaacgggaacgtctgggtaattctcaccagccagagaagcctcttgtacgactgcgagtggactatagtggaggttttgaacctttcagtgttcttcgctttagccagaaatttgtggatcgggtagctaatccaaaagacattatccattttttcaggcatagagaacaaaaggaaaaaacaggagaagagatcaactttgggaaacttatcacaaagccttcagaaggaacaactttaagggtagaagatcttgtaaaacagtactttcaaaccgcagagaagaatgtgcagctctcactgctaacagaaagagggatgggtgaagcagtacaagaatttgtggacaaggaggagaaagatgccattgaggaattagtgaaataccagttggaaaaaacacagcgatttcttaaagaacgtcatattgatgccctcgaagacaaaatcgatgaggaggtacgtcgtttcagagaaaccagacaaaaaaatactaatgaagaagatgatgaagtccgtgaggctatgaccagggccagagcactcagatctcagtcagaggagtctgcttctgcctttagtgctgatgaccttatgagtatagatttagcagaacagatggctaatgactctgatgatagcatctcagcagcaaccaacaaaggaagaggccgaggaagaggtcgaagaggtggaagagggcagaattcagcatcgagaggagggtctcaaagaggaagagacactggtctggagacttctacccgtagcaggaactcaaagactgctgtgtcagcatctagaaatatgtctattatagatgcctttaaatctacaagacagcagccttcccgaaatgtcactactaagaattattcagaggtgattgaggtagatgaatcagatgtggaagaagacatttttcctaccacttcaaagacagatcaaaggtggtccagcacatcatccagcaaaatcatgtcccagagtcaagtatcgaaaggggttgattttgaatcaagtgaggatgatgatgatgatccttttatgaacactagttctttaagaagaaatagaagataatatatttaatggcactgagaaacatgcaagatacaggaaaaatgaaaatgttacaagctaagagtttacagtttaagattttaagtattgtttcctgagcataactccataagtaagaaatttctagttcacagacatacaatagcattgattcaccttgtttttttaacctggttgttgtagtaagagctttgtttcaatatcactcttgagtaaagattaaaataaagctaccattttacatttc

SEQ ID NO: 155473 - DNA, 2684 bp, Homo sapiens
  Payload ID: 10564
  Gene Symbol: MRE11A
  Gene Name: MRE11 homolog A, double strand break repair nuclease
  Uniprot ID: P49959
  ENST ID: ENST00000407439
  CDS Start-End: 290-2425
gacgccgttctctcccgcggaattcaggtttacggccctgcgggttctcagagaatttctagaatttggaatcgagtgcattttctgacatttgagtacagtacccaggggttcttggagaagaacctggtcccagaggagcttgactgaccataaaaatgagtactgcagatgcactgtaagcacctgacttctggaatcccttgttatttggggtttctaaagctcgtcaactgtgatcacagtaaaagaaaacttatttaataagcagtaaataaggaacctgtttatgaacagaaatattagtcatcaaaaaggtgatgatgaaaacacatttaaaatattagttgcaacagatattcatcttggatttatggagaaagatgcagtcagaggaaatgatacgtttgtaacactcgatgaaattttaagacttgcccaggaaaatgaagtggattttattttgttaggtggtgatctttttcatgaaaataagccctcaaggaaaacattacatacctgcctcgagttattaagaaaatattgtatgggtgatcggcctgtccagtttgaaattctcagtgatcagtcagtcaactttggttttagtaagtttccatgggtgaactatcaagatggcaacctcaacatttcaattccagtgtttagtattcatggcaatcatgacgatcccacaggggcagatgcactttgtgccttggacattttaagttgtgctggatttgtaaatcactttggacgttcaatgtctgtggagaagatagacattagtccggttttgcttcaaaaaggaagcacaaagattgcgctatatggtttaggatccattccagatgaaaggctctatcgaatgtttgtcaataaaaaagtaacaatgttgagaccaaaggaagatgagaactcttggtttaacttatttgtgattcatcagaacaggagtaaacatggaagtactaacttcattccagaacaatttttggatgacttcattgatcttgttatctggggccatgaacatgagtgtaaaatagctccaaccaaaaatgaacaacagctgttttatatctcacaacctggaagctcagtggttacttctctttccccaggagaagctgtaaagaaacatgttggtttgctgcgtattaaagggaggaagatgaatatgcataaaattcctcttcacacagtgcggcagtttttcatggaggatattgttctagctaatcatccagacatttttaacccagataatcctaaagtaacccaagccatacaaagcttctgtttggagaagattgaagaaatgcttgaaaatgctgaacgggaacgtctgggtaattctcaccagccagagaagcctcttgtacgactgcgagtggactatagtggaggttttgaacctttcagtgttcttcgctttagccagaaatttgtggatcgggtagctaatccaaaagacattatccattttttcaggcatagagaacaaaaggaaaaaacaggagaagagatcaactttgggaaacttatcacaaagccttcagaaggaacaactttaagggtagaagatcttgtaaaacagtactttcaaaccgcagagaagaatgtgcagctctcactgctaacagaaagagggatgggtgaagcagtacaagaatttgtggacaaggaggagaaagatgccattgaggaattagtgaaataccagttggaaaaaacacagcgatttcttaaagaacgtcatattgatgccctcgaagacaaaatcgatgaggaggtacgtcgtttcagagaaaccagacaaaaaaatactaatgaagaagatgatgaagtccgtgaggctatgaccagggccagagcactcagatctcagtcagaggagtctgcttctgcctttagtgctgatgaccttatgagtatagatttagcagaacagatggctaatgactctgatgatagcatctcagcagcaaccaacaaaggaagaggccgaggaagaggtcgaagaggtggaagagggcagaattcagcatcgagaggagggtctcaaagaggaagagcagacactggtctggagacttctacccgtagcaggaactcaaagactgctgtgtcagcatctagaaatatgtctattatagatgcctttaaatctacaagacagcagccttcccgaaatgtcactactaagaattattcagaggtgattgaggtagatgaatcagatgtggaagaagacatttttcctaccacttcaaagacagatcaaaggtggtccagcacatcatccagcaaaatcatgtcccagagtcaagtatcgaaaggggttgattttgaatcaagtgaggatgatgatgatgatccttttatgaacactagttctttaagaagaaatagaagataatatatttaatggcactgagaaacatgcaagatacaggaaaaatgaaaatgttacaagctaagagtttacagtttaagattttaagtattgtttcctgagcataactccataagtaagaaatttctagttcacagacatacaatagcattgattcaccttgtttttttaacctggttgttgtagtaagagctttgtttcaatatcactcttgagtaaagattaaaataaagctaccattttacatttctatttcataatg

SEQ ID NO: 155474 - DNA, 572 bp, Homo sapiens
  Payload ID: 10564
  Gene Symbol: MRE11A
  Gene Name: MRE11 homolog A, double strand break repair nuclease
  ENST ID: ENST00000536754
  CDS Start-End: 192-572
ttgaagcatctacgttatccatgaagtgtcgcgagagaaacggacgccgttctctcccgcggaattcaggtttacggccctgcgggttctcagagaatttggaatcgagtgcattttctgacatttgagtacagtacccaggggttcttggagaagaacctggtcccagaggagcttgactgaccataaaaatgagtactgcagatgcacttgatgatgaaaacacatttaaaatattagttgcaacagatattcatcttggatttatggagaaagatgcagtcagaggaaatgatacgtttgtaacactcgatgaaattttaagacttgcccaggaaaatgaagtggattttattttgttaggtggtgatctttttcatgaaaataagccctcaaggaaaacattacatacctgcctcgagttattaagaaaatattgtatgggtgatcggcctgtccagtttgaaattctcagtgatcagtcagtcaactttggttttagtaagtttccatgggtgaactatcaagatggcaacctcaacatttcaattccagtgtttagtattcatggc

SEQ ID NO: 155475 - DNA, 1212 bp, Homo sapiens
  Payload ID: 10564
  Gene Symbol: MRE11A
  Gene Name: MRE11 homolog A, double strand break repair nuclease
  ENST ID: ENST00000540013
  CDS Start-End: 150-815
ctctcccgcggaattcaggtttacggccctgcgggttctcagagaatttctagaatttggaatcgagtgcattttctgacatttgagtacagtacccaggggttcttggagaagaacctggtcccagaggagcttgactgaccataaaaatgagtactgcagatgcacttgatgatgaaaacacatttaaaatattagttgcaacagatattcatcttggatttatggagaaagatgcagtcagaggaaatgatacgtttgtaacactcgatgaaattttaagacttgcccaggaaaatgaagtggattttattttgttaggtggtgatctttttcatgaaaataagccctcaaggaaaacattacatacctgcctcgagttattaagaaaatattgtatgggtgatcggcctgtccagtttgaaattctcagtgatcagtcagtcaactttggttttagtaagtttccatgggtgaactatcaagatggcaacctcaacatttcaattccagtgtttagtattcatggcaatcatgacgatcccacaggggcagatgcactttgtgccttggacattttaagttgtgctggatttgtaaatcactttggacgttcaatgtctgtggagaagatagacattagtccggttttgcttcaaaaaggaagcacaaagattgcgctatatggtttaggatccattccagatgaaaggctctatcgaatgtttgtcaataaaaaagtaacaatgttgagaccaaaggaagatgagaactcttggtttaacttatttgtgattcatcagaacagggtataggattgattgaaaagaagacagacttgaagaagcaagatttattatctgatcactgcagtaaaaatgtgaggtggtgacagtgatggcaatgaaacagaaatgggagggacacaccggagaagttgtcagggaagaactcaaaggatttggggcctgattatataatttattacagttgtcccttggtatccacggggggtgttcggtccaggacctaaaatcctgggatgctgaaatcccttgaataaaatggtatagcatttgcatataacctacatatatcctcctatgtactttaaatcatctctagattacttgtaatacctgatacaatgtaaatactgtttaaatagttgttatactgtattgctttaaaaatttatatttttcgttgtta

SEQ ID NO: 155476 - DNA, 558 bp, Homo sapiens
  Payload ID: 10564
  Gene Symbol: MRE11A
  Gene Name: MRE11 homolog A, double strand break repair nuclease
  ENST ID: ENST00000538923
  CDS Start-End: 226-558
acggccctgcgggttctcagaggcaagttcagaccgtgttgttttcttttcacggatcctgccctttcttcccgaaaagaagacagccttgggtcgcgattgtggggcttcgaagagtccagcagtgggaatttggaatcgagtgcattttctgacatttgagtacagtacccaggggttcttggagaagaacctggtcccagaggagcttgactgaccataaaaatgagtactgcagatgcacttgatgatgaaaacacatttaaaatattagttgcaacagatattcatcttggatttatggagaaagatgcagtcagaggaaatgatacgtttgtaacactcgatgaaattttaagacttgcccaggaaaatgaagtggattttattttgttaggtggtgatctttttcatgaaaataagccctcaaggaaaacattacatacctgcctcgagttattaagaaaatattgtatgggtgatcggcctgtccagtttgaaattctcagtgatcagtcagtcaactttggttttagtaagtttccatgggtgaactat

SEQ ID NO: 155477 - DNA, 2781 bp, Homo sapiens
  Payload ID: 10565
  Gene Symbol: MRGBP
  Gene Name: MRG/MORF4L binding protein
  Uniprot ID: Q9NV56
  ENST ID: ENST00000370487
  CDS Start-End: 72-686
agtgcgcctgcgcggagctcgtggccgcgcctgctcccgccgggggctccttgctcggccgggccgcggccatgggagaggccgaggtgggcggcgggggcgccgcaggcgacaagggcccgggggaggcggccaccagcccggcggaggagacagtggtgtggagccccgaggtggaggtgtgcctcttccacgccatgctgggccacaagcccgtcggtgtgaaccgacacttccacatgatttgtattcgggacaagttcagccagaacatcgggcggcaggtcccatccaaggtcatctgggaccatctgagcaccatgtacgacatgcaggcgctgcatgagtctgagattcttccattcccgaatccagagaggaacttcgtccttccagaagagatcattcaggaggtccgagaaggaaaagtgatgatagaagaggagatgaaagaggagatgaaggaagacgtggacccccacaatggggctgacgatgttttttcatcttcagggagtttggggaaagcatcagaaaaatccagcaaagacaaagagaagaactcctcagacttggggtgcaaagaaggcgcagacaagcggaagcgcagccgggtcaccgacaaagtcctgaccgcaaacagcaacccttccagtcccagtgctgccaagcggcgccgcacgtagaccctcagccctggtggcggcagagaagcgggcgaggcactgtggtcgctgagggggttggctgggtctgagtgccaccccccaggccacagtgataccatcccagtgccatgagcccacactgcccgccctcaggctctcaggtgaacgtggccgtcagcggggaaacgtgtgtgtcagttggaccatgtgggaccctgatggacctgaaagaccaggatcggtccagctcagatattgagggctctgaagcctagttctgtcttctctggagcagctgtggcttccccgtggctgcttggtgacatggattagcgctacgtgggctgcagcatttgggatccaggctacctagaggggcatcgggccagggaaaacctcggattagcaagcaataaaaacatgacctcactcttcctcaaaggagcccctggtcttccctgtgtgactcagttctttccatctgtttgtcccgctgcaagcctctttctgcgctgactgtgacattggaacgtggccttcctgtcaccccctccgtgccacgcactgaaggccacccccacccacctgggaaactaagaactggatattttgcctcattcacttgtactgtaacaatgtatataatttggttggtatttcactatttaatttttaagaagcctattttactagtgttttatatgaacaaagtactgcagaagttaaacctgtgttgtattttttctgagatgttttgctttaagagatactttttgctcagtttttatatgccagatacagagaatttgtagcggttatttttgtatgatctagtaacttgcaaacagaccaaatggatgagaggcggggaccgtgcagctgtcggctgatgaggaggcggccgccccagtgctgatggagatgccactttcgtgtgactgcgaacattaaagcacaaaaaaatccaacctggagttgtgtgattttgataccaaagtaagttcacttttcctccaaaaggaagtttttatttttccaagatttataactaaagcatacacttagatgacttattaacattcacttgatacaacatataaacaaaatagtaacagattctgagtggttattttgtggactgtgacaagcacttcaaatacaaaatgttaggagggcaaaacggtgcgggccctcgtaggtcaggcaggcaccagtgggctccttcctgctgaaagctgcggctgtgagatgagaccgctggctgggtcacagagtgaaatccagcgttccgtgtgcggacgaggagacaagctgtcctggccagccatcgcaccccaatgtcttcagcttgacgttgcttctctgccagtggagcctcctccaccacctgggaacatccctggccatctgtccctgaagtcctcctcaccatgacgcagatcacaaggcacccactaaaggggcaaagccaggaatcccgtgccatgtgatcgccccgtgtggcacctgccactcgtctgcaccaaacgcactgccagttctggggaagaacagcccagggaagctgctggtctacggcctgcctgagctgtattccaagggtagagcagctgcctggggggaccctgtgggtcccttttctatagagccgggacaaatccacagccctgcagtaacagcctgccacaaagagcaggcatctggagggccccacacacatagaccaaaggactgagcccgcctggcattcctccactcacagcacaaatactcagccctgcagccagggaagggtggggtctccctttgctgcccaagtgtgcccccttgcccgtctgatctctcctgttaggtcagcctcattcagggctttgtgccaggtcctgtcctggagtctcagtccgggacagcagcctggctcttaggcagtccagaagcagcagggcaaaggggggcaaatactaacacggggtgtcacgggatggccaggaggagtcctgctcgccacccaggctcactgtcctaaacctccatctgaaaccgcatctcgggtgacctcagattgtgctaggaaagcctagttaataaatctgcctcatctcgattactgtaa

SEQ ID NO: 155478 - DNA, 6090 bp, Homo sapiens
  Payload ID: 10566
  Gene Symbol: MROH7-TTC4
  Gene Name: MROH7-TTC4 readthrough (NMD candidate)
  ENST ID: ENST00000425300
  CDS Start-End: 397-2355
aggggcagctctgggaaagtcctaggggtgggggcagtctccacagcctcccacaagggagttaccaccttcccgcacttctgggtacaagtctcctgctctggctgtattccacagttagaacttcatatctttggcttagagctggattttctgttaccatgtggatgctccaggtgaagtgcggagcttgttaacagacgtgcatgcctggcctgtggactgtgcagtaagtgttgaaaaaggcactcttccctgacttgatttctttctgcatctcctcccaggggcccgctcctgcttaaaaacaccatgcatgcagactgctgctgggaatgtgacagttggctgttggagagaagcgggcactggcattgagagacctccagactggacatggccctgagtccaggggctaacctggtcttccatgaagacccaaagatgacaccaagtcccccctcctgtggggccccgggattagggtctggtaccatccctcagccccacccagacatggctcaggtgcctatgttgaatctgctcccaagtcctggcttggctctcgttccagatcttaatgattctttgagtccagtctcaggggaggcctcaggcctggtgtctgaaaacacccccagacctgatgacagcagagctatcgctccagcctccctccagatcaccagttcttgttctggtgaagccctggacctggattccaaggatgtctcaaggcctgactcacaggggcgcctctgtccagcctcaaaccccattctgagccctagctctactgaggcccctcgtctgagctctgggaaccaccctcagtcaaattctgaagatgccttcaagtgcctctcaagtaagattttcaagttgggtcagagaaactccaacccttctaggcatgaattaaacccatttataaggcaccattccagagaaggtctggttctgggccactgcatctctaggccaagctcaaaagcactccttattccaacctcaaactcttctctggaccttgactccaatccattgctcaacatgggctcaagaaacacctccaagctgaacctgaatgtagctccagattctcatgggaccctaatcccagacacaaatgagaccatcactttggcttcacataatatctctgagtctgtttcaaaaggagcctttagtaccacctggagcacaagttcaaaggaaaccatgaatgtggcttccagcggccactccagatctgatttgagcgtgaccatcactcaagcctcgtatgtgaccctgattcctggctccagctatggtatcagcctgcactccagcacccatgagcccaactccaccatctctccaccctcatgcatgactctaatcctgggttccaatgagactctgagcctggactccagcctcctgttcagcgacacctccaccttgacgctgagcagtcagcaggatgatgccaaggacaacagcatccacactgtgcccctggaggagaatctggagagttggagtgagatggccagcattaaggtgggccagttcccgctgggattccccatctccaaccccgcaggcaaggacgccgtgaccttgcaaggcatccctgaggatggagtttcactcttgttgcccaggctggagtgcaatggtgcgatctcggctcactgcaacctctgcctcccaggagcctttgatgaagtgacctcatgcctggtgaaggtgccagagaagacagaaggtggcaacaacatggctctggttgagaatgtcaccacccttcagaagagccaggatctgctggaggcagaaggagaaaagaagaccatgataaagaagattatgaggcagatccaggaggagccactggattctctctcaagctccgtccgcaagcaggccatggagatcctgacccagctgagccacacccagcccaccctgggcatgcgggagaggtcggagctggtgaacgtgtgtgtgcacagcgtgttctccctgccctccgtgcaggcgatgcaggagaaggacgaggccaaggctgagaccatccaggctctttaccatcagaccctggaggccctgcagacactgctcaaagccctctttatcgaggaccccactcctgctgggctgaagagcatcttggaggccctggggccttggatgaactctgggaaggcccatgagcgagcacgggctgtgaacaccaatgtctctgtgttgaaccacatgcttctaactctgcctttctttattgcaatacaaacagatgcccttggggttcccggcgctggggcttctgctggggagactcatccttcacattggggatcctgatgaggagattggctgtgaggctctggacggcatcatcatcctctacactattctggagctccaaaaacgagccagagataaggaagagaccaacaaaaaggagctatatgagagcaacaagcatttcctggggccctacaaccctgtgagcccgtgccagaacattctgcgggtgatcgaggaatttggagacttcctggggccccagcagataaaggacctgctgctggccgccctggaagggctgaaaggcagctcagaggctccagggaaggactccagggagatgatgcagctggcctcggaggtcatgctcagctcggtgctggagtggtaccgccacagggcgctggaggtgatcccagaaatcatgcaaggcatctacatgcagctgagccacatccaggagcctcgggcccgccaggtggccctgctgcccgtctccctcctggctagctccttcatgaccgaggttgtggtggccctgctcatgtgccccctcccactgaacagcaatggagcagagatgtggaggcagctgatactgtgtaagcccagctgtgatgtccgagacctcctggatctgctcctgggcagcctgaaggagaagcccgtcaccaaggagggccgggcttccatcgtgcccctggcggcagccagcggcctgtgcgagctcctgtccgtcaacagctgcatgggccgtgtgaggcgcatctaccctcagctgctcctggccctgctcattcaggtccattaccacatcggcctcaacctgcctggctgcgtggctcctcccaaggacaccaagaagggtgcacagccctctcccttcgtacctgtgcgctgggtggtgaaagtggtgaaaaccctgctactgaggatgggctgctcttatgagaccacgtttctggaggaccagggtggctgggagctcatggagcaggtggagagccaccaccgcggagtggccttgctggcaagggccatggtgcagtactcctgccaggagctgtgccgcatcctctacctgctcatcccgctcctggagcgaggcgacgagaagcacaggatcacggccaccgccttcttcgtggagctcctccagatggagcaggtgcgccggatccccgaggaatactctctggggcggatggcagaaggcctgagccaccacgaccccatcatgaaggtgctgtccattcgaggcctggtcatcctggcccgcaggtctgagaagaccgccaaggtgaaggccctcctgccctccatggtgaagggcctgaagaacatggatgggatgctggtggtggaagcggtccacaacctcaaggctgtcttcaaggggcgggaccagaagctgatggacagtgcggtctatgtggagatgctgcagatcctgctgccgcacttcagcgacgcacgagaggtcgtgcgctcctcctgcatcaacctgtatgggaaggtggtccagaagcttcgggcaccacgcactcaggccatggaggagcagctggtcagcaccttggtgcccctactgctgaccatgcaggagggcaactccaaggtaagccagaagtgtgtgaagaccctgttacgctgttcttacttcatggcttgggagttgccaaaaagagcttatagccggaagccctgggacaaccaacagcagacagtggccaaaatttgcaagtgccttgtgaacacccaccgagacagcgccttcatattcctcagccagagcctggagtatgccaagaactcacgggcctccctccggaagtgctcagtcatgttcatagcaactcctagagggcagagatttcatctgctctgcccaccgctatatagccagccactagaacaggccggaagcgcagaaagagctaagaatttgaaaaggtccccctatttatgtcgagagcgccatcagaaattgatcccagggagaatcctgacttggcttgtctccagtcaattatttttgatgaggagcgttctccagaagaacaggccaagacctataaagatgagggcaatgattactttaaagaaaaagactacaagaaagctgtaatttcatacactgaaggcttaaagaagaaatgtgcagatcctgatttgaatgctgtcctttataccaaccgggcagcagcacagtactatctgggcaattttcgttctgctctcaatgatgtgacagctgccagaaagctaaaaccctgccacctcaaagcaataataagaggtgccttatgccatctggaactgaaacactttgccgaggccgtgaactggtgtgatgagggactgcaaatagatgccaaagagaagaagcttctggaaatgagggctaaagcagacaagctgaagcgaattgaacagagggatgtgaggaaagccaacttgaaagaaaagaaggagaggaatcagaatgaggctttactccaggccatcaaggctaggaatatcaggctctcagaagctgcctgtgaggatgaagattcagcctcagaaggtctaggtgagcttttcctggatggactcagcactgagaacccccatggagccaggctgagtctagatggccagggcaggctgagctggcctgtgctctttctgtacccagagtatgcccagtcggacttcatctctgcttttcatgaggactccaggtttattgatcatctaatggtgatgtttggtgaaacaccctcttgggacctagagcaaaaatattgccctgataatttggaggtctactttgaggatgaggacagggcagaactataccgggtgcctgccaagagcaccttgctacaggttctacagcaccagaggtactttgtaaaagccctgacaccagcatttttggtctgtgtaggatcctctcctttttgcaagaattttctccgggggagaaaggtgtaccagatacgatgactaagccagggcccctggatctcctcccttaccctcctctgctgggaacctagcacacctgaatcagctggacatactgctggagtccagtgctttctttccgtcaccctggggatagtccttcctggcatcgtggtgggggaggagcctctggcttccctaaactgcagcctctctggctggtcttcactttcctcagttgatataaaactctgggtcttggccatgatgtccttggactccatcgctaaagggaccatctgctgcagttaccacagcaactgacctgagcggcaccctggtctgtggagatggactcaggatccagtgacatgattctgaacttttgtggagtttgacaccttagagaagctacccctcaaactgcacatctacacacaaacaaacaatgcataggattccaaggctttaaagctgagagaccctggcctcaagttatttcatgcgcacagagggaagccatgtggggttgctgaagatgccttgaggtgaaatgggggcaggaaagccacatcttgctctgcatttataaagaccgtacaaactcagatccttggtacccctaaaaagattgccaattttcttcatctttgccatatggaggactgtgacagactttggacagtggcctcttgagttcctctgcagttttgacatttaggattttgtgtcttttaaactggaaaatcttctagcatgttgggttgttacagagtatatttttgtctgcagctgtttgttgccccattcctaagaggagtttatccatcctga

SEQ ID NO: 155479 - DNA, 5867 bp, Homo sapiens
  Payload ID: 10566
  Gene Symbol: MROH7-TTC4
  Gene Name: MROH7-TTC4 readthrough (NMD candidate)
  ENST ID: ENST00000414150
  CDS Start-End: 279-4283
ggaaagtcctaggggtgggggcagtctccacagcctcccacaagggagttaccaccttcccgcacttctgggtacaagtctcctgctctggctgtattccacagttagaacttcatatctttggcttagagctggattttctgttaccatgtggatgctccaggtgaaggggcccgctcctgcttaaaaacaccatgcatgcagactgctgctgggaatgtgacagttggctgttggagagaagcgggcactggcattgagagacctccagactggacatggccctgagtccaggggctaacctggtcttccatgaagacccaaagatgacaccaagtcccccctcctgtggggccccgggattagggtctggtaccatccctcagccccacccagacatggctcaggtgcctatgttgaatctgctcccaagtcctggcttggctctcgttccagatcttaatgattctttgagtccagtctcaggggaggcctcaggcctggtgtctgaaaacacccccagacctgatgacagcagagctatcgctccagcctccctccagatcaccagttcttgttctggtgaagccctggacctggattccaaggatgtctcaaggcctgactcacaggggcgcctctgtccagcctcaaaccccattctgagccctagctctactgaggcccctcgtctgagctctgggaaccaccctcagtcaaattctgaagatgccttcaagtgcctctcaagtaagattttcaagttgggtcagagaaactccaacccttctaggcatgaattaaacccatttataaggcaccattccagagaaggtctggttctgggccactgcatctctaggccaagctcaaaagcactccttattccaacctcaaactcttctctggaccttgactccaatccattgctcaacatgggctcaagaaacacctccaagctgaacctgaatgtagctccagattctcatgggaccctaatcccagacacaaatgagaccatcactttggcttcacataatatctctgagtctgtttcaaaaggagcctttagtaccacctggagcacaagttcaaaggaaaccatgaatgtggcttccagcggccactccagatctgatttgagcgtgaccatcactcaagcctcgtatgtgaccctgattcctggctccagctatggtatcagcctgcactccagcacccatgagcccaactccaccatctctccaccctcatgcatgactctaatcctgggttccaatgagactctgagcctggactccagcctcctgttcagcgacacctccaccttgacgctgagcagtcagcaggatgatgccaaggacaacagcatccacactgtgcccctggaggagaatctggagagttggagtgagatggccagcattaaggtgggccagttcccgctgggattccccatctccaaccccgcaggcaaggacgccgtgaccttgcaaggcatccctgagggagcctttgatgaagtgacctcatgcctggtgaaggtgccagagaagacagaaggtggcaacaacatggctctggttgagaatgtcaccacccttcagaagagccaggatctgctggaggcagaaggagaaaagaagaccatgataaagaagattatgaggcagatccaggaggagccactggattctctctcaagctccgtccgcaagcaggccatggagatcctgacccagctgagccacacccagcccaccctgggcatgcgggagaggtcggagctggtgaacgtgtgtgtgcacagcgtgttctccctgccctccgtgcaggcgatgcaggagaaggacgaggccaaggctgagaccatccaggctctttaccatcagaccctggaggccctgcagacactgctcaaagccctctttatcgaggaccccactcctgctgggctgaagagcatcttggaggccctggggccttggatgaactctgggaaggcccatgagcgagcacgggctgtgaacaccaatgtctctgtgttgaaccacatgcttctaactctgcctttctttatgcccttggggttcccggcgctggggcttctgctggggagactcatccttcacattggggatcctgatgaggagattggctgtgaggctctggacggcatcatcatcctctacactattctggagctccaaaaacgagccagagataaggaagagaccaacaaaaaggagctatatgagagcaacaagcatttcctggggccctacaaccctgtgagcccgtgccagaacattctgcgggtgatcgaggaatttggagacttcctggggccccagcagataaaggacctgctgctggccgccctggaagggctgaaaggcagctcagaggctccagggaaggactccagggagatgatgcagctggcctcggaggtcatgctcagctcggtgctggagtggtaccgccacagggcgctggaggtgatcccagaaatcatgcaaggcatctacatgcagctgagccacatccaggagcctcgggcccgccaggtggccctgctgcccgtctccctcctggctagctccttcatgaccgaggttgtggtggccctgctcatgtgccccctcccactgaacagcaatggagcagagatgtggaggcagctgatactgtgtaagcccagctgtgatgtccgagacctcctggatctgctcctgggcagcctgaaggagaagcccgtcaccaaggagggccgggcttccatcgtgcccctggcggcagccagcggcctgtgcgagctcctgtccgtcaacagctgcatgggccgtgtgaggcgcatctaccctcagctgctcctggccctgctcattcaggtccattaccacatcggcctcaacctgcctggctgcgtggctcctcccaaggacaccaagaagggtgcacagccctctcccttcgtacctgtgcgctgggtggtgaaagtggtgaaaaccctgctactgaggatgggctgctcttatgagaccacgtttctggaggaccagggtggctgggagctcatggagcaggtggagagccaccaccgcggagtggccttgctggcaagggccatggtgcagtactcctgccaggagctgtgccgcatcctctacctgctcatcccgctcctggagcgaggcgacgagaagcacaggatcacggccaccgccttcttcgtggagctcctccagatggagcaggtgcgccggatccccgaggaatactctctggggcggatggcagaaggcctgagccaccacgaccccatcatgaaggtgctgtccattcgaggcctggtcatcctggcccgcaggtctgagaagaccgccaaggtgaaggccctcctgccctccatggtgaagggcctgaagaacatggatgggatgctggtggtggaagcggtccacaacctcaaggctgtcttcaaggggcgggaccagaagctgatggacagtgcggtctatgtggagatgctgcagatcctgctgccgcacttcagcgacgcacgagaggtcgtgcgctcctcctgcatcaacctgtatgggaaggtggtccagaagcttcgggcaccacgcactcaggccatggaggagcagctggtcagcaccttggtgcccctactgctgaccatgcaggagggcaactccaaggtaagccagaagtgtgtgaagaccctgttacgctgttcttacttcatggcttgggagttgccaaaaagagcttatagccggaagccctgggacaaccaacagcagacagtggccaaaatttgcaagtgccttgtgaacacccaccgagacagcgccttcatattcctcagccagagcctggagtatgccaagaactcacgggcctccctccggaagtgctcagtcatgttcatagggtccctggtcccctgcatggagagcataatgacagaagatcgtctgaatgaagtgaaagctgcaactcctagagggcagagatttcatctgctctgcccaccgctatatagccagccactagaacaggccggaagcgcagaaagagctaagaatttgaaaaggtccccctatttatgtcgagagcgccatcagaaattgatcccagggagaatcctgacttggcttgtctccagtcaattatttttgatgaggagcgttctccagaagaacaggccaagacctataaagatgagggcaatgattactttaaagaaaaagactacaagaaagctgtaatttcatacactgaaggcttaaagaagaaatgtgcagatcctgatttgaatgctgtcctttataccaaccgggcagcagcacagtactatctgggcaattttcgttctgctctcaatgatgtgacagctgccagaaagctaaaaccctgccacctcaaagcaataataagaggtgccttatgccatctggaactgaaacactttgccgaggccgtgaactggtgtgatgagggactgcaaatagatgccaaagagaagaagcttctggaaatgagggctaaagcagacaagctgaagcgaattgaacagagggatgtgaggaaagccaacttgaaagaaaagaaggagaggaatcagaatgaggctttactccaggccatcaaggctaggaatatcaggctctcagaagctgcctgtgaggatgaagattcagcctcagaaggtctaggtgagcttttcctggatggactcagcactgagaacccccatggagccaggctgagtctagatggccagggcaggctgagctggcctgtgctctttctgtacccagagtatgcccagtcggacttcatctctgcttttcatgaggactccaggtttattgatcatctaatggtgatgtttggtgaaacaccctcttgggacctagagcaaaaatattgccctgataatttggaggtctactttgaggatgaggacagggcagaactataccgggtgcctgccaagagcaccttgctacaggttctacagcaccagaggtactttgtaaaagccctgacaccagcatttttggtctgtgtaggatcctctcctttttgcaagaattttctccgggggagaaaggtgtaccagatacgatgactaagccagggcccctggatctcctcccttaccctcctctgctgggaacctagcacacctgaatcagctggacatactgctggagtccagtgctttctttccgtcaccctggggatagtccttcctggcatcgtggtgggggaggagcctctggcttccctaaactgcagcctctctggctggtcttcactttcctcagttgatataaaactctgggtcttggccatgatgtccttggactccatcgctaaagggaccatctgctgcagttaccacagcaactgacctgagcggcaccctggtctgtggagatggactcaggatccagtgacatgattctgaacttttgtggagtttgacaccttagagaagctacccctcaaactgcacatctacacacaaacaaacaatgcataggattccaaggctttaaagctgagagaccctggcctcaagttatttcatgcgcacagagggaagccatgtggggttgctgaagatgccttgaggtgaaatgggggcaggaaagccacatcttgctctgcatttataaagaccgtacaaactcagatccttggtacccctaaaaagattgccaattttcttcatctttgccatatggaggactgtgacagactttggacagtggcctcttgagttcctctgcagttttgacatttaggattttgtgtcttttaaactggaaaatcttctagca

SEQ ID NO: 155480 - DNA, 5162 bp, Homo sapiens
  Payload ID: 10566
  Gene Symbol: MROH7-TTC4
  Gene Name: MROH7-TTC4 readthrough (NMD candidate)
  ENST ID: ENST00000606515
  CDS Start-End: 293-2176
gaggggcagctctgggaaagtcctaggggtgggggcagtctccacagcctcccacaagggagttaccaccttcccgcacttctgggtacaagtctcctgctctggctgtattccacagttagaacttcatatctttggcttagagctggattttctgttaccatgtggatgctccaggtgaaggggcccgctcctgcttaaaaacaccatgcatgcagactgctgctgggaatgtgacagttggctgttggagagaagcgggcactggcattgagagacctccagactggacatggccctgagtccaggggctaacctggtcttccatgaagacccaaagatgacaccaagtcccccctcctgtggggccccgggattagggtctggtaccatccctcagccccacccagacatggctcaggtgcctatgttgaatctgctcccaagtcctggcttggctctcgttccagatcttaatgattctttgagtccagtctcaggggaggcctcaggcctggtgtctgaaaacacccccagacctgatgacagcagagctatcgctccagcctccctccagatcaccagttcttgttctggtgaagccctggacctggattccaaggatgtctcaaggcctgactcacaggggcgcctctgtccagcctcaaaccccattctgagccctagctctactgaggcccctcgtctgagctctgggaaccaccctcagtcaaattctgaagatgccttcaagtgcctctcaagtaagattttcaagttgggtcagagaaactccaacccttctaggcatgaattaaacccatttataaggcaccattccagagaaggtctggttctgggccactgcatctctaggccaagctcaaaagcactccttattccaacctcaaactcttctctggaccttgactccaatccattgctcaacatgggctcaagaaacacctccaagctgaacctgaatgtagctccagattctcatgggaccctaatcccagacacaaatgagaccatcactttggcttcacataatatctctgagtctgtttcaaaaggagcctttagtaccacctggagcacaagttcaaaggaaaccatgaatgtggcttccagcggccactccagatctgatttgagcgtgaccatcactcaagcctcgtatgtgaccctgattcctggctccagctatggtatcagcctgcactccagcacccatgagcccaactccaccatctctccaccctcatgcatgactctaatcctgggttccaatgagactctgagcctggactccagcctcctgttcagcgacacctccaccttgacgctgagcagtcagcaggatgatgccaaggacaacagcatccacactgtgcccctggaggagaatctggagagttggagtgagatggccagcattaaggtgggccagttcccgctgggattccccatctccaaccccgcaggcaaggacgccgtgaccttgcaaggcatccctgagggagcctttgatgaagtgacctcatgcctggtgaaggtgccagagaagacagaaggtggcaacaacatggctctggttgagaatgtcaccacccttcagaagagccaggatctgctggaggcagaaggagaaaagaagaccatgataaagaagattatgaggcagatccaggaggagccactggattctctctcaagctccgtccgcaagcaggccatggagatcctgacccagctgagccacacccagcccaccctgggcatgcgggagaggtcggagctggtgaacgtgtgtgtgcacagcgtgttctccctgccctccgtgcaggcgatgcaggagaaggacgaggccaaggctgagaccatccaggctctttaccatcagaccctggaggccctgcagacactgctcaaagccctctttatcgaggaccccactcctgctgggctgaagagcatcttggaggccctggggccttggatgaactctgggaaggcccatgagcgagcacgggctgtgaacaccaatgtctctgtgttgaaccacatgcttctaactctgcctttctttattgcaatacaaacagatgcccttggggttcccggcgctggggcttctgctggggagactcatccttcacattggggatcctgatgaggagattggctgtgaggctctggacggcatcatcatcctctacactattctggagctccaaaaacgagccagagataaggaagagaccaacaaaaaggagctatatgagagcaacaagcatttcctggggccctacaaccctgtgagcccgtgccagaacattctgcgggtgatcgaggaatttggagacttcctggggccccagcagataaaggacctgctgctggccgccctggaagggctgaaaggcagctcagaggctccagggaaggactccagggagatgatgcagctggcctcggaggtcatgctcagctcggtgctggagtggtaccgccacagggcgctggaggtgatcccagaaatcatgcaaggcatctacatgcagctgagccacatccaggagcctcgggcccgccaggtggccctgctgcccgtctccctcctggctagctccttcatgaccgaggttgtggtggccctgctcatgtgccccctcccactgaacagcaatggagcagagatgtggaggcagctgatactgtgtaagcccagctgtgatgtccgagacctcctggatctgctcctgggcagcctgaaggagaagcccgtcaccaaggagggccgggcttccatcgtgcccctggcggcagccagcggcctgtgcgagctcctgtccgtcaacagctgcatgggccgtgtgaggcgcatctaccctcagctgctcctggccctgctcattcaggtccattaccacatcggcctcaacctgcctggctgcgtggctcctcccaaggacaccaagaagggtgcacagccctctcccttcgtacctgtgcgctgggtggtgaaagtggtgaaaaccctgctactgaggatgggctgctcttatgagaccacgtttctggaggaccagggtggctgggagctcatggagcaggtggagagccaccaccgcggagtggccttgctggcaagggccatggtgcagtactcctgccaggagctgtgccgcatcctctacctgctcatcccgctcctggagcgaggcgacgagaagcacaggatcacggccaccgccttcttcgtggagctcctccagatggagcaggtgcgccggatccccgaggaatactctctggggcggatggcagaaggcctgagccaccacgaccccatcatgaaggtgctgtccattcgaggcctggtcatcctggcccgcaggtctgagaagaccgccaaggtgaaggccctcctgccctccatggtgaagggcctgaagaacatggatgggatgctggtggtggaagcggtccacaacctcaaggctgtcttcaaggggcgggaccagaagctgatggacagtgcggtctatgtggagatgctgcagatcctgctgccgcacttcagcgacgcacgagaggtcgtgcgctcctcctgcatcaacctgtatgggaaggtggtccagaagcttcgggcaccacgcactcaggccatggaggagcagctggtcagcaccttggtgcccctactgctgaccatgcaggagggcaactccaaggtgaacacccaccgagacagcgccttcatattcctcagccagagcctggagtatgccaagaactcacgggcctccctccggaagtgctcagtcatgttcatagggtccctggtcccctgcatggagagcataatgacagaagatcgtctgaatgaagtgaaagctgcaactcctagagggcagagatttcatctgctctgcccaccgctatatagccagccactagaacaggccggaagcgcagaaagagctaagaatttgaaaaggtccccctatttatgtcgagagcgccatcagaaattgatcccagggagaatcctgacttggcttgtctccagtcaattatttttgatgaggagcgttctccagaagaacaggccaagacctataaagatgagggcaatgattactttaaagaaaaagactacaagaaagctgtaatttcatacactgaaggcttaaagaagaaatgtgcagatcctgatttgaatgctgtcctttataccaaccgggcagcagcacagtactatctgggcaattttcgttctgctctcaatgatgtgacagctgccagaaagctaaaaccctgccacctcaaagcaataataagaggtgccttatgccatctggaactgaaacactttgccgaggccgtgaactggtgtgatgagggactgcaaatagatgccaaagagaagaagcttctggaaatgagggctaaagcagacaagctgaagcgaattgaacagagggatgtgaggaaagccaacttgaaagaaaagaaggagaggaatcagaatgaggctttactccaggccatcaaggctaggaatatcaggctctcagaagctgcctgtgaggatgaagattcagcctcagaaggtctagagtatgcccagtcggacttcatctctgcttttcatgaggactccaggtttattgatcatctaatggtgatgtttggtgaaacaccctcttgggacctagagcaaaaatattgccctgataatttggaggtctactttgaggatgaggacagggcagaactataccgggtgcctgccaagagcaccttgctacaggttctacagcaccagaggtactttgtaaaagccctgacaccagcatttttggtctgtgtaggatcctctcctttttgcaagaattttctccgggggagaaaggtgtaccagatacgatgactaagccagggcccctggatctcctcccttaccctcctctgctgggaacctagcacacctgaatcagctggacatactgctggagtccagtgctttctttccgtcaccctggggatagtccttcctggcatcgtggtgggggaggagcctctggcttccctaaactgcagcctctctggctggtcttcactttcctcagttgatataaaactctgggtct

SEQ ID NO: 155481 - DNA, 3821 bp, Homo sapiens
  Payload ID: 10567
  Gene Symbol: MRS2
  Gene Name: MRS2 magnesium transporter
  ENST ID: ENST00000274747
  CDS Start-End: 140-1321
cgcggcacgccccgcgcatgcctggtgcacagagtctgcaggtcgggcggtagcgacaggtcagagctgcggcctgagcagccagcgtccggcatgaaggtctggggtctggctgctgcctgcttcttgctccagcaccatggaatgcctgcgcagtttaccctgcctcctgccccgcgcgatgagacttccccggcggacgctgtgtgccctggccttggacgtgacctctgtgggtcctcccgttgctgcctgcggccgccgagccaacctgattggaaggagccgagcggcgcagctttgcgggcccgaccggctccgcgtggcaggtgaagtgcaccggtttagaacctctgacgtctctcaagccactttagccagtgtagccccagtatttactgtgtatttgaaagctgtgataactccagagtgtcttctgatattagattatcgtaatttaaacttagagcaatggctgttccgggaactcccttcacagttgtctggagagggtcaactcgttacataccctttaccttttgagtttagagctatagaagcactcctgcaatattggatcaacacccttcaggggaaacttagcattttgcagccactgatccttgagaccttggatgctttggtggaccccaaacattcttctgtagacagaagcaaactgcacattttactacagaatggcaaaagtctatcagagttagaaacagatattaaaattttcaaagagtcaattttggagatcttggatgaggaagagttgctagaagagctctgtgtatcaaaatggagtgacccacaagtctttgaaaagagcagtgctgggattgaccatgcagaagagatggagttgctgttggaaaactactaccgattggctgacgatctctccaatgcagctcgtgagcttagggtgctgattgatgattcacaaagtattattttcattaatctggacagccaccgaaacgtgatgatgaggttgaatctacagctgaccatgggaaccttctctctttcgctctttggactaatgggagttgcttttggaatgaatttggaatcttcccttgaagaggaccatagaattttttggctgattacaggaattatgttcatgggaagtggcctcatctggaggcgcctgctttcattccttggacgacagctagaagctccattgcctcctatgatggcttctttacctaaaaagactcttctggcagatagaagcatggaattgaaaaatagcctcagactggatggacttggatcaggaaggagcatcctaacaaaccgttaggaacagccccgtggatactgaagttttttttatggtagttacaggaaacttctgatactctttttattattttcttgtatagagtcagacacttgaaaaaaactaatgtttgaagacaaaaatattttggcagtcacaataccagaactggattgcatttccagaattctgagttaaagaaacaaagtatttgctttgtaaaaggccaaaattctatttcctacaaactttaaatgctgtttttatagatgtgatatgaggcaacacaagcacagacagttgcatagattttaatttatacatatcaagaaaagtgcaatttcatgctgaatgaagcgtaggaacttgacaagcccataggtagctatagttctttgtcagtatagggaattatgttcatgtgaatttcctgattctcaggtgactaaaaagctagcattctatgtattaaccttacaacagactctgtaagtttgagctttaaaaaccaaactttgacataaccttatttcttgtatttgcccccttttttttataaaaggtgaataaaaagaaataatttaatatcaccattgtatggattcctaatcaagatttcacgttctcagcccctgagactagttttctttgctctctgtaattagagcctttggaagcaaagttgaaaggaagtatttccattctgttactgttttgtagcactttgtccatttattgatttttaaagtagatatttagataccacccctgccctgccccaaaaagaaaaatgtttattgtcctgctaatctatatgcctacacctcagaagctgacagatgagcttcctaaaacatgaggatgaataaatgttagaactgtgatatcttctcatttccacagagatttgggtttaaaacaaatggctaatatttgtaagcctgaaagctgccatcctctttaacatcctacctaccttttaaaatattttctggaggttaagtacagttaggcactagaacatttgttaagcctcccaaagtagtgtgcatggaagattctagagtgtccagctcttgcactacaaatgtaataataacagaataaatacacttaccctgatgatattgagggtacatgattagcctaatgtgatgtcatatgaggaagtttaggagtccatttttcaggtggtttggtgataggaataaaaatgttactcccgtcgctgatttggaagaaaaccgatgaagtacaagtaaggtttccccactcctgtgtgtggtcatgggaagccattagagggaagctgcagaacagaatggaacaggacaggctgggctagactcgagcacgcagtggcccctgtgccaccacactgtgggtcaggaacacgcgtcatggtgttcttgtcggaatgtgaacatacagcaccctctagcattacgaatctcttaggatttttaagattgtatttgataatacttatatttcacagggcacacttttggcacacctcagagcacactgctgctattttgggtcgtatcactgtaaaatacataataagtactacttaactgtgacatgaagaattggaatcccagagggcaacatttgatttgactaagatcaggcataagatagaatttttgtcatttttccttgcagttttattgacttagtttatgagcttggataaaataattttttgatgaatcatgtcaataaaaggaaaaataatgtaactacctcataagtctgataaaaggaagttgctagtgttttatagaatttctgaaggtggttaaatcaagtatgatttcaaaatatcaactagttccacttttgtgattgcaggatgcttcttatactaaagttctcataaataataaatcagcttatgccaaaaatatatgaagttccttggttttaaattttgaactaaaatggactgagcacattaattactgtttgaaagtaggtaccaaacactgggttatgtgagtgagtaagcaatcatatcgcctgtcaaacacatcaagtgtcgaacacgtcaaggtgtgatactgtctttggaaggctcctaaacaaatgtgagcacaattattaacaccttattcttcatgaacacagactgttaagcagcactaaccaattttatattaaaaagctatttattttggtgagttattccaagagttgtatacagctttattttttggaattgcaatattaaagttgcacgttggatttaactctcatgactttagtaatacctacagaggtgagctaatggatggtacatggagtagggactgcagagaccctagttttgtccccactccatcttcaaataattttggtctcttaggtctgtgatacaaaggcataaaacaattcctatcttgaagccttgagaaaagctgttacatatacgcagatagtagcaagacagaaaatgcaaatatgtaaatgtcttctgatatcttgaaataaagataaatttcagttaaacttg

SEQ ID NO: 155482 - DNA, 1740 bp, Homo sapiens
  Payload ID: 10567
  Gene Symbol: MRS2
  Gene Name: MRS2 magnesium transporter
  Uniprot ID: Q9HD23
  ENST ID: ENST00000378353
  CDS Start-End: 94-1320
gcggtagcgacaggtcagagctgcggcctgagcagccagcgtccggcatgaaggtctggggtctggctgctgcctgcttcttgctccagcaccatggaatgcctgcgcagtttaccctgcctcctgccccgcgcgatgagacttccccggcggacgctgtgtgccctggccttggacgtgacctctgtgggtcctcccgttgctgcctgcggccgccgagccaacctgattggaaggagccgagcggcgcagctttgcgggcccgaccggctccgcgtggcaggtgaagtgcaccggtttagaacctctgacgtctctcaagccactttagccagtgtagccccagtatttactgtgacaaaatttgacaaacagggaaacgttacttcttttgaaaggaagaaaactgaattataccaagagttaggtcttcaagccagagatttgagatttcagcatgtaatgagtatcacagtcagaaacaataggattatcatgagaatggagtatttgaaagctgtgataactccagagtgtcttctgatattagattatcgtaatttaaacttagagcaatggctgttccgggaactcccttcacagttgtctggagagggtcaactcgttacataccctttaccttttgagtttagagctatagaagcactcctgcaatattggatcaacacccttcaggggaaacttagcattttgcagccactgatccttgagaccttggatgctttggtggaccccaaacattcttctgtagacagaagcaaactgcacattttactacagaatggcaaaagtctatcagagttagaaacagatattaaaattttcaaagagtcaattttggagatcttggatgaggaagagttgctagaagagctctgtgtatcaaaatggagtgacccacaagtctttgaaaagagcagtgctgggattgaccatgcagaagagatggagttgctgttggaaaactactaccgattggctgacgatctctccaatgcagctcgtgagcttagggtgctgattgatgattcacaaagtattattttcattaatctggacagccaccgaaacgtgatgatgaggttgaatctacagctgaccatgggaaccttctctctttcgctctttggactaatgggagttgcttttggaatgaatttggaatcttcccttgaagaggaccatagaattttttggctgattacaggaattatgttcatgggaagtggcctcatctggaggcgcctgctttcattccttggacgacagctagaagctccattgcctcctatggtatgaaggatatggttcacggcggtattgtggaagggttatgatcatgggccctaaagtcagagcgcctgggattaagttgtcacaggcactatggcccttgcgagttgctttctcaaacttccttcagtttccctatctgtcagttaagtcggtattacctgcttcatagggttatgggaagaattaaacaatatgtgtaaagcacttactagcacactgcctaacacaataagttagaaatataatttgtgtagaactctgacaacatacatttaaacagatgttagtaattctggtataaggtttgtcataaccaaatggaaatgtaggaaacatttataacgttcttaaaagatagaaaattcacctccattttctttgtacttgaagatggcaccactggaataaatacttaagacactg

SEQ ID NO: 155483 - DNA, 3313 bp, Homo sapiens
  Payload ID: 10567
  Gene Symbol: MRS2
  Gene Name: MRS2 magnesium transporter
  Uniprot ID: Q9HD23
  ENST ID: ENST00000378386
  CDS Start-End: 94-1425
gcggtagcgacaggtcagagctgcggcctgagcagccagcgtccggcatgaaggtctggggtctggctgctgcctgcttcttgctccagcaccatggaatgcctgcgcagtttaccctgcctcctgccccgcgcgatgagacttccccggcggacgctgtgtgccctggccttggacgtgacctctgtgggtcctcccgttgctgcctgcggccgccgagccaacctgattggaaggagccgagcggcgcagctttgcgggcccgaccggctccgcgtggcaggtgaagtgcaccggtttagaacctctgacgtctctcaagccactttagccagtgtagccccagtatttactgtgacaaaatttgacaaacagggaaacgttacttcttttgaaaggaagaaaactgaattataccaagagttaggtcttcaagccagagatttgagatttcagcatgtaatgagtatcacagtcagaaacaataggattatcatgagaatggagtatttgaaagctgtgataactccagagtgtcttctgatattagattatcgtaatttaaacttagagcaatggctgttccgggaactcccttcacagttgtctggagagggtcaactcgttacataccctttaccttttgagtttagagctatagaagcactcctgcaatattggatcaacacccttcaggggaaacttagcattttgcagccactgatccttgagaccttggatgctttggtggaccccaaacattcttctgtagacagaagcaaactgcacattttactacagaatggcaaaagtctatcagagttagaaacagatattaaaattttcaaagagtcaattttggagatcttggatgaggaagagttgctagaagagctctgtgtatcaaaatggagtgacccacaagtctttgaaaagagcagtgctgggattgaccatgcagaagagatggagttgctgttggaaaactactaccgattggctgacgatctctccaatgcagctcgtgagcttagggtgctgattgatgattcacaaagtattattttcattaatctggacagccaccgaaacgtgatgatgaggttgaatctacagctgaccatgggaaccttctctctttcgctctttggactaatgggagttgcttttggaatgaatttggaatcttcccttgaagaggaccatagaattttttggctgattacaggaattatgttcatgggaagtggcctcatctggaggcgcctgctttcattccttggacgacagctagaagctccattgcctcctatgatggcttctttacctaaaaagactcttctggcagatagaagcatggaattgaaaaatagcctcagactggatggacttggatcaggaaggagcatcctaacaaaccgttaggaacagccccgtggatactgaagttttttttatggtagttacaggaaacttctgatactctttttattattttcttgtatagagtcagacacttgaaaaaaactaatgtttgaagacaaaaatattttggcagtcacaataccagaactggattgcatttccagaattctgagttaaagaaacaaagtatttgctttgtaaaaggccaaaattctatttcctacaaactttaaatgctgtttttatagatgtgatatgaggcaacacaagcacagacagttgcatagattttaatttatacatatcaagaaaagtgcaatttcatgctgaatgaagcgtaggaacttgacaagcccataggtagctatagttctttgtcagtatagggaattatgttcatgtgaatttcctgattctcaggtgactaaaaagctagcattctatgtattaaccttacaacagactctgtaagtttgagctttaaaaaccaaactttgacataaccttatttcttgtatttgcccccttttttttataaaaggtgaataaaaagaaataatttaatatcaccattgtatggattcctaatcaagatttcacgttctcagcccctgagactagttttctttgctctctgtaattagagcctttggaagcaaagttgaaaggaagtatttccattctgttactgttttgtagcactttgtccatttattgatttttaaagtagatatttagataccacccctgccctgccccaaaaagaaaaatgtttattgtcctgctaatctatatgcctacacctcagaagctgacagatgagcttcctaaaacatgaggatgaataaatgttagaactgtgatatcttctcatttccacagagatttgggtttaaaacaaatggctaatatttgtaagcctgaaagctgccatcctctttaacatcctacctaccttttaaaatattttctggaggttaagtacagttaggcactagaacatttgttaagcctcccaaagtagtgtgcatggaagattctagagtgtccagctcttgcactacaaatgtaataataacagaataaatacacttaccctgatgatattgagggtacatgattagcctaatgtgatgtcatatgaggaagtttaggagtccatttttcaggtggtttggtgataggaataaaaatgttactcccgtcgctgatttggaagaaaaccgatgaagtacaagtaaggtttccccactcctgtgtgtggtcatgggaagccattagagggaagctgcagaacagaatggaacaggacaggctgggctagactcgagcacgcagtggcccctgtgccaccacactgtgggtcaggaacacgcgtcatggtgttcttgtcggaatgtgaacatacagcaccctctagcattacgaatctcttaggatttttaagattgtatttgataatacttatatttcacagggcacacttttggcacacctcagagcacactgctgctattttgggtcgtatcactgtaaaatacataataagtactacttaactgtgacatgaagaattggaatcccagagggcaacatttgatttgactaagatcaggcataagatagaatttttgtcatttttccttgcagttttattgacttagtttatgagcttggataaaataattttttgatgaatcatgtcaataaaaggaaaaataatgtaactacctcataagtctgataaaaggaagttgctagtgttttatagaatttctgaaggtggttaaatcaagtatgatttcaaaatatcaactagttccacttttgtgattgcaggatgcttcttatactaaagttctcataaataataaatcagcttatgcca

SEQ ID NO: 155484 - DNA, 546 bp, Homo sapiens
  Payload ID: 10567
  Gene Symbol: MRS2
  Gene Name: MRS2 magnesium transporter
  ENST ID: ENST00000446191
  CDS Start-End: 1-546
gccgagcggcgcagctttgcgggcccgaccggctccgcgtggcaggtgaagtgcaccggtttagaacctctgacgtctctcaagccactttagccagtgtagccccagtatttactgtgacaaaatttgacaaacagggaaacgttacttcttttgaaaggaagaaaactgaattataccaagagttagaaacagatattaaaattttcaaagagtcaattttggagatcttggatgaggaagagttgctagaagagctctgtgtatcaaaatggagtgacccacaagtctttgaaaagagcagtgctgggattgaccatgcagaagagatggagttgctgttggaaaactactaccgattggctgacgatctctccaatgcagctcgtgagcttagggtgctgattgatgattcacaaagtattattttcattaatctggacagccaccgaaacgtgatgatgaggttgaatctacagctgaccatgggaaccttctctctttcgctctttggactaatgggagttgcttttggaatgaatttgg

SEQ ID NO: 155485 - DNA, 3980 bp, Homo sapiens
  Payload ID: 10567
  Gene Symbol: MRS2
  Gene Name: MRS2 magnesium transporter
  Uniprot ID: Q9HD23
  ENST ID: ENST00000443868
  CDS Start-End: 140-1480
cgcggcacgccccgcgcatgcctggtgcacagagtctgcaggtcgggcggtagcgacaggtcagagctgcggcctgagcagccagcgtccggcatgaaggtctggggtctggctgctgcctgcttcttgctccagcaccatggaatgcctgcgcagtttaccctgcctcctgccccgcgcgatgagacttccccggcggacgctgtgtgccctggccttggacgtgacctctgtgggtcctcccgttgctgcctgcggccgccgagccaacctgattggaaggagccgagcggcgcagctttgcgggcccgaccggctccgcgtggcaggtgaagtgcaccggtttagaacctctgacgtctctcaagccactttagccagtgtagccccagtatttactgtgacaaaatttgacaaacagggaaacgttacttcttttgaaaggaagaaaactgaattataccaagagttaggtcttcaagccagagatttgagatttcagcatgtaatgagtatcacagtcagaaacaataggattatcatgagaatggagaaatattctctactcttggaatcagtagctagcattcttcaaaacagtgtctctttcatggagagacagacagagcaatggctgttccgggaactcccttcacagttgtctggagagggtcaactcgttacataccctttaccttttgagtttagagctatagaagcactcctgcaatattggatcaacacccttcaggggaaacttagcattttgcagccactgatccttgagaccttggatgctttggtggaccccaaacattcttctgtagacagaagcaaactgcacattttactacagaatggcaaaagtctatcagagttagaaacagatattaaaattttcaaagagtcaattttggagatcttggatgaggaagagttgctagaagagctctgtgtatcaaaatggagtgacccacaagtctttgaaaagagcagtgctgggattgaccatgcagaagagatggagttgctgttggaaaactactaccgattggctgacgatctctccaatgcagctcgtgagcttagggtgctgattgatgattcacaaagtattattttcattaatctggacagccaccgaaacgtgatgatgaggttgaatctacagctgaccatgggaaccttctctctttcgctctttggactaatgggagttgcttttggaatgaatttggaatcttcccttgaagaggaccatagaattttttggctgattacaggaattatgttcatgggaagtggcctcatctggaggcgcctgctttcattccttggacgacagctagaagctccattgcctcctatgatggcttctttacctaaaaagactcttctggcagatagaagcatggaattgaaaaatagcctcagactggatggacttggatcaggaaggagcatcctaacaaaccgttaggaacagccccgtggatactgaagttttttttatggtagttacaggaaacttctgatactctttttattattttcttgtatagagtcagacacttgaaaaaaactaatgtttgaagacaaaaatattttggcagtcacaataccagaactggattgcatttccagaattctgagttaaagaaacaaagtatttgctttgtaaaaggccaaaattctatttcctacaaactttaaatgctgtttttatagatgtgatatgaggcaacacaagcacagacagttgcatagattttaatttatacatatcaagaaaagtgcaatttcatgctgaatgaagcgtaggaacttgacaagcccataggtagctatagttctttgtcagtatagggaattatgttcatgtgaatttcctgattctcaggtgactaaaaagctagcattctatgtattaaccttacaacagactctgtaagtttgagctttaaaaaccaaactttgacataaccttatttcttgtatttgcccccttttttttataaaaggtgaataaaaagaaataatttaatatcaccattgtatggattcctaatcaagatttcacgttctcagcccctgagactagttttctttgctctctgtaattagagcctttggaagcaaagttgaaaggaagtatttccattctgttactgttttgtagcactttgtccatttattgatttttaaagtagatatttagataccacccctgccctgccccaaaaagaaaaatgtttattgtcctgctaatctatatgcctacacctcagaagctgacagatgagcttcctaaaacatgaggatgaataaatgttagaactgtgatatcttctcatttccacagagatttgggtttaaaacaaatggctaatatttgtaagcctgaaagctgccatcctctttaacatcctacctaccttttaaaatattttctggaggttaagtacagttaggcactagaacatttgttaagcctcccaaagtagtgtgcatggaagattctagagtgtccagctcttgcactacaaatgtaataataacagaataaatacacttaccctgatgatattgagggtacatgattagcctaatgtgatgtcatatgaggaagtttaggagtccatttttcaggtggtttggtgataggaataaaaatgttactcccgtcgctgatttggaagaaaaccgatgaagtacaagtaaggtttccccactcctgtgtgtggtcatgggaagccattagagggaagctgcagaacagaatggaacaggacaggctgggctagactcgagcacgcagtggcccctgtgccaccacactgtgggtcaggaacacgcgtcatggtgttcttgtcggaatgtgaacatacagcaccctctagcattacgaatctcttaggatttttaagattgtatttgataatacttatatttcacagggcacacttttggcacacctcagagcacactgctgctattttgggtcgtatcactgtaaaatacataataagtactacttaactgtgacatgaagaattggaatcccagagggcaacatttgatttgactaagatcaggcataagatagaatttttgtcatttttccttgcagttttattgacttagtttatgagcttggataaaataattttttgatgaatcatgtcaataaaaggaaaaataatgtaactacctcataagtctgataaaaggaagttgctagtgttttatagaatttctgaaggtggttaaatcaagtatgatttcaaaatatcaactagttccacttttgtgattgcaggatgcttcttatactaaagttctcataaataataaatcagcttatgccaaaaatatatgaagttccttggttttaaattttgaactaaaatggactgagcacattaattactgtttgaaagtaggtaccaaacactgggttatgtgagtgagtaagcaatcatatcgcctgtcaaacacatcaagtgtcgaacacgtcaaggtgtgatactgtctttggaaggctcctaaacaaatgtgagcacaattattaacaccttattcttcatgaacacagactgttaagcagcactaaccaattttatattaaaaagctatttattttggtgagttattccaagagttgtatacagctttattttttggaattgcaatattaaagttgcacgttggatttaactctcatgactttagtaatacctacagaggtgagctaatggatggtacatggagtagggactgcagagaccctagttttgtccccactccatcttcaaataattttggtctcttaggtctgtgatacaaaggcataaaacaattcctatcttgaagccttgagaaaagctgttacatatacgcagatagtagcaagacagaaaatgcaaatatgtaaatgtcttctgatatcttgaaataaagataaatttcagttaaacttg

SEQ ID NO: 155486 - DNA, 2315 bp, Homo sapiens
  Payload ID: 10568
  Gene Symbol: MRTO4
  Gene Name: MRT4 homolog, ribosome maturation factor
  Uniprot ID: Q9UKD2
  ENST ID: ENST00000330263
  CDS Start-End: 298-1017
tcccggcatgcaccgcgccgcgggctccgcctccgcgggaccacagagctgggatagcgcgcgaggccctcggtcggacgggacgctcgggattcagggactgcctcggcacacgggaagttgccctacaggcgcgggagaaagcgcaggcggcggcttggcagggagaggcaggctgcagtgcacattgggtcaggcacacgcgaggggcagcccccgagggccgtcccagagtcccccgcgccgccggggtcctaacggggtgcaccgtcttccgccgcacgtggattcagcgcgatgcccaaatccaagcgcgacaagaaagtctccttaaccaaaactgccaagaaaggcttggaattgaaacaaaacctgatagaagagcttcggaaatgtgtggacacctacaagtaccttttcatcttctctgtggccaacatgaggaacagcaagctgaaggacatccggaacgcctggaagcacagccggatgttctttggcaaaaacaaggtgatgatggtggccttgggtcggagcccatctgatgaatacaaagacaacctgcaccaggtcagcaaaaggttgaggggtgaggtgggtctcctgttcaccaaccgcacaaaggaggaggtgaatgagtggttcacgaaatacacagaaatggactacgcccgagctggtaacaaagcagctttcactgtgagcctggatccagggcccctggagcagttcccccactccatggagccacagctcaggcagctgggcctgcccaccgccctcaagagaggtgtggtgactctgctgtctgactacgaggtgtgcaaggagggcgatgtgctgaccccagagcaggctcgcgtcctgaagctttttgggtatgagatggctgaattcaaggtgaccatcaaatacatgtgggattcacagtcgggaaggttccagcagatgggagacgacttgccagagagcgcatctgagtccacagaagagtcagactcagaagatgatgactgaaagggactcgggactgaaggtctcctggaagcttctgggtctcactggaccatcaggactgctgccgcccctctggagagagcagctttttatttgtctgtagacagggaacatgatgggcactgacctcctgtaaagaataaaactgtgggccgggcgcggtggctcacgcctggaatcccagcactttgggaagccgaggtgggcagatcataaggtcgggagattaagaccatcctggctaacacggtgaaaccccgtctctactaaaaatagaaaaaaaaactagttgggcatagtggcatgtgcctgtagtcccagctactcaggaggctgaggcaggagaatcacttgaacccgggaggtggaggttgccgtgagttgagattggaccactgctctccagcctgggcaacagagtaaaactctgtcccaaaaaaaaaaaaagaatacaaccttgcaggatgtctctcctggagacagcaagagggagaggagggagagggctctttcttagaaaagaggcctttggtgagcccagaagtttgaaaccagcctgggcaattcagcaagatcccgtctctacaaaaaataaaaaaaaattagtcgtggtgccacttgcctgtggtccccactgcttgggaggctgaggtgggagaattgcttaagcctgagagttggaggctcagtgagccatgatcatgccactgcactccagcctgggtggccattgaattctgcgtggattgcctcagtttgccttgtcagccaacttccactggctgccttggcactgccatgacagcacagctccacaccagagctggggtttctcttcagtcctgggtaccccttggcagagggatttgctgaggaaaattaggtatccttcctagccctccacacacttccaaaccagggctgcggatctgatggatgccaggaagacagccttgggctgagagtgacatcactgcaagagttgagagccagcgtctaaagtgtccacggcatcctgggaggttttatccttggtgactctaatggtagatttttgtccaccttgttctatttgcttttgtttgtttttgatttttctgttttaaaattttaaggagagatggggtttcaccatgttgcccaggctggtctcaaactcctgagctcaagcgatctacccaccttggcctcccaaagtgctgggattataggtgtgagccaccgcatccagcccacattgttctatttgtatttcatgaaagcagttctgaatgagagtaaatcagcttcagggtgta

SEQ ID NO: 155487 - DNA, 2069 bp, Homo sapiens
  Payload ID: 10569
  Gene Symbol: MSANTD3-TMEFF1
  Gene Name: MSANTD3-TMEFF1 readthrough
  ENST ID: ENST00000502978
  CDS Start-End: 8-1033
cgccagcatgctgccggagcagctctacttcctgcagagccccccggaggaggagcccgaataccaccccgacgcctcagcccaagaattaaatgtgagggagtctgacgtaagagtttgtgatgagtcatcatgtaaatatggaggagtctgtaaagaagatggagatggtttgaaatgtgcatgccaatttcagtgccatacaaattatattcctgtctgtggatcaaatggggacacttatcaaaatgaatgctttctcagaagggctgcttgtaagcaccagaaagagataacagtaatagcaagaggaccatgctactctgataatggatctggatctggagaaggagaagaggaagggtcaggggcagaagttcacagaaaacactccaagtgtggaccctgcaaatataaagctgagtgtgatgaagatgcagaaaatgttgggtgtgtatgtaatatagattgcagtggatacagttttaatcctgtgtgtgcttctgatgggagttcctataacaatccctgttttgttcgagaagcatcttgtataaagcaagaacaaattgatataaggcatcttggtcattgcacagatacagatgacactagtttgttgggaaagaaagatgatggactacaatatcgaccagatgtgaaagatgctagtgatcaaagagaagatgtttatattggaaaccacatgccttgccctgaaaacctcaatggttactgcatccatggaaaatgtgaattcatctattctactcagaaggcttcttgtagatgtgaatctggctacactggacagcactgtgaaaagacagactttagtattctctatgtagtgccaagtaggcaaaagctcactcatgttcttattgcagcaattattggagctgtacagattgccatcatagtagcaattgtaatgtgcataacaagaaaatgccccaaaaacaatagaggacgtcgacagaagcaaaacctaggtcattttacttcagatacgtcatccagaatggtttaaactgatgacttttatatgtacactgaccatgtgatgtacatttattatgtctttttttaaagaatggaaatatttatttcagaggccttatttttggacatttttagtgtagtactgttggctcgtatttagaatattcagctacgacagttttggactgtttagtagtctttgttttatgtttttaaatacagaaattgctttcacaaatttgtaccacatggtaattctaagacttgttctttacccatggaatgtaatatttttgcaaagatggactacttcacaaatggttataaagtcatatccacttcttccacaatgaccacagcaaatgaccaagcatgaactaaaggtaaagatgtttacagattacttttcttacaaaaaaaatctagaagacactgtgtttaaatagatatttaaatgtttttgagatttagtaactgattttttagacactgcctatcgcatgaactgtaaagctgtgtgtattaggtgtaaaatatttataagatatatggactggggaatttgattattcctccctttgaaaaaatagtcctaataatttgaacaaatatgttagtaatgatggaacagatcaatgaaaagtagatatagatattgtgaaaataggctgtttaacaaacagattggaataaagcctattctaccagttaaactactttaatacacattcatttttaaagaaaatgtttgttttaacataaataaacaaatcgtatcagtgtttgtgaataaaatacaaaaatgattgttaatgattggtgctcttaaagtgagcttaaaatttatccaagacgtatatccaaatttgtcctgtagtaatagattaatattcatagattgttggtgtttaaagatctgaagtgtgagtagaatgtattcagctgtttaacatgtagtttagatattcaaaagtatgcatgtagaatttaaagaatatgttaaaaattattaattttaatattttgtttggaaaagcatgttataatataatgttttcactata

SEQ ID NO: 155488 - DNA, 1939 bp, Homo sapiens
  Payload ID: 10570
  Gene Symbol: MSX1
  Gene Name: msh homeobox 1
  Uniprot ID: P28360
  ENST ID: ENST00000382723
  CDS Start-End: 235-1146
gggcccggagccggcgagtgctcccgggaactctgcctgcgcggcggcagcgaccggaggccaggcccagcacgccggagctggcctgctggggaggggcgggaggcgcgcgcgggagggtccgcccggccagggccccgggcgctcgcagaggccggccgcgctcccagcccgcccggagcccatgcccggcggctggccagtgctgcggcagaagggggggcccggctctgcatggccccggctgctgacatgacttctttgccactcggtgtcaaagtggaggactccgccttcggcaagccggcggggggaggcgcgggccaggcccccagcgccgccgcggccacggcagccgccatgggcgcggacgaggagggggccaagcccaaagtgtccccttcgctcctgcccttcagcgtggaggcgctcatggccgaccacaggaagccgggggccaaggagagcgccctggcgccctccgagggcgtgcaggcggcgggtggctcggcgcagccactgggcgtcccgccggggtcgctgggagccccggacgcgccctcttcgccgcggccgctcggccatttctcggtggggggactcctcaagctgccagaagatgcgctcgtcaaagccgagagccccgagaagcccgagaggaccccgtggatgcagagcccccgcttctccccgccgccggccaggcggctgagccccccagcctgcaccctccgcaaacacaagacgaaccgtaagccgcggacgcccttcaccaccgcgcagctgctggcgctggagcgcaagttccgccagaagcagtacctgtccatcgccgagcgcgcggagttctccagctcgctcagcctcactgagacgcaggtgaagatatggttccagaaccgccgcgccaaggcaaagagactacaagaggcagagctggagaagctgaagatggccgccaagcccatgctgccaccggctgccttcggcctctccttccctctcggcggccccgcagctgtagcggccgcggcgggtgcctcgctctacggtgcctctggccccttccagcgcgccgcgctgcctgtggcgcccgtgggactctacacggcccatgtgggctacagcatgtaccacctgacatagagggtcccaggtcgcccacctgtgggccagccgattcctccagccctggtgctgtacccccgacgtgctcccctgctcggcaccgccagccgccttccctttaaccctcacactgctccagtttcacctctttgctccctgagttcactctccgaagtctgatccctgccaaaaagtggctggaagagtcccttagtactcttctagcatttagatctacactctcgagttaaagatggggaaactgagggcagagaggttaacagatttatctaaggtccccagcagaattgacagttgaacagagctagaggccatgtctcctgcatagcttttccctgtcctgacaccaggcaagaaaagcgcagagaaatcggtgtctgacgattttggaaatgagaacaatctcaaaaaaaaaaaaaaaaaaaaaaaaaaaaaaaaaaaagaaaagagaaaaaaaagactagccagccaggaagatgaatcctagcttcttccattggaaaatttaagacaagttcaacaacaaaacatttgctctggggggcagggaaaacacagatgtgttgcaaaggtaggttgaagggacctctctcttaccagtaccagaaacacaattgtaaaattaaaaaaaaaaaaaaactctttctatttaacagtacatttgtgtggctctcaaacatccctttggaagggattgtgtgtactatgtaatatactgtatatttgaaattttattatcatttatattatagctatatttgttaaataaattaattttaagctacaaaaa

SEQ ID NO: 155489 - DNA, 2241 bp, Homo sapiens
  Payload ID: 10571
  Gene Symbol: MSX2
  Gene Name: msh homeobox 2
  Uniprot ID: P35548
  ENST ID: ENST00000239243
  CDS Start-End: 128-931
cttcccctcggaggaaaggctcagctcccagcgcgcccctcccgtctccgcagcaaaaaagtttgagtcgccgctgccgggttgccagcggagtcgcgcgtcgggagctacgtagggcagagaagtcatggcttctccgtccaaaggcaatgacttgttttcgcccgacgaggagggcccagcagtggtggccggaccaggcccggggcctgggggcgccgagggggccgcggaggagcgccgcgtcaaggtctccagcctgcccttcagcgtggaggcgctcatgtccgacaagaagccgcccaaggaggcgtccccgctgccggccgaaagcgcctcggccggggccaccctgcggccactgctgctgtcggggcacggcgctcgggaagcgcacagccccgggccgctggtgaagcccttcgagaccgcctcggtcaagtcggaaaattcagaagatggagcggcgtggatgcaggaacccggccgatattcgccgccgccaagacatatgagccctaccacctgcaccctgaggaaacacaagaccaatcggaagccgcgcacgccctttaccacatcccagctcctcgccctggagcgcaagttccgtcagaaacagtacctctccattgcagagcgtgcagagttctccagctctctgaacctcacagagacccaggtcaaaatctggttccagaaccgaagggccaaggcgaaaagactgcaggaggcagaactggaaaagctgaaaatggctgcaaaacctatgctgccctccagcttcagtctccctttccccatcagctcgcccctgcaggcagcgtccatatatggagcatcctacccgttccatagacctgtgcttcccatcccgcctgtgggactctatgccacgccagtgggatatggcatgtaccacctgtcctaaggaagaccagatcaatagactccatgatggatgcttgtttcaaagggtttcctctccctctccacgaaggcagtaccagccagtactcctgctctgctaaccctgcgtgcaccaccctaagcggctaggctgacagggccacacgacatagctgaaatttgttctgtaggcggaggcaccaagccctgttttcttggtgtaatcttccagatgcccccttttcctttcacaaagattggctctgatggtttttatgtataaatatatatatataataaaatataatacatttttatacagcagacgtaaaaattcaaattattttaaaaggcaaaatttatatacatatgtgctttttttctatatctcaccttcccaaaagacactgtgtaagtccatttgttgtattttcttaaagagggagacaaattatttgcaaaatgtgctaaagtcaatgatttttacgggattattgacttctgcttatggaaaacaaagaaacagacacaatgcacacagaaaatattagatatggagagattattcaaagtgaaggggacacatcatatttctgcattttacttgcattaaaagaaacctctttatatactacagttgttcctatctctcccccgccccccaccgccccaccacacacatatttttaaagtttttccttttttaagaatatttttgtaagaccaatacctgggatgagaagaatcctgagactgcctggaggtgaggtagaaaattagaaatacttcctaattcttctcaaggctgttggtaactttatttcagataattggagagtaaaatgttaaaacctgttgagaggaattgatggtttctgagaaatactaggtacattcatcctcacagattgcaaaggtgatttgggtgggggtttagtaattttctgcttaaaaaatgagtatcttgtaaccattacctatatgctaaatattcttgaacaattagtagatccagaaagaaaaaaaaatatgctttctctgtgtgtgtacctgttgtatgtcctaaacttattagaaaattttatatacttttttacatgttggggggcagaaggtaaagccatgttttgacttggtgaaaatgggattgtcaaacagcccattaagttccctggtatttcaccttcctgtccatctgtcccctccctccggtatacctttatccctttgaaagggtgcttgtacaatttgatatattttattgaagagttatctcttattctgaattaaattaagcatttgttttattgcagtaaagtttgtccaaactca

SEQ ID NO: 155490 - DNA, 1188 bp, Homo sapiens
  Payload ID: 10571
  Gene Symbol: MSX2
  Gene Name: msh homeobox 2
  ENST ID: ENST00000507785
  CDS Start-End: 59-463
gccgctgccgggttgccagcggagtcgcgcgtcgggagctacgtagggcagagaagtcatggcttctccgtccaaaggcaatgacttgttttcgcccgacgaggagggcccagcagtggtggccggaccaggcccggggcctgggggcgccgagggggccgcggaggagcgccgcgtcaaggtctccagcctgcccttcagcgtggaggcgctcatgtccgacaagaagccgcccaaggaggcgtccccgctgccggccgaaagcgcctcggccggggccaccctgcggccactgctgctgtcggggcacggcgctcgggaagcgcacagccccgggccgctggtgaagcccttcgagaccgcctcggtcaagtcggaaaattcagaagatggagcggcgtggatgcaggaacccggccgatattcgccgccgccaagtgagtgcgcgccggggcaggagtaggaggacatatgagccctaccacctgcaccctgaggaaacacaagaccaatcggaagccgcgcacgccctttaccacatcccagctcctcgccctggagcgcaagttccgtcagaaacagtacctctccattgcagagcgtgcagagttctccagctctctgaacctcacagagacccaggtcaaaatctggttccagaaccgaagggccaaggcgaaaagactgcaggaggcagaactggaaaagctgaaaatggctgcaaaacctatgctgccctccagcttcagtctccctttccccatcagctcgcccctgcaggcagcgtccatatatggagcatcctacccgttccatagacctgtgcttcccatcccgcctgtgggactctatgccacgccagtgggatatggcatgtaccacctgtcctaaggaagaccagatcaatagactccatgatggatgcttgtttcaaagggtttcctctccctctccacgaaggcagtaccagccagtactcctgctctgctaaccctgcgtgcaccaccctaagcggctaggctgacagggccacacgacatagctgaaatttgttctgtaggcggaggcaccaagccctgttttcttggtgtaatcttccagatgcccccttttcctttcacaaagattggctctgatggtttttatgtataaatatatatatataataaaatataatacatttttata

SEQ ID NO: 155491 - DNA, 3991 bp, Homo sapiens
  Payload ID: 10572
  Gene Symbol: MSH5-SAPCD1
  Gene Name: MSH5-SAPCD1 readthrough (NMD candidate)
  ENST ID: ENST00000493662
  CDS Start-End: 57-2612
ggcggtcggtcagcggggcgttctcccacctgtagcgactcagagcctccaagctcatggcctccttaggagcgaacccaaggaggacaccgcagggaccgagacctggggcggcctcctccggcttccccagcccggccccagtgccgggccccagggaggccgaggaggaggaagtcgaggaggaggaggagctggccgagatccatctgtgtgtgctgtggaattcaggatacttgggcattgcctactatgatactagtgactccactatccacttcatgccagatgccccagaccacgagagcctcaagcttctccagagagttctggatgagatcaatccccagtctgttgttacgagtgccaaacaggatgagaatatgactcgatttctgggaaagcttgcctcccaggagcacagagagcctaaaagacctgaaatcatatttttgccaagtgtggattttggtctggagataagcaaacaacgcctcctttctggaaactactccttcatcccagacgccatgactgccactgagaaaatcctcttcctctcttccattattccctttgactgcctcctcacacccccaggagatttaagatttaccccgattccactgctgatcccctcccaggttcgagcacttggagggctgctgaagttcctgggtcgaagaagaatcggggttgaactggaagactataatgtcagcgtccccatcctgggctttaagaaatttatgttgactcatctggtgaacatagatcaagacacttacagtgttctacagatttttaagagtgagtctcacccctcagtgtacaaagtggccagtggactgaaggaggggctcagcctctttggaatcctcaacagatgccactgtaagtggggagagaagctgctcaggctatggttcacacgtccgactcatgacctgggggagctcagttctcgtctggacgtcattcagttttttctgctgccccagaatctggacatggctcagatgctgcatcggctcctgggtcacatcaagaacgtgcctctgattctgaaacgcatgaagttgtcccacaccaaggtcagcgactggcaggttctctacaagactgtgtacagtgccctgggcctgagggatgcctgccgctccctgccgcagtccatccagctctttcgggacattgcccaagagttctctgatgacctgcaccatatcgccagcctcattgggaaagtagtggactttgagggcagccttgctgaaaatcgcttcacagtcctccccaacatagatcctgaaattgatgagaaaaagcgaagactgatgggacttcccagtttccttactgaggttgcccgcaaggagctggagaatctggactcccgtattccttcatgcagtgtcatctacatccctctgattggcttccttctttctattccccgcctgccttccatggtagaggccagtgactttgagattaatggactggacttcatgtttctctcagaggagaagctgcactatcgtagtgcccgaaccaaggagctggatgcattgctgggggacctgcactgcgagatccgggaccaggagacgctgctgatgtaccagctacagtgccaggtgctggcacgagcagctgtcttaacccgagtattggaccttgcctcccgcctggacgtcctgctggctcttgccagtgctgcccgggactatggctactcaaggccgcgttactccccacaagtccttggggtacgaatccagaatggcagacatcctctgatggaactctgtgcccgaacctttgtgcccaactccacagaatgtggtggggacaaagggagggtcaaagtcatcactggacccaactcatcagggaagagcatatacctcaaacaggtaggcttgatcacattcatggccctggtaggcagctttgtgccagcagaggaggccgaaattggggcagtagacgccatcttcacacgaattcatagctgcgaatccatctcccttggcctctccaccttcatgatcgacctcaaccaggtggcgaaagcagtgaacaatgccactgcacagtcgctggtccttattgatgaatttggaaagggaaccaacacggtggatgggctcgcgcttctggccgctgtgctccgacactggctggcacgtggacccacatgcccccacatctttgtggccaccaactttctgagccttgttcagctacaactgctgccacaagggcccctggtgcagtatttgaccatggagacctgtgaggatggcaacgatcttgtcttcttctatcaggtttgcgaaggtgttgcgaaggccagccatgcctcccacacagctgcccaggctgggcttcctgacaagcttgtggctcgtggcaaggaggtctcagacttgatccgcagtggaaaacccatcaagcctgtcaaggatttgctaaagaagaaccaaatggaaaattgccagacattagtggataagtttatgaaactggatttggaagatcctaacctggacttgaacgttttcatgagccaggaagtgctgcctgctgccaccagcatcctctgagagtccttccagtgtcctccccagcctcctgagactccggtgggctgccatgccctctttgtttccttatctccctcagacgcagagtttttagtttctctagaaattttgtttcatattaggaataaagtttattttgaagaaagatattgtttctttagtctcaaaacaagagactaggaaagatccaaaacacagagcaggagtccacaggggaacctgccctgcctcagtaaaaatacagtgttgttgctgtaggaagactcccggattctaccccaggatacttcatgagaacgaaccccttcagagaggccctacaaaacagattagagggaagacagaggggtccaagggagatggtctctcttctcaagtaggaacaccccagcctcagacagacacagcaggaaggggcctgagaggctgacagaggcaggatgggtgcaaggcaggggtggaggggagggaccagcccgggctgcaccagtgggagtggctccacccttcccacctcagagccatggggagccagggctctggcggggtgcccttggtgcaggctccctacacagtcctgctgctgccgctggggacaagccgccaagacccaggggcccagagcttcttcctttggctacgcaggatgcaggctctggagagagaacaggatgccctgtggcagggtctggagctgctacagcatggccaggcctggtttgaagaccatctgagggaggcacagcgacagcagctgcatctaggggcccttggtgagaattttctaacagatttacactcagagcctggtcgccccccgttagcccagattcaaaaggtgaacatctgtttgcagaatctgattcatgagaagttctccccaagtccactgaacaaggctagttcctgcaccacccaggattcaaaggaaagacgaagggagcagaacttgtggcagcaacaggagttgtcaaggcagcagaaaggagtcacccagccaaaggaggagatggctcagcggggctgcaccaaggggccaagaggccctacccgtgtctaaaccctcctctcactcccctaagcctggtgaaagagtcagaagccccaggctcctttttctgtttcttaactcaacagctaaaaaatggctccaggtagtgagtcaatgaagttcagacatgttggtgtaaagtttctcctctgctcctgaaaacttcatcttcttggtgtctcatgtcctcattctcccctatatgacatgcaaaaacgatctttctttgaaatccctctgggaagaagcatgtttattgaaactgtccttcagccttaaatacaaaaataaaactgaaactgctccagaaagcagctttctccaaaaa

SEQ ID NO: 155492 - DNA, 2216 bp, Homo sapiens
  Payload ID: 10572
  Gene Symbol: MSH5-SAPCD1
  Gene Name: MSH5-SAPCD1 readthrough (NMD candidate)
  ENST ID: ENST00000498473
  CDS Start-End: 1-793
gcactatcgtagtgcccgaaccaaggagctggatgcattgctgggggacctgcactgcgagatccgggaccaggagacgctgctgatgtaccagctacagtgccaggtgctggcacgagcagctgtcttaacccgagtattggaccttgcctcccgcctggacgtcctgctggctcttgccagtgctgcccgggactatggctactcaaggccgcgttactccccacaagtccttggggtacgaatccagaatggcagacatcctctgatggaactctgtgcccgaacctttgtgcccaactccacagaatgtggtggggacaaagggagggtcaaagtcatcactggacccaactcatcagggaagagcatatacctcaaacaggtaggcttgatcacattcatggccctggtaggcagctttgtgccagcagaggaggccgaaattggggcagtagacgccatcttcacacgaattcatagctgcgaatccatctcccttggcctctccaccttcatgatcgacctcaaccaggtggcgaaagcagtgaacaatgccactgcacagtcgctggtccttattgatgaatttggaaagggaaccaacacggtggatgggctcgcgcttctggccgctgtgctccgacactggctggcacgtggacccacatgcccccacatctttgtggccaccaactttctgagccttgttcagctacaactgctgccacaagggcccctggtgcagtatttggattggccaagggtttcaggacaggaaggaggtgattgatgatacactgtcttttattctcttttaagaccatggagacctgtgaggatggcaacgatcttgtcttcttctatcaggtctcagacttgatccgcagtggaaaacccatcaagcctgtcaaggatttgctaaagaagaaccaaatggaaaattgccagacattagtggataagtttatgaaactggatttggaagatcctaacctggacttgaacgttttcatgagccaggaagtgctgcctgctgccaccagcatcctctgagagtccttccagtgtcctccccagcctcctgagactccggaagactcccggattctaccccaggatacttcatgagaacgaaccccttcagagaggccctacaaaacagattagagggaagacagaggggtccaagggagatggtctctcttctcaagtaggaacaccccagcctcagacagacacagcaggaaggggcctgagaggctgacagaggcaggatgggtgcaaggcaggggtggaggggagggaccagcccgggctgcaccagtgggagtggctccacccttcccacctcagagccatggggagccagggctctggcggggtgcccttggtgcaggctccctacacagtcctgctgctgccgctggggacaagccgccaagacccaggggcccagagcttcttcctttggctacgcaggatgcaggctctggagagagaacaggatgccctgtggcagggtctggagctgctacagcatggccaggcctggtttgaagaccatctgagggaggcacagcgacagcagctgcatctaggggcccttggtgagaattttctaacagatttacactcagagcctggtcgccccccgttagcccagattcaaaaggtgaacatctgtttgcagaatctgattcatgagaagttctccccaagtccactgaacaaggctagttcctgcaccacccaggattcaaaggaaagacgaagggagcagaacttgtggcagcaacaggagttgtcaaggcagcagaaaggagtcacccagccaaaggaggagatggctcagcggggctgcaccaaggggccaagaggccctacccgtgtctaaaccctcctctcactcccctaagcctggtgaaagagtcagaagccccaggctcctttttctgtttcttaactcaacagctaaaaaatggctccaggtagtgagtcaatgaagttcagacatgttggtgtaaagtttctcctctgctcctgaaaacttcatcttcttggtgtctcatgtcctcattctcccctatatgacatgcaaaaacgatctttctttgaaatccctctgggaagaagcatgtttattgaaactgtccttcagccttaaatacaaaaataaaactgaaactgctccagaaagcagctttctccaaaaa

SEQ ID NO: 155493 - DNA, 950 bp, Homo sapiens
  Payload ID: 10572
  Gene Symbol: MSH5-SAPCD1
  Gene Name: MSH5-SAPCD1 readthrough (NMD candidate)
  ENST ID: ENST00000476085
  CDS Start-End: 1-88
tatgaaactggatttggaagatcctaacctggacttgaacgttttcatgagccaggaagtgctgcctgctgccaccagcatcctctgagagtccttccagtgtcctccccagcctcctgagactccgctacgcaggatgcaggctctggagagagaacaggatgccctgtggcagggtctggagctgctacagcatggccaggcctggtttgaagaccatctgagggaggcacagcgacagcagctgcatctaggggcccttggtgagaattttctaacagatttacactcagagcctggtcgccccccgttagcccagattcaaaaggtgaacatctgtttgcagaatctgattcatgagaagttctccccaagtccactgaacaaggctagttcctgcaccacccaggattcaaaggaaagacgaagggagcagaacttgtggcagcaacaggtaaacttcaagaaggagggcaggagccccaccctacagggctgggaggagcccagaggccccatctgtttctcctccaggagttgtcaaggcagcagaaaggagtcacccagccaaaggaggagatggctcagcggggctgcaccaaggggccaagaggccctacccgtgtctaaaccctcctctcactcccctaagcctggtgaaagagtcagaagccccaggctcctttttctgtttcttaactcaacagctaaaaaatggctccaggtagtgagtcaatgaagttcagacatgttggtgtaaagtttctcctctgctcctgaaaacttcatcttcttggtgtctcatgtcctcattctcccctatatgacatgcaaaaacgatctttctttgaaatccctctgggaagaagcatgtttattgaaactgtccttcagccttaaatacaaaaataaaactgaaactgctccagaaagcagctttctccaaaaat

SEQ ID NO: 155494 - DNA, 3992 bp, Homo sapiens
  Payload ID: 10572
  Gene Symbol: MSH5-SAPCD1
  Gene Name: MSH5-SAPCD1 readthrough (NMD candidate)
  ENST ID: ENST00000469644
  CDS Start-End: 57-2612
ggcggtcggtcagcggggcgttctcccacctgtagcgactcagagcctccaagctcatggcctccttaggagcgaacccaaggaggacaccgcagggaccgagacctggggcggcctcctccggcttccccagcccggccccagtgccgggccccagggaggccgaggaggaggaagtcgaggaggaggaggagctggccgagatccatctgtgtgtgctgtggaattcaggatacttgggcattgcctactatgatactagtgactccactatccacttcatgccagatgccccagaccacgagagcctcaagcttctccagagagttctggatgagatcaatccccagtctgttgttacgagtgccaaacaggatgagaatatgactcgatttctgggaaagcttgcctcccaggagcacagagagcctaaaagacctgaaatcatatttttgccaagtgtggattttggtctggagataagcaaacaacgcctcctttctggaaactactccttcatcccagacgccatgactgccactgagaaaatcctcttcctctcttccattattccctttgactgcctcctcacacccccaggagatttaagatttaccccgattccactgctgatcccctcccaggttcgagcacttggagggctgctgaagttcctgggtcgaagaagaatcggggttgaactggaagactataatgtcagcgtccccatcctgggctttaagaaatttatgttgactcatctggtgaacatagatcaagacacttacagtgttctacagatttttaagagtgagtctcacccctcagtgtacaaagtggccagtggactgaaggaggggctcagcctctttggaatcctcaacagatgccactgtaagtggggagagaagctgctcaggctatggttcacacgtccgactcatgacctgggggagctcagttctcgtctggacgtcattcagttttttctgctgccccagaatctggacatggctcagatgctgcatcggctcctgggtcacatcaagaacgtgcctctgattctgaaacgcatgaagttgtcccacaccaaggtcagcgactggcaggttctctacaagactgtgtacagtgccctgggcctgagggatgcctgccgctccctgccgcagtccatccagctctttcgggacattgcccaagagttctctgatgacctgcaccatatcgccagcctcattgggaaagtagtggactttgagggcagccttgctgaaaatcgcttcacagtcctccccaacatagatcctgaaattgatgagaaaaagcgaagactgatgggacttcccagtttccttactgaggttgcccgcaaggagctggagaatctggactcccgtattccttcatgcagtgtcatctacatccctctgattggcttccttctttctattccccgcctgccttccatggtagaggccagtgactttgagattaatggactggacttcatgtttctctcagaggagaagctgcactatcgtagtgcccgaaccaaggagctggatgcattgctgggggacctgcactgcgagatccgggaccaggagacgctgctgatgtaccagctacagtgccaggtgctggcacgagcagctgtcttaacccgagtattggaccttgcctcccgcctggacgtcctgctggctcttgccagtgctgcccgggactatggctactcaaggccgcgttactccccacaagtccttggggtacgaatccagaatggcagacatcctctgatggaactctgtgcccgaacctttgtgcccaactccacagaatgtggtggggacaaagggagggtcaaagtcatcactggacccaactcatcagggaagagcatatacctcaaacaggtaggcttgatcacattcatggccctggtaggcagctttgtgccagcagaggaggccgaaattggggcagtagacgccatcttcacacgaattcatagctgcgaatccatctcccttggcctctccaccttcatgatcgacctcaaccaggtggcgaaagcagtgaacaatgccactgcacagtcgctggtccttattgatgaatttggaaagggaaccaacacggtggatgggctcgcgcttctggccgctgtgctccgacactggctggcacgtggacccacatgcccccacatctttgtggccaccaactttctgagccttgttcagctacaactgctgccacaagggcccctggtgcagtatttgaccatggagacctgtgaggatggcaacgatcttgtcttcttctatcaggtttgcgaaggtgttgcgaaggccagccatgcctcccacacagctgcccaggctgggcttcctgacaagcttgtggctcgtggcaaggaggtctcagacttgatccgcagtggaaaacccatcaagcctgtcaaggatttgctaaagaagaaccaaatggaaaattgccagacattagtggataagtttatgaaactggatttggaagatcctaacctggacttgaacgttttcatgagccaggaagtgctgcctgctgccaccagcatcctctgagagtccttccagtgtcctccccagcctcctgagactccggtgggctgccatgccctctttgtttccttatctccctcagacgcagagtttttagtttctctagaaattttgtttcatattaggaataaagtttattttgaagaaagatattgtttctttagtctcaaaacaagagactaggaaagatccaaaacacagagcaggagtccacaggggaacctgccctgcctcagtaaaaatacagtgttgttgctgtaggaagactcccggattctaccccaggatacttcatgagaacgaaccccttcagagaggccctacaaaacagattagagggaagacagaggggtccaagggagatggtctctcttctcaagtaggaacaccccagcctcagacagacacagcaggaaggggcctgagaggctgacagaggcaggatgggtgcaaggcaggggtggaggggagggaccagcccgggctgcaccagtgggagtggctccacccttcccacctcagagccatggggagccagggctctggcggggtgcccttggtgcaggctccctacacagtcctgctgctgccgctggggacaagccgccaagacccaggggcccagagcttcttcctttggctacgcaggatgcaggctctggagagagaacaggatgccctgtggcagggtctggagctgctacagcatggccaggcctggtttgaagaccatctgagggaggcacagcgacagcagctgcatctaggggcccttggtgagaattttctaacagatttacactcagagcctggtcgccccccgttagcccagattcaaaaggtgaacatctgtttgcagaatctgattcatgagaagttctccccaagtccactgaacaaggctagttcctgcaccacccaggattcaaaggaaagacgaagggagcagaacttgtggcagcaacaggagttgtcaaggcagcagaaaggagtcacccagccaaaggaggagatggctcagcggggctgcaccaaggggccaagaggccctacccgtgtctaaaccctcctctcactcccctaagcctggtgaaagagtcagaagccccaggctcctttttctgtttcttaactcaacagctaaaaaatggctccaggtagtgagtcaatgaagttcagacatgttggtgtaaagtttctcctctgctcctgaaaacttcatcttcttggtgtctcatgtcctcattctcccctatatgacatgcaaaaacgatctttctttgaaatccctctgggaagaagcatgtttattgaaactgtccttcagccttaaatacaaaaataaaactgaaactgctccagaaagcagctttctccaaaaat

SEQ ID NO: 155495 - DNA, 2217 bp, Homo sapiens
  Payload ID: 10572
  Gene Symbol: MSH5-SAPCD1
  Gene Name: MSH5-SAPCD1 readthrough (NMD candidate)
  ENST ID: ENST00000482009
  CDS Start-End: 1-793
gcactatcgtagtgcccgaaccaaggagctggatgcattgctgggggacctgcactgcgagatccgggaccaggagacgctgctgatgtaccagctacagtgccaggtgctggcacgagcagctgtcttaacccgagtattggaccttgcctcccgcctggacgtcctgctggctcttgccagtgctgcccgggactatggctactcaaggccgcgttactccccacaagtccttggggtacgaatccagaatggcagacatcctctgatggaactctgtgcccgaacctttgtgcccaactccacagaatgtggtggggacaaagggagggtcaaagtcatcactggacccaactcatcagggaagagcatatacctcaaacaggtaggcttgatcacattcatggccctggtaggcagctttgtgccagcagaggaggccgaaattggggcagtagacgccatcttcacacgaattcatagctgcgaatccatctcccttggcctctccaccttcatgatcgacctcaaccaggtggcgaaagcagtgaacaatgccactgcacagtcgctggtccttattgatgaatttggaaagggaaccaacacggtggatgggctcgcgcttctggccgctgtgctccgacactggctggcacgtggacccacatgcccccacatctttgtggccaccaactttctgagccttgttcagctacaactgctgccacaagggcccctggtgcagtatttggattggccaagggtttcaggacaggaaggaggtgattgatgatacactgtcttttattctcttttaagaccatggagacctgtgaggatggcaacgatcttgtcttcttctatcaggtctcagacttgatccgcagtggaaaacccatcaagcctgtcaaggatttgctaaagaagaaccaaatggaaaattgccagacattagtggataagtttatgaaactggatttggaagatcctaacctggacttgaacgttttcatgagccaggaagtgctgcctgctgccaccagcatcctctgagagtccttccagtgtcctccccagcctcctgagactccggaagactcccggattctaccccaggatacttcatgagaacgaaccccttcagagaggccctacaaaacagattagagggaagacagaggggtccaagggagatggtctctcttctcaagtaggaacaccccagcctcagacagacacagcaggaaggggcctgagaggctgacagaggcaggatgggtgcaaggcaggggtggaggggagggaccagcccgggctgcaccagtgggagtggctccacccttcccacctcagagccatggggagccagggctctggcggggtgcccttggtgcaggctccctacacagtcctgctgctgccgctggggacaagccgccaagacccaggggcccagagcttcttcctttggctacgcaggatgcaggctctggagagagaacaggatgccctgtggcagggtctggagctgctacagcatggccaggcctggtttgaagaccatctgagggaggcacagcgacagcagctgcatctaggggcccttggtgagaattttctaacagatttacactcagagcctggtcgccccccgttagcccagattcaaaaggtgaacatctgtttgcagaatctgattcatgagaagttctccccaagtccactgaacaaggctagttcctgcaccacccaggattcaaaggaaagacgaagggagcagaacttgtggcagcaacaggagttgtcaaggcagcagaaaggagtcacccagccaaaggaggagatggctcagcggggctgcaccaaggggccaagaggccctacccgtgtctaaaccctcctctcactcccctaagcctggtgaaagagtcagaagccccaggctcctttttctgtttcttaactcaacagctaaaaaatggctccaggtagtgagtcaatgaagttcagacatgttggtgtaaagtttctcctctgctcctgaaaacttcatcttcttggtgtctcatgtcctcattctcccctatatgacatgcaaaaacgatctttctttgaaatccctctgggaagaagcatgtttattgaaactgtccttcagccttaaatacaaaaataaaactgaaactgctccagaaagcagctttctccaaaaat

SEQ ID NO: 155496 - DNA, 2121 bp, Homo sapiens
  Payload ID: 10572
  Gene Symbol: MSH5-SAPCD1
  Gene Name: MSH5-SAPCD1 readthrough (NMD candidate)
  ENST ID: ENST00000552302
  CDS Start-End: 1361-1807
gcactatcgtagtgcccgaaccaaggagctggatgcattgctgggggacctgcactgcgagatccgggaccaggagacgctgctgatgtaccagctacagtgccaggtgctggcacgagcagctgtcttaacccgagtattggaccttgcctcccgcctggacgtcctgctggctcttgccagtgctgcccgggactatggctactcaaggccgcgttactccccacaagtccttggggtacgaatccagaatggcagacatcctctgatggaactctgtgcccgaacctttgtgcccaactccacagaatgtggtggggacaaagggagggtcaaagtcatcactggacccaactcatcagggaagagcatatacctcaaacaggtaggcttgatcacattcatggccctggtaggcagctttgtgccagcagaggaggccgaaattggggcagtagacgccatcttcacacgaattcatagctgcgaatccatctcccttggcctctccaccttcatgatcgacctcaaccaggtggcgaaagcagtgaacaatgccactgcacagtcgctggtccttattgatgaatttggaaagggaaccaacacggtggatgggctcgcgcttctggccgctgtgctccgacactggctggcacgtggacccacatgcccccacatctttgtggccaccaactttctgagccttgttcagctacaactgctgccacaagggcccctggtgcagtatttggattggccaagggtttcaggacaggaaggaggtgattgatgatacactgtcttttattctcttttaagaccatggagacctgtgaggatggcaacgatcttgtcttcttctatcaggtctcagacttgatccgcagtggaaaacccatcaagcctgtcaaggatttgctaaagaagaaccaaatggaaaattgccagacattagtggataagtttatgaaactggatttggaagatcctaacctggacttgaacgttttcatgagccaggaagtgctgcctgctgccaccagcatcctctgagagtccttccagtgtcctccccagcctcctgagactccggaagactcccggattctaccccaggatacttcatgagaacgaaccccttcagagaggccctacaaaacagattagagggaagacagaggggtccaagggagatggtctctcttctcaagtaggaacaccccagcctcagacagacacagcaggaaggggcctgagaggctgacagaggcaggatgggtgcaaggcaggggtggaggggagggaccagcccgggctgcaccagtgggagtggctccacccttcccacctcagagccatggggagccagggctctggcggggtgcccttggtgcaggctccctacacagtcctgctgctgccgctggggacaagccgccaagacccaggggcccagagcttcttcctttggctacgcaggatgcaggctctggagagagaacaggatgccctgtggcagggtctggagctgctacagcatggccaggcctggtttgaagaccatctgagggaggcacagcgacagcagctgcatctaggggcccttggtgagaattttctaacagatttacactcagagcctggtcgccccccgttagcccagattcaaaaggtgaacatctgtttgcagaatctgattcatgagaaggagttgtcaaggcagcagaaaggagtcacccagccaaaggaggagatggctcagcggggctgcaccaaggggccaagaggccctacccgtgtctaaaccctcctctcactcccctaagcctggtgaaagagtcagaagccccaggctcctttttctgtttcttaactcaacagctaaaaaatggctccaggtagtgagtcaatgaagttcagacatgttggtgtaaagtttctcctctgctcctgaaaacttcatcttcttggtgtctcatgtcctcattctcccctatatgacatgcaaaaacgatctttctttgaaatccctctgggaagaagcatgtttattgaaactgtccttcagccttaaatacaaaaataaaactgaaactgctccagaaagcagctttctcc

SEQ ID NO: 155497 - DNA, 821 bp, Homo sapiens
  Payload ID: 10572
  Gene Symbol: MSH5-SAPCD1
  Gene Name: MSH5-SAPCD1 readthrough (NMD candidate)
  Uniprot ID: Q5SSQ6
  ENST ID: ENST00000547662
  CDS Start-End: 60-506
ggagggaccagcccgggctgcaccagtgggagtggctccacccttcccacctcagagccatggggagccagggctctggcggggtgcccttggtgcaggctccctacacagtcctgctgctgccgctggggacaagccgccaagacccaggggcccagagcttcttcctttggctacgcaggatgcaggctctggagagagaacaggatgccctgtggcagggtctggagctgctacagcatggccaggcctggtttgaagaccatctgagggaggcacagcgacagcagctgcatctaggggcccttggtgagaattttctaacagatttacactcagagcctggtcgccccccgttagcccagattcaaaaggtgaacatctgtttgcagaatctgattcatgagaaggagttgtcaaggcagcagaaaggagtcacccagccaaaggaggagatggctcagcggggctgcaccaaggggccaagaggccctacccgtgtctaaaccctcctctcactcccctaagcctggtgaaagagtcagaagccccaggctcctttttctgtttcttaactcaacagctaaaaaatggctccaggtagtgagtcaatgaagttcagacatgttggtgtaaagtttctcctctgctcctgaaaacttcatcttcttggtgtctcatgtcctcattctcccctatatgacatgcaaaaacgatctttctttgaaatccctctgggaagaagacatgtttattgaaactgtccttcagccttaaatacaaaaataaaactgaaactgctccagaaagcagctttctcc

SEQ ID NO: 155498 - DNA, 820 bp, Homo sapiens
  Payload ID: 10572
  Gene Symbol: MSH5-SAPCD1
  Gene Name: MSH5-SAPCD1 readthrough (NMD candidate)
  Uniprot ID: Q5SSQ6
  ENST ID: ENST00000548987
  CDS Start-End: 60-506
ggagggaccagcccgggctgcaccagtgggagtggctccacccttcccacctcagagccatggggagccagggctctggcggggtgcccttggtgcaggctccctacacagtcctgctgctgccgctggggacaagccgccaagacccaggggcccagagcttcttcctttggctacgcaggatgcaggctctggagagagaacaggatgccctgtggcagggtctggagctgctacagcatggccaggcctggtttgaagaccatctgagggaggcacagcgacagcagctgcatctaggggcccttggtgagaattttctaacagatttacactcagagcctggtcgccccccgttagcccagattcaaaaggtgaacatctgtttgcagaatctgattcatgagaaggagttgtcaaggcagcagaaaggagtcacccagccaaaggaggagatggctcagcggggctgcaccaaggggccaagaggccctacccgtgtctaaaccctcctctcactcccctaagcctggtgaaagagtcagaagccccaggctcctttttctgtttcttaactcaacagctaaaaaatggctccaggtagtgagtcaatgaagttcagacatgttggtgtaaagtttctcctctgctcctgaaaacttcatcttcttggtgtctcatgtcctcattctcccctatatgacatgcaaaaacgatctttctttgaaatccctctgggaagaagcatgtttattgaaactgtccttcagccttaaatacaaaaataaaactgaaactgctccagaaagcagctttctcc

SEQ ID NO: 155499 - DNA, 2121 bp, Homo sapiens; identical to SEQ ID NO: 155496
  Payload ID: 10572
  Gene Symbol: MSH5-SAPCD1
  Gene Name: MSH5-SAPCD1 readthrough (NMD candidate)
  ENST ID: ENST00000548003
  CDS Start-End: 1361-1807

SEQ ID NO: 155500 - DNA, 2217 bp, Homo sapiens; identical to SEQ ID NO: 155495
  Payload ID: 10572
  Gene Symbol: MSH5-SAPCD1
  Gene Name: MSH5-SAPCD1 readthrough (NMD candidate)
  ENST ID: ENST00000480622
  CDS Start-End: 1-793

SEQ ID NO: 155501 - DNA, 2218 bp, Homo sapiens
  Payload ID: 10572
  Gene Symbol: MSH5-SAPCD1
  Gene Name: MSH5-SAPCD1 readthrough (NMD candidate)
  ENST ID: ENST00000469011
  CDS Start-End: 1-793
gcactatcgtagtgcccgaaccaaggagctggatgcattgctgggggacctgcactgcgagatccgggaccaggagacgctgctgatgtaccagctacagtgccaggtgctggcacgagcagctgtcttaacccgagtattggaccttgcctcccgcctggacgtcctgctggctcttgccagtgctgcccgggactatggctactcaaggccgcgttactccccacaagtccttggggtacgaatccagaatggcagacatcctctgatggaactctgtgcccgaacttttgtgcccaactccacagaatgtggtggggacaaagggagggtcaaagtcatcactggacccaactcatcagggaagagcatatacctcaaacaggtaggcttgatcacattcatggccctggtaggcagctttgtgccagcagaggaggccgaaattggggcagtagacgccatcttcacacgaattcatagctgcgaatccatctcccttggcctctccaccttcatgatcgacctcaaccaggtggcgaaagcagtgaacaatgccactgcacagtcgctggtccttattgatgaatttggaaagggaaccaacacggtggatgggctcgcgcttctggccgctgtgctccgacactggctggcacgtggacccacatgcccccacatctttgtggccaccaactttctgagccttgttcagctacagctgctgccacaagggcccctggtgcagtatttggattggccaagggtttcaggacaggaaggaggtgattgatgatacactgtcttttattctcttttaagaccatggagacctgtgaggatggcaacgatcttgtcttcttctatcaggtctcagacttgatccgcagtggaaaacccatcaagcctgtcaaggatttgctaaagaagaaccaaatggaaaattgccagacattagtggataagtttatgaaactggatttggaagatcctaacctggacttgaacgttttcatgagccaggaagtgctgcctgctgccaccagcatcctctgagagtccttccagtgtcctccccagcctcctgagactccggaagactcccggattctaccccaggatacttcatgagaacgaaccccttcagagaggccctacaaaacagattagagggaagacagaggggtccaagggagatggtctctcttctcaagtaggaacaccccagcctcagacagacacagcaggaaggggcctgagaggctgacagaggcaggatgggtgcaaggcaggggtggaggggagggaccagcccgggctgcaccagtgggagtggctccacccttcccacctcagagccatggggagccagggctctggcggggtgcccttggtgcaggctccctacacagtcctgctgctgccgctggggacaagccgccaagacccaggggcccagagcttcttcctttggctacgcaggatgcaggctctggagagagaacaggatgccctgtggcagggtctggagctgctacagcatggccaggcctggtttgaagaccatctgagggaggcacagcgacagcagctgcatctaggggcccttggtgagaattttctaacagatttacactcagagcctggtcgccccccgttagcccagattcaaaaggtgaacatctgtttgcagaatctgattcatgagaagttctccccaagtccactgaacaaggctagttcctgcaccacccaggattcaaaggaaagacgaagggagcagaacttgtggcagcaacaggagttgtcaaggcagcagaaaggagtcacccagccaaaggaggagatggctcagcggggctgcaccaaggggccaagaggccctacccgtgtctaaaccctcctctcactcccctaagcctggtgaaagagtcagaagccccaggctcctttttctgtttcttaactcaacagctaaaaaatggctccaggtagtgagtcaatgaagttcagacatgttggtgtaaagtttctcctctgctcctgaaaacttcatcttcttggtgtctcatgtcctcattctcccctatatgacatgcaaaaacgatctttctttgaaatccctctgggaagaagacatgtttattgaaactgtccttcagccttaaatacaaaaataaaactgaaactgctccagaaagcagctttctccaaaaat

SEQ ID NO: 155502 - DNA, 3993 bp, Homo sapiens
  Payload ID: 10572
  Gene Symbol: MSH5-SAPCD1
  Gene Name: MSH5-SAPCD1 readthrough (NMD candidate)
  ENST ID: ENST00000480850
  CDS Start-End: 57-2612
ggcggtcggtcagcggggcgttctcccacctgtagcgactcagagcctccaagctcatggcctccttaggagcgaacccaaggaggacaccgcagggaccgagacctggggcggcctcctccggcttccccagcccggccccagtgccgggccccagggaggccgaggaggaggaagtcgaggaggaggaggagctggccgagatccatctgtgtgtgctgtggaattcaggatacttgggcattgcctactatgatactagtgactccactatccacttcatgccagatgccccagaccacgagagcctcaagcttctccagagagttctggatgagatcaatccccagtctgttgttacgagtgccaaacaggatgagaatatgactcgatttctgggaaagcttgcctcccaggagcacagagagcctaaaagacctgaaatcatatttttgccaagtgtggattttggtctggagataagcaaacaacgcctcctttctggaaactactccttcatcccagacgccatgactgccactgagaaaatcctcttcctctcttccattattccctttgactgcctcctcacacccccaggagatttaagatttaccccgattccactgctgatcccctcccaggttcgagcacttggagggctgctgaagttcctgggtcgaagaagaatcggggttgaactggaagactataatgtcagcgtccccatcctgggctttaagaaatttatgttgactcatctggtgaacatagatcaagacacttacagtgttctacagatttttaagagtgagtctcacccctcagtgtacaaagtggccagtggactgaaggaggggctcagcctctttggaatcctcaacagatgccactgtaagtggggagagaagctgctcaggctatggttcacacgtccgactcatgacctgggggagctcagttctcgtctggacgtcattcagttttttctgctgccccagaatctggacatggctcagatgctgcatcggctcctgggtcacatcaagaacgtgcctctgattctgaaacgcatgaagttgtcccacaccaaggtcagcgactggcaggttctctacaagactgtgtacagtgccctgggcctgagggatgcctgccgctccctgccgcagtccatccagctctttcgggacattgcccaagagttctctgatgacctgcaccatatcgccagcctcattgggaaagtagtggactttgagggcagccttgctgaaaatcgcttcacagtcctccccaacatagatcctgaaattgatgagaaaaagcgaagactgatgggacttcccagtttccttactgaggttgcccgcaaggagctggagaatctggactcccgtattccttcatgcagtgtcatctacatccctctgattggcttccttctttctattccccgcctgccttccatggtagaggccagtgactttgagattaatggactggacttcatgtttctctcagaggagaagctgcactatcgtagtgcccgaaccaaggagctggatgcattgctgggggacctgcactgcgagatccgggaccaggagacgctgctgatgtaccagctacagtgccaggtgctggcacgagcagctgtcttaacccgagtattggaccttgcctcccgcctggacgtcctgctggctcttgccagtgctgcccgggactatggctactcaaggccgcgttactccccacaagtccttggggtacgaatccagaatggcagacatcctctgatggaactctgtgcccgaacttttgtgcccaactccacagaatgtggtggggacaaagggagggtcaaagtcatcactggacccaactcatcagggaagagcatatacctcaaacaggtaggcttgatcacattcatggccctggtaggcagctttgtgccagcagaggaggccgaaattggggcagtagacgccatcttcacacgaattcatagctgcgaatccatctcccttggcctctccaccttcatgatcgacctcaaccaggtggcgaaagcagtgaacaatgccactgcacagtcgctggtccttattgatgaatttggaaagggaaccaacacggtggatgggctcgcgcttctggccgctgtgctccgacactggctggcacgtggacccacatgcccccacatctttgtggccaccaactttctgagccttgttcagctacagctgctgccacaagggcccctggtgcagtatttgaccatggagacctgtgaggatggcaacgatcttgtcttcttctatcaggtttgcgaaggtgttgcgaaggccagccatgcctcccacacagctgcccaggctgggcttcctgacaagcttgtggctcgtggcaaggaggtctcagacttgatccgcagtggaaaacccatcaagcctgtcaaggatttgctaaagaagaaccaaatggaaaattgccagacattagtggataagtttatgaaactggatttggaagatcctaacctggacttgaacgttttcatgagccaggaagtgctgcctgctgccaccagcatcctctgagagtccttccagtgtcctccccagcctcctgagactccggtgggctgccatgccctctttgtttccttatctccctcagacgcagagtttttagtttctctagaaattttgtttcatattaggaataaagtttattttgaagaaagatattgtttctttagtctcaaaacaagagactaggaaagatccaaaacacagagcaggagtccacaggggaacctgccctgcctcagtaaaaatacagtgttgttgctgtaggaagactcccggattctaccccaggatacttcatgagaacgaaccccttcagagaggccctacaaaacagattagagggaagacagaggggtccaagggagatggtctctcttctcaagtaggaacaccccagcctcagacagacacagcaggaaggggcctgagaggctgacagaggcaggatgggtgcaaggcaggggtggaggggagggaccagcccgggctgcaccagtgggagtggctccacccttcccacctcagagccatggggagccagggctctggcggggtgcccttggtgcaggctccctacacagtcctgctgctgccgctggggacaagccgccaagacccaggggcccagagcttcttcctttggctacgcaggatgcaggctctggagagagaacaggatgccctgtggcagggtctggagctgctacagcatggccaggcctggtttgaagaccatctgagggaggcacagcgacagcagctgcatctaggggcccttggtgagaattttctaacagatttacactcagagcctggtcgccccccgttagcccagattcaaaaggtgaacatctgtttgcagaatctgattcatgagaagttctccccaagtccactgaacaaggctagttcctgcaccacccaggattcaaaggaaagacgaagggagcagaacttgtggcagcaacaggagttgtcaaggcagcagaaaggagtcacccagccaaaggaggagatggctcagcggggctgcaccaaggggccaagaggccctacccgtgtctaaaccctcctctcactcccctaagcctggtgaaagagtcagaagccccaggctcctttttctgtttcttaactcaacagctaaaaaatggctccaggtagtgagtcaatgaagttcagacatgttggtgtaaagtttctcctctgctcctgaaaacttcatcttcttggtgtctcatgtcctcattctcccctatatgacatgcaaaaacgatctttctttgaaatccctctgggaagaagacatgtttattgaaactgtccttcagccttaaatacaaaaataaaactgaaactgctccagaaagcagctttctccaaaaat

SEQ ID NO: 155503 - DNA, 2217 bp, Homo sapiens; identical to SEQ ID NO: 155495
  Payload ID: 10572
  Gene Symbol: MSH5-SAPCD1
  Gene Name: MSH5-SAPCD1 readthrough (NMD candidate)
  ENST ID: ENST00000492776
  CDS Start-End: 1-793

SEQ ID NO: 155504 - DNA, 3992 bp, Homo sapiens; identical to SEQ ID NO: 155494
  Payload ID: 10572
  Gene Symbol: MSH5-SAPCD1
  Gene Name: MSH5-SAPCD1 readthrough (NMD candidate)
  ENST ID: ENST00000583103
  CDS Start-End: 57-2612

SEQ ID NO: 155505 - DNA, 2871 bp, Homo sapiens
  Payload ID: 10572
  Gene Symbol: MSH5-SAPCD1
  Gene Name: MSH5-SAPCD1 readthrough (NMD candidate)
  ENST ID: ENST00000495073
  CDS Start-End: 1-1491
actgtgtacagtgccctgggcctgagggatgcctgccgctccctgccgcagtccatccagctctttcgggacattgcccaagagttctctgatgacctgcaccatatcgccagcctcattgggaaagtagtggactttgagggcagccttgctgaaaatcgcttcacagtcctccccaacatagatcctgaaattgatgagaaaaagcgaagactgatgggacttcccagtttccttactgaggttgcccgcaaggagctggagaatctggactcccgtattccttcatgcagtgtcatctacatccctctgattggcttccttctttctattccccgcctgccttccatggtagaggccagtgactttgagattaatggactggacttcatgtttctctcagaggagaagctgcactatcgtagtgcccgaaccaaggagctggatgcattgctgggggacctgcactgcgagatccgggaccaggagacgctgctgatgtaccagctacagtgccaggtgctggcacgagcagctgtcttaacccgagtattggaccttgcctcccgcctggacgtcctgctggctcttgccagtgctgcccgggactatggctactcaaggccgcgttactccccacaagtccttggggtacgaatccagaatggcagacatcctctgatggaactctgtgcccgaacctttgtgcccaactccacagaatgtggtggggacaaagggagggtcaaagtcatcactggacccaactcatcagggaagagcatatacctcaaacaggtaggcttgatcacattcatggccctggtaggcagctttgtgccagcagaggaggccgaaattggggcagtagacgccatcttcacacgaattcatagctgcgaatccatctcccttggcctctccaccttcatgatcgacctcaaccaggtggcgaaagcagtgaacaatgccactgcacagtcgctggtccttattgatgaatttggaaagggaaccaacacggtggatgggctcgcgcttctggccgctgtgctccgacactggctggcacgtggacccacatgcccccacatctttgtggccaccaactttctgagccttgttcagctacaactgctgccacaagggcccctggtgcagtatttgaccatggagacctgtgaggatggcaacgatcttgtcttcttctatcaggtttgcgaaggtgttgcgaaggccagccatgcctcccacacagctgcccaggctgggcttcctgacaagcttgtggctcgtggcaaggaggtctcagacttgatccgcagtggaaaacccatcaagcctgtcaaggatttgctaaagaagaaccaaatggaaaattgccagacattagtggataagtttatgaaactggatttggaagatcctaacctggacttgaacgttttcatgagccaggaagtgctgcctgctgccaccagcatcctctgagagtccttccagtgtcctccccagcctcctgagactccggtgggctgccatgccctctttgtttccttatctccctcagacgcagagtttttagtttctctagaaattttgtttcatattaggaataaagtttattttgaagaaagatattgtttctttagtctcaaaacaagagactaggaaagatccaaaacacagagcaggagtccacaggggaacctgccctgcctcagtaaaaatacagtgttgttgctgtaggaagactcccggattctaccccaggatacttcatgagaacgaaccccttcagagaggccctacaaaacagattagagggaagacagaggggtccaagggagatggtctctcttctcaagtaggaacaccccagcctcagacagacacagcaggaaggggcctgagaggctgacagaggcaggatgggtgcaaggcaggggtggaggggagggaccagcccgggctgcaccagtgggagtggctccacccttcccacctcagagccatggggagccagggctctggcggggtgcccttggtgcaggctccctacacagtcctgctgctgccgctggggacaagccgccaagacccaggggcccagagcttcttcctttggctacgcaggatgcaggctctggagagagaacaggatgccctgtggcagggtctggagctgctacagcatggccaggcctggtttgaagaccatctgagggaggcacagcgacagcagctgcatctaggggcccttggtgagaattttctaacagatttacactcagagcctggtcgccccccgttagcccagattcaaaaggtgaacatctgtttgcagaatctgattcatgagaagttctccccaagtccactgaacaaggctagttcctgcaccacccaggattcaaaggaaagacgaagggagcagaacttgtggcagcaacaggagttgtcaaggcagcagaaaggagtcacccagccaaaggaggagatggctcagcggggctgcaccaaggggccaagaggccctacccgtgtctaaaccctcctctcactcccctaagcctggtgaaagagtcagaagccccaggctcctttttctgtttcttaactcaacagctaaaaaatggctccaggtagtgagtcaatgaagttcagacatgttggtgtaaagtttctcctctgctcctgaaaacttcatcttcttggtgtctcatgtcctcattctcccctatatgacatgcaaaaacgatctttctttgaaatccctctgggaagaagcatgtttattgaaactgtccttcagccttaaatacaaaaataaaactgaaactgctccagaaagcagctttctccaaaaat

SEQ ID NO: 155506 - DNA, 950 bp, Homo sapiens; identical to SEQ ID NO: 155493
  Payload ID: 10572
  Gene Symbol: MSH5-SAPCD1
  Gene Name: MSH5-SAPCD1 readthrough (NMD candidate)
  ENST ID: ENST00000487383
  CDS Start-End: 1-88

SEQ ID NO: 155507 - DNA, 2871 bp, Homo sapiens; identical to SEQ ID NO: 155505
  Payload ID: 10572
  Gene Symbol: MSH5-SAPCD1
  Gene Name: MSH5-SAPCD1 readthrough (NMD candidate)
  ENST ID: ENST00000466318
  CDS Start-End: 1-1491

SEQ ID NO: 155508 - DNA, 950 bp, Homo sapiens; identical to SEQ ID NO: 155493
  Payload ID: 10572
  Gene Symbol: MSH5-SAPCD1
  Gene Name: MSH5-SAPCD1 readthrough (NMD candidate)
  ENST ID: ENST00000496211
  CDS Start-End: 1-88

SEQ ID NO: 155509 - DNA, 950 bp, Homo sapiens; identical to SEQ ID NO: 155493
  Payload ID: 10572
  Gene Symbol: MSH5-SAPCD1
  Gene Name: MSH5-SAPCD1 readthrough (NMD candidate)
  ENST ID: ENST00000465533
  CDS Start-End: 1-88

SEQ ID NO: 155510 - DNA, 2217 bp, Homo sapiens; identical to SEQ ID NO: 155495
  Payload ID: 10572
  Gene Symbol: MSH5-SAPCD1
  Gene Name: MSH5-SAPCD1 readthrough (NMD candidate)
  ENST ID: ENST00000476578
  CDS Start-End: 1-793

SEQ ID NO: 155511 - DNA, 950 bp, Homo sapiens; identical to SEQ ID NO: 155493
  Payload ID: 10572
  Gene Symbol: MSH5-SAPCD1
  Gene Name: MSH5-SAPCD1 readthrough (NMD candidate)
  ENST ID: ENST00000490634
  CDS Start-End: 1-88

SEQ ID NO: 155512 - DNA, 951 bp, Homo sapiens
  Payload ID: 10572
  Gene Symbol: MSH5-SAPCD1
  Gene Name: MSH5-SAPCD1 readthrough (NMD candidate)
  ENST ID: ENST00000477722
  CDS Start-End: 1-88
tatgaaactggatttggaagatcctaacctggacttgaacgttttcatgagccaggaagtgctgcctgctgccaccagcatcctctgagagtccttccagtgtcctccccagcctcctgagactccgctacgcaggatgcaggctctggagagagaacaggatgccctgtggcagggtctggagctgctacagcatggccaggcctggtttgaagaccatctgagggaggcacagcgacagcagctgcatctaggggcccttggtgagaattttctaacagatttacactcagagcctggtcgccccccgttagcccagattcaaaaggtgaacatctgtttgcagaatctgattcatgagaagttctccccaagtccactgaacaaggctagttcctgcaccacccaggattcaaaggaaagacgaagggagcagaacttgtggcagcaacaggtaaacttcaagaaggagggcaggagccccaccctacagggctgggaggagcccagaggccccatctgtttctcctccaggagttgtcaaggcagcagaaaggagtcacccagccaaaggaggagatggctcagcggggctgcaccaaggggccaagaggccctacccgtgtctaaaccctcctctcactcccctaagcctggtgaaagagtcagaagccccaggctcctttttctgtttcttaactcaacagctaaaaaatggctccaggtagtgagtcaatgaagttcagacatgttggtgtaaagtttctcctctgctcctgaaaacttcatcttcttggtgtctcatgtcctcattctcccctatatgacatgcaaaaacgatctttctttgaaatccctctgggaagaagacatgtttattgaaactgtccttcagccttaaatacaaaaataaaactgaaactgctccagaaagcagctttctccaaaaat

SEQ ID NO: 155513 - DNA, 2421 bp, Homo sapiens
  Payload ID: 10573
  Gene Symbol: MSS51
  Gene Name: MSS51 mitochondrial translational activator
  Uniprot ID: Q4VC12
  ENST ID: ENST00000299432
  CDS Start-End: 67-1449
atttcacttggaggaaagagagaaggaaggaagctgaggacttagcagggtatcactggacaggccatggctccacggtcccggcgacgaaggcacaagaaacctccctcatcagtggctcccatcatcatggccccaaccacaattgtgacccctgtgcctctgaccccctcaaaacctggccctagcattgacacacttggcttcttctccttggatgataatgttcctggcctatcgcagctgatccttcaaaagctgaacatgaaaagctatgaagaatataagttggtggtagatgggggtacccccgtatcaggctttggatttcgatgtcctcaagaaatgttccagaggatggaagacacatttcgattctgtgctcactgtagagcactccctagtgggctttcagactccaaggttctccggcactgtaagaggtgcagaaatgtctattactgtggtccagagtgccagaagtcagactggcccgcacacaggagggtttgtcaagagcttcgtcttgtggctgtggaccgtctcatggaatggcttctggtcacaggtgattttgttctaccctcaggaccttggccatggccacctgaagctgtacaggactgggactcctggttttctatgaaggggttacacctagatgctacattggatgctgtgctagttagtcatgctgtgaccaccttatgggccagtgtaggacggccaaggccagacccggatgtcctgcagggatctttgaagcggctgctgacagatgtcctgtcacggcccttgactctaggcctaggacttagggccttggggatagatgttaggaggactgggggaagcacagtgcatgtggttggtgcttcccatgtggagacatttcttactcgcccaggggactatgatgagcttggttacatgtttcctgggcaccttggactccgtgtggtcatggtgggtgtagatgtagctactggcttttcacagagcacctcaacttcacccctggaacctggcacaattcagcttagtgcccacaggggcctctaccatgacttctgggaggagcaagtagagaccgggcagacacaccatccagatttggtggcggcattccatccaggttttcattcctccccagacttgatggaggcttggctgcccaccctgctgctacttcgtgactataagattcctacattgattactgtttacagccatcaggagttggtatcctctttgcagattctggtggaactggatacacacatcactgcctttgggtctaatcctttcatgtccctcaaacctgaacaggtctattccagtcccaacaagcagccagtatactgcagtgcatactatatcatgtttcttggaagctcctgtcagctggataataggcaattagaagagaaagtggacggcgggatttaaatagatcataactggacatctggaaaacggggagtttgtgatgaaattaccctgctaatgccaggttcttgcaaactttgaaaaacattatattctaaacctcatttactgtttgggtaaaaattctaagctgaatgagagtttctgtataacataactggtttctttctttttttgagatggagtcttgctctgttgcccaggctggagtgcagcggcatgatctcgactcactgcagcctccgcctcctgggttcaagtggttctcctgcctcagcctccctagtagctgggattacaggtgcacaccaccacacctggctaatttttgtatttttagcagacagggtttcaccatgttggccaggctcgtatcaaacccttgaccccaggtgatctgcctgcctcagcctcccaaagttctgggattacaggcatgagccaccatgcccagccaatgtaactggtttctaagagtttagccacagtagcttctagagataggaaattagatttagtgggtgggaagaggccctgatgctggtctttccagagcttatagttgctaacacttttctttgtaaagaagtttaccttttgactggaaccagatggcactgagaaaaagaatgagaaccaccttattcttctgaaaaagactttcttctcatccagtaatttgggctaaaaaatggaaagatgttgatgacttgaagtgatgcaagaatggacaagtcagggaagtcattgggaacatggatgaggttgtaagcattggtacagtgtcctgtttcctgacttttttgagagaaatgtctacttttcctgttttctcttggggacttttgaccctagagtagccctggtgttatattttagatatcccaagctatatcagactttacctgaatatactggagttacttattatcccccattctataccccaataaactcagtttggggcttctt

SEQ ID NO: 155514 - DNA, 1510 bp, Homo sapiens
  Payload ID: 10573
  Gene Symbol: MSS51
  Gene Name: MSS51 mitochondrial translational activator
  Uniprot ID: Q4VC12
  ENST ID: ENST00000372912
  CDS Start-End: 4-1386
gccatggctccacggtcccggcgacgaaggcacaagaaacctccctcatcagtggctcccatcatcatggccccaaccacaattgtgacccctgtgcctctgaccccctcaaaacctggccctagcattgacacacttggcttcttctccttggatgataatgttcctggcctatcgcagctgatccttcaaaagctgaacatgaaaagctatgaagaatataagttggtggtagatgggggtacccccgtatcaggctttggatttcgatgtcctcaagaaatgttccagaggatggaagacacatttcgattctgtgctcactgtagagcactccctagtgggctttcagactccaaggttctccggcactgtaagaggtgcagaaatgtctattactgtggtccagagtgccagaagtcagactggcccgcacacaggagggtttgtcaagagcttcgtcttgtggctgtggaccgtctcatggaatggcttctggtcacaggtgattttgttctaccctcaggaccttggccatggccacctgaagctgtacaggactgggactcctggttttctatgaaggggttacacctagatgctacattggatgctgtgctagttagtcatgctgtgaccaccttatgggccagtgtaggacggccaaggccagacccggatgtcctgcagggatctttgaagcggctgctgacagatgtcctgtcacggcccttgactctaggcctaggacttagggccttggggatagatgttaggaggactgggggaagcacagtgcatgtggttggtgcttcccatgtggagacatttcttactcgcccaggggactatgatgagcttggttacatgtttcctgggcaccttggactccgtgtggtcatggtgggtgtagatgtagctactggcttttcacagagcacctcaacttcacccctggaacctggcacaattcagcttagtgcccacaggggcctctaccatgacttctgggaggagcaagtagagaccgggcagacacaccatccagatttggtggcggcattccatccaggttttcattcctccccagacttgatggaggcttggctgcccaccctgctgctacttcgtgactataagattcctacattgattactgtttacagccatcaggagttggtatcctctttgcagattctggtggaactggatacacacatcactgcctttgggtctaatcctttcatgtccctcaaacctgaacaggtctattccagtcccaacaagcagccagtatactgcagtgcatactatatcatgtttcttggaagctcctgtcagctggataataggcaattagaagagaaagtggacggcgggatttaaatagatcataactggacatctggaaaacggggagtttgtgatgaaattaccctgctaatgccaggttcttgcaaactttgaaaaacattatattctaaacctcatttactgtttgggtaaaaat

SEQ ID NO: 155515 - DNA, 1991 bp, Homo sapiens
  Payload ID: 10573
  Gene Symbol: MSS51
  Gene Name: MSS51 mitochondrial translational activator
  ENST ID: ENST00000487126
  CDS Start-End: 66-611
tttcacttggaggaaagagagaaggaaggaagctgaggacttagcagggtatcactggacaggccatggctccacggtcccggcgacgaaggcacaagaaacctccctcatcagtggctcccatcatcatggccccaaccacaattgtgacccctgtgcctctgaccccctcaaaacctggccctagcattgacacacttggcttcttctccttggatgataatgttcctggcctatcgcagctgatccttcaaaagctgaacatgaaaagctatgaagaatataagttggtggtagatgggggtacccccgtatcaggctttggatttcgatgtcctcaagaaatgttccagaggatggaagacacatttcgattctgtgctcactgtagagcactccctagtgggctttcagactccaaggttctccggcactgtaagaggtgcagaaatgtctattactgtggtccagagtgccagaagtcagactggcccgcacacaggagggtttgtcaagagcttcgtcttgtggctgtggaccgtctcatggaatggcttctggtcacagagcacctcaacttcacccctggaacctggcacaattcagcttagtgcccacaggggcctctaccatgacttctgggaggagcaagtagagaccgggcagacacaccatccagatttggtggcggcattccatccaggttttcattcctccccagacttgatggaggcttggctgcccaccctgctgctacttcgtgactataagattcctacattgattactgtttacagccatcaggagttggtatcctctttgcagattctggtggaactggatacacacatcactgcctttgggtctaatcctttcatgtccctcaaacctgaacaggtctattccagtcccaacaagcagccagtatactgcagtgcatactatatcatgtttcttggaagctcctgtcagctggataataggcaattagaagagaaagtggacggcgggatttaaatagatcataactggacatctggaaaacggggagtttgtgatgaaattaccctgctaatgccaggttcttgcaaactttgaaaaacattatattctaaacctcatttactgtttgggtaaaaattctaagctgaatgagagtttctgtataacataactggtttctttctttttttgagatggagtcttgctctgttgcccaggctggagtgcagcggcatgatctcgactcactgcagcctccgcctcctgggttcaagtggttctcctgcctcagcctccctagtagctgggattacaggtgcacaccaccacacctggctaatttttgtatttttagcagacagggtttcaccatgttggccaggctcgtatcaaacccttgaccccaggtgatctgcctgcctcagcctcccaaagttctgggattacaggcatgagccaccatgcccagccaatgtaactggtttctaagagtttagccacagtagcttctagagataggaaattagatttagtgggtgggaagaggccctgatgctggtctttccagagcttatagttgctaacacttttctttgtaaagaagtttaccttttgactggaaccagatggcactgagaaaaagaatgagaaccaccttattcttctgaaaaagactttcttctcatccagtaatttgggctaaaaaatggaaagatgttgatgacttgaagtgatgcaagaatggacaagtcagggaagtcattgggaacatggatgaggttgtaagcattggtacagtgtcctgtttcctgacttttttgagagaaatgtctacttttcctgttttctcttggggacttttgaccctagagtagccctggtgttatattttagatatcccaagctatatcagactttacctgaatatactggagttacttattatcccccattctataccccaataaactcagtttggggcttcttaa

SEQ ID NO: 155516 - DNA, 1735 bp, Homo sapiens
  Payload ID: 10574
  Gene Symbol: MLST8
  Gene Name: MTOR associated protein, LST8 homolog
  ENST ID: ENST00000301724
  CDS Start-End: 75-1058
gtgcggagccgcccgtaagatgctctgacctttgacccctgccgttcagctctagggcccgtgcaggccacaccatgaacacctccccaggcacggtgggcagtgacccggtcatcctggccactgcaggctacgaccacaccgtgcgcttctggcaggcccacagcggcatctgcacccggacggtgcagcaccaggactcccaggtgaatgccttggaggtcacaccggaccgcagcatgattgctgctgcaggttaccagcacatccgcatgtatgatctcaactccaataaccctaaccccatcatcagctacgacggcgtcaacaagaacatcgcgtctgtgggcttccacgaagacggccgctggatgtacacgggcggcgaggactgcacagccaggatctgggacctcaggtcccggaacctgcagtgccagcggatcttccaggtgaacgcacccattaactgcgtgtgcctgcaccccaaccaggcagagctcatcgtgggtgaccagagcggggctatccacatctgggacttgaaaacagaccacaacgagcagctgatccctgagcccgaggtctccatcacgtccgcccacatcgatcccgacgccagctacatggcagctgtcaatagcaccggaaactgctatgtctggaatctgacggggggcattggtgacgaggtgacccagctcatccccaagactaagatccctgcccacacgcgctacgccctgcagtgtcgcttcagccccgactccacgctcctcgccacctgctcggctgatcagacgtgcaagatctggaggacgtccaacttctccctgatgacggagctgagcatcaagagcggcaaccccggggagtcctcccgcggctggatgtggggctgcgccttctcgggggactcccagtacatcgtcactggtgagccccgccctggcctcccccatccctggcccccggcgctggcctccagagccagcccacctcggctgcagcttcccctctgctggggccgcctgcttggcctgcacctgcgctcttagccctgcacaatctccccctccagcttcctcggacaacctggcccggctctggtgtgtggagactggagagatcaagagagagtatggcggccaccagaaggctgttgtctgcctggccttcaatgacagtgtgctgggctagcctgtgacccctcgggactgcctggtgcaggtggtggcagctggagggacccatgcagcacccaggtcagagcagaccctcccctgccggcctgcgccagctggacctgatggccccctgtggcgccttgacctgctgggccaggctgccctgggactctcagcccccagttgcttatccagatgtgacagagctcgacccaagccaggctgcacactcctggactgggctagcctgcactgcctgggaaagtcggccgagggcccaaagctgctgaggggtctgaggctggtgcccacccccaagctagtgtgttctctgcccctccctgcccgcgtttcagggcctcggtccatagagaacaccaccaccatggccaggtggaagggtttattagtccctgccagcagctgtcctccctggtgcaggtggcctggccagcccactggattggggacgggccaggctgggccaggtcgggggctcagtctgggaggtaataaaagcagaccgacacgcagatgttgctcgggaa

SEQ ID NO: 155517 - DNA, 1861 bp, Homo sapiens
  Payload ID: 10574
  Gene Symbol: MLST8
  Gene Name: MTOR associated protein, LST8 homolog
  Uniprot ID: Q9BVC4
  ENST ID: ENST00000382450
  CDS Start-End: 365-1342
agcgcgacccgacagcccgggaaacggacagccgtgtcagaagggcaggtgccagtgggcaggaggccggagagaaagccgcagcttccttccacctcgcgccgggcccgcggccgcgcacggggaccgctccgagttcctcccggcgggaaccccccgccccagaactttggtctcgtcccacccacccccgcccgcgccatggtctcgccctagggagccatcgataactctacgctcggcctcgatcgactcgctccggctcccctcgccgtcctggacacggcggagtgcggagccgcccgtaagatgctctgacctttgacccctgccgttcagctctagggcccgtgcaggccacaccatgaacacctccccaggcacggtgggcagtgacccggtcatcctggccactgcaggctacgaccacaccgtgcgcttctggcaggcccacagcggcatctgcacccggacggtgcagcaccaggactccgtgaatgccttggaggtcacaccggaccgcagcatgattgctgctgcaggttaccagcacatccgcatgtatgatctcaactccaataaccctaaccccatcatcagctacgacggcgtcaacaagaacatcgcgtctgtgggcttccacgaagacggccgctggatgtacacgggcggcgaggactgcacagccaggatctgggacctcaggtcccggaacctgcagtgccagcggatcttccaggtgaacgcacccattaactgcgtgtgcctgcaccccaaccaggcagagctcatcgtgggtgaccagagcggggctatccacatctgggacttgaaaacagaccacaacgagcagctgatccctgagcccgaggtctccatcacgtccgcccacatcgatcccgacgccagctacatggcagctgtcaatagcaccggaaactgctatgtctggaatctgacggggggcattggtgacgaggtgacccagctcatccccaagactaagatccctgcccacacgcgctacgccctgcagtgtcgcttcagccccgactccacgctcctcgccacctgctcggctgatcagacgtgcaagatctggaggacgtccaacttctccctgatgacggagctgagcatcaagagcggcaaccccggggagtcctcccgcggctggatgtggggctgcgccttctcgggggactcccagtacatcgtcactgcttcctcggacaacctggcccggctctggtgtgtggagactggagagatcaagagagagtatggcggccaccagaaggctgttgtctgcctggccttcaatgacagtgtgctgggctagcctgtgacccctcgggactgcctggtgcaggtggtggcagctggagggacccatgcagcacccaggtcagagcagaccctcccctgccggcctgcgccagctggacctgatggccccctgtggcgccttgacctgctgggccaggctgccctgggactctcagcccccagttgcttatccagatgtgacagagctcgacccaagccaggctgcacactcctggactgggctagcctgcactgcctgggaaagtcggccgagggcccaaagctgctgaggggtctgaggctggtgcccacccccaagctagtgtgttctctgcccctccctgcccgcgtttcagggcctcggtccatagagaacaccaccaccatggccaggtggaagggtttattagtccctgccagcagctgtcctccctggtgcaggtggcctggccagcccactggattggggacgggccaggctgggccaggtcgggggctcagtctgggaggtaataaaagcagaccgacacgc

SEQ ID NO: 155518 - DNA, 1691 bp, Homo sapiens
  Payload ID: 10574
  Gene Symbol: MLST8
  Gene Name: MTOR associated protein, LST8 homolog
  Uniprot ID: Q9BVC4
  ENST ID: ENST00000397124
  CDS Start-End: 191-1171
cgcagcccgcccctgcggcagagtggcgcccgcgcgtgactcccccctgccggctgcggaggtgggggggggacggcgcccccgccgtgtgcgtggggcggggatggagcacgcgccctggagccccggagccagatgctctgacctttgacccctgccgttcagctctagggcccgtgcaggccacaccatgaacacctccccaggcacggtgggcagtgacccggtcatcctggccactgcaggctacgaccacaccgtgcgcttctggcaggcccacagcggcatctgcacccggacggtgcagcaccaggactcccaggtgaatgccttggaggtcacaccggaccgcagcatgattgctgctgcaggttaccagcacatccgcatgtatgatctcaactccaataaccctaaccccatcatcagctacgacggcgtcaacaagaacatcgcgtctgtgggcttccacgaagacggccgctggatgtacacgggcggcgaggactgcacagccaggatctgggacctcaggtcccggaacctgcagtgccagcggatcttccaggtgaacgcacccattaactgcgtgtgcctgcaccccaaccaggcagagctcatcgtgggtgaccagagcggggctatccacatctgggacttgaaaacagaccacaacgagcagctgatccctgagcccgaggtctccatcacgtccgcccacatcgatcccgacgccagctacatggcagctgtcaatagcaccggaaactgctatgtctggaatctgacggggggcattggtgacgaggtgacccagctcatccccaagactaagatccctgcccacacgcgctacgccctgcagtgtcgcttcagccccgactccacgctcctcgccacctgctcggctgatcagacgtgcaagatctggaggacgtccaacttctccctgatgacggagctgagcatcaagagcggcaaccccggggagtcctcccgcggctggatgtggggctgcgccttctcgggggactcccagtacatcgtcactgcttcctcggacaacctggcccggctctggtgtgtggagactggagagatcaagagagagtatggcggccaccagaaggctgttgtctgcctggccttcaatgacagtgtgctgggctagcctgtgacccctcgggactgcctggtgcaggtggtggcagctggagggacccatgcagcacccaggtcagagcagaccctcccctgccggcctgcgccagctggacctgatggccccctgtggcgccttgacctgctgggccaggctgccctgggactctcagcccccagttgcttatccagatgtgacagagctcgacccaagccaggctgcacactcctggactgggctagcctgcactgcctgggaaagtcggccgagggcccaaagctgctgaggggtctgaggctggtgcccacccccaagctagtgtgttctctgcccctccctgcccgcgtttcagggcctcggtccatagagaacaccaccaccatggccaggtggaagggtttattagtccctgccagcagctgtcctccctggtgcaggtggcctggccagcccactggattggggacgggccaggctgggccaggtcgggggctcagtctgggaggtaataaaagcagaccgacacgca

SEQ ID NO: 155519 - DNA, 1135 bp, Homo sapiens
  Payload ID: 10574
  Gene Symbol: MLST8
  Gene Name: MTOR associated protein, LST8 homolog
  ENST ID: ENST00000565687
  CDS Start-End: 88-438
tggacacggcggagtgcggagccgcccgtaagatgctctgacctttgacccctgccgttcagctctagggcccgtgcaggccacaccatgaacacctccccaggcacggtgggcagtgacccggtcatcctggccactgcaggctacgaccacaccgtgcgcttctggcaggcccacagcggcatctgcacccggacggtgcagcaccaggactcccaggtgaatgccttggaggtcacaccggaccgcagcatgattgctgctgcaggttaccagcacatccgcatgtatgatctcaactccaataaccctaaccccatcatcagctacgacggcgtcaacaagaacatcgcgtctgtgggcttccacgaagacggccgctggatgtacacgggcggcgaggactgcacagccaggatctgggacctcagaggctgagacagggagcttcctgtgggcgacttactgagagaagtgaggacaggaggagagtgaattgcatcagagcgcgagtcctgccttgagcccggagccagcttgttattccccttccaccagccactggcttaggctccctgctggagcagagggccctgcgtcccaagtatttcccaagaggtcccggaacctgcagtgccagcggatcttccaggtgaacgcacccattaactgcgtgtgcctgcaccccaaccaggcagagctcatcgtgggtgaccagagcggggctatccacatctgggacttgaaaacagaccacaacgagcagctgatccctgagcccgaggtctccatcacgtccgcccacatcgatcccgacgccagctacatggcagctgtcaatagcaccggaaactgctatgtctggaatctgacggggggcattggtgacgaggtgacccagctcatccccaagactaagatccctgcccacacgcgctacgccctgcagtgtcgcttcagccccgactccacgctcctcgccacctgctcggctgatcagacgtgcaagatctggaggacgtccaacttctccctgatgacggagctgagcatcaagagcggcaaccccggggagtcctcccgcggctggatgtggggctgcgccttctcgggggactcccagtacatcgtcact

SEQ ID NO: 155520 - DNA, 1044 bp, Homo sapiens
  Payload ID: 10574
  Gene Symbol: MLST8
  Gene Name: MTOR associated protein, LST8 homolog
  ENST ID: ENST00000570224
  CDS Start-End: 344-562
aaacggacagccgtgtcagaagggcaggtgccagtgggcaggaggccggagagaaagccgcagcttccttccacctcgcgccgggcccgcggccgcgcacggggaccgctccgagttcctcccggcgggaaccccccgccccagaactttggtctcgtcccacccacccccgcccgcgccatggtctcgccctagggagccatcgataactctacgctcggcctcgatcgactcgctccggctcccctcgccgtcctggacacggcggagtgcggagccgcccgtaagatgctctgacctttgacccctgccgttcagctctagggcccgtgcaggccacaccatgaacacctccccaggcacggtgggcagtgacccggtcatcctggccactgcaggctacgaccacaccgtgcgcttctggcaggcccacagcggcatctgcacccggacggtgcagcaccaggactcccaggtgaatgccttggaggtcacaccggaccgcagcatgattgctgctgcagcctgtgtccctaggttaccagcacatccgcatgtatgatctcaactccaataaccctaaccccatcatcagctacgacggcgtcaacaagaacatcgcgtctgtgggcttccacgaagacggccgctggatgtacacgggcggcgaggactgcacagccaggatctgggacctcaggtcccggaacctgcagtgccagcggatcttccaggtgaacgcacccattaactgcgtgtgcctgcaccccaaccaggcagagctcatcgtgggtgaccagagcggggctatccacatctgggacttgaaaacagaccacaacgagcagctgatccctgagcccgaggtctccatcacgtccgcccacatcgatcccgacgccagctacatggcagctgtcaatagcaccggaaactgctatgtctggaatctgacggggggcattggtgacgaggtgacccagctcatccccaagactaagatccctgcccacacgcgctacgccctgcagtgtcgcttcagcc

SEQ ID NO: 155521 - DNA, 792 bp, Homo sapiens
  Payload ID: 10574
  Gene Symbol: MLST8
  Gene Name: MTOR associated protein, LST8 homolog
  ENST ID: ENST00000569457
  CDS Start-End: 185-792
atgagtgggaggtgaggacgtggaactagaaaaatgggagccatcgataactctacgctcggcctcgatcgactcgctccggctcccctcgccgtcctggacacggcggagtgcggagccgcccgtaagatgctctgacctttgacccctgccgttcagctctagggcccgtgcaggccacaccatgaacacctccccaggcacggtgggcagtgacccggtcatcctggccactgcaggctacgaccacaccgtgcgcttctggcaggcccacagcggcatctgcacccggacggtgcagcaccaggactcccaggtgaatgccttggaggtcacaccggaccgcagcatgattgctgctgcaggttaccagcacatccgcatgtatgatctcaactccaataaccctaaccccatcatcagctacgacggcgtcaacaagaacatcgcgtctgtgggcttccacgaagacggccgctggatgtacacgggcggcgaggactgcacagccaggatctgggacctcaggtcccggaacctgcagtgccagcggatcttccaggtgaacgcacccattaactgcgtgtgcctgcaccccaaccaggcagagctcatcgtgggtgaccagagcggggctatccacatctgggacttgaaaacagaccacaacgagcagctgatccctgagcccgaggtctccatcacgtccgcccacatcgatcccgacgccagctacatggcagctgtcaatagcaccggaaactgctatgtctggaatctgacggggggcat

SEQ ID NO: 155522 - DNA, 1588 bp, Homo sapiens
  Payload ID: 10574
  Gene Symbol: MLST8
  Gene Name: MTOR associated protein, LST8 homolog
  Uniprot ID: Q9BVC4
  ENST ID: ENST00000565250
  CDS Start-End: 133-1113
cccgcgcgtgactcccccctgccggctgcggaggtgggggggggacggcgcccccgccgtgtgcgtggggcggggatggagcacgcgccctggagccccggagccagctctagggcccgtgcaggccacaccatgaacacctccccaggcacggtgggcagtgacccggtcatcctggccactgcaggctacgaccacaccgtgcgcttctggcaggcccacagcggcatctgcacccggacggtgcagcaccaggactcccaggtgaatgccttggaggtcacaccggaccgcagcatgattgctgctgcaggttaccagcacatccgcatgtatgatctcaactccaataaccctaaccccatcatcagctacgacggcgtcaacaagaacatcgcgtctgtgggcttccacgaagacggccgctggatgtacacgggcggcgaggactgcacagccaggatctgggacctcaggtcccggaacctgcagtgccagcggatcttccaggtgaacgcacccattaactgcgtgtgcctgcaccccaaccaggcagagctcatcgtgggtgaccagagcggggctatccacatctgggacttgaaaacagaccacaacgagcagctgatccctgagcccgaggtctccatcacgtccgcccacatcgatcccgacgccagctacatggcagctgtcaatagcaccggaaactgctatgtctggaatctgacggggggcattggtgacgaggtgacccagctcatccccaagactaagatccctgcccacacgcgctacgccctgcagtgtcgcttcagccccgactccacgctcctcgccacctgctcggctgatcagacgtgcaagatctggaggacgtccaacttctccctgatgacggagctgagcatcaagagcggcaaccccggggagtcctcccgcggctggatgtggggctgcgccttctcgggggactcccagtacatcgtcactgcttcctcggacaacctggcccggctctggtgtgtggagactggagagatcaagagagagtatggcggccaccagaaggctgttgtctgcctggccttcaatgacagtgtgctgggctagcctgtgacccctcgggactgcctggtgcaggtggtggcagctggagggacccatgcagcacccaggtcagagcagaccctcccctgccggcctgcgccagctggacctgatggccccctgtggcgccttgacctgctgggccaggctgccctgggactctcagcccccagttgcttatccagatgtgacagagctcgacccaagccaggctgcacactcctggactgggctagcctgcactgcctgggaaagtcggccgagggcccaaagctgctgaggggtctgaggctggtgcccacccccaagctagtgtgttctctgcccctccctgcccgcgtttcagggcctcggtccatagagaacaccaccaccatggccaggtggaagggtttattagtccctgccagcagctgtcctccctggtgcaggtggcctggccagcccactggattggggacgggccaggctgggccag

SEQ ID NO: 155523 - DNA, 1565 bp, Homo sapiens
  Payload ID: 10574
  Gene Symbol: MLST8
  Gene Name: MTOR associated protein, LST8 homolog
  ENST ID: ENST00000566835
  CDS Start-End: 171-767
cttgcgcacgcgcagcccgcccctgcggcagagtggcgcccgcgcgtgactcccccctgccggctgcggaggtgggggggggacggcgcccccgccgtgtgcgtggggcggggatggagcacgcgccctggagccccggagccagctctagggcccgtgcaggccacaccatgaacacctccccaggcacggtgggcagtgacccggtcatcctggccactgcaggctacgaccacaccgtgcgcttctggcaggcccacagcggcatctgcacccggacggtgcagcaccaggactcccaggtgaatgccttggaggtcacaccggaccgcagcatgattgctgctgcaggttaccagcacatccgcatgtatgatctcaactccaataaccctaaccccatcatcagctacgacggcgtcaacaagaacatcgcgtctgtgggcttccacgaagacggccgctggatgtacacgggcggcgaggactgcacagccaggatctgggacctcaggtcccggaacctgcagtgccagcggatcttccaggtgaacgcacccattaactgcgtgtgcctgcaccccaaccaggcagagctcatcgtgggtgaccagagcggggctatccacatctgggacttgaaaacagaccacaacgagcagctgatccctgagcccgaggtctccatcacgtccgcccacatcgatcccgacgccagctacatggcagctgtcaatagcaccgctcctcgccacctgctcggctgatcagacgtgcaagatctggaggacgtccaacttctccctgatgacggagctgagcatcaagagcggcaaccccggggagtcctcccgcggctggatgtggggctgcgccttctcgggggactcccagtacatcgtcactgcttcctcggacaacctggcccggctctggtgtgtggagactggagagatcaagagagagtatggcggccaccagaaggctgttgtctgcctggccttcaatgacagtgtgctgggctagcctgtgacccctcgggactgcctggtgcaggtggtggcagctggagggacccatgcagcacccaggtcagagcagaccctcccctgccggcctgcgccagctggacctgatggccccctgtggcgccttgacctgctgggccaggctgccctgggactctcagcccccagttgcttatccagatgtgacagagctcgacccaagccaggctgcacactcctggactgggctagcctgcactgcctgggaaagtcggccgagggcccaaagctgctgaggggtctgaggctggtgcccacccccaagctagtgtgttctctgcccctccctgcccgcgtttcagggcctcggtccatagagaacaccaccaccatggccaggtggaagggtttattagtccctgccagcagctgtcctccctggtgcaggtggcctggccagcccactggattggggacgggccaggctgggccaggtcgggggctcagtctgggaggtaataaaagcagaccgacacgcagatgttgctcgggaagcag

SEQ ID NO: 155524 - DNA, 733 bp, Homo sapiens
  Payload ID: 10574
  Gene Symbol: MLST8
  Gene Name: MTOR associated protein, LST8 homolog
  ENST ID: ENST00000563107
  CDS Start-End: 104-499
gctcccctcgccgtcctggacacggcggagtgcggagccgcccgtaagatgctctgacctttgacccctgccgttcagctctagggcccgtgcaggccacaccatgaacacctccccaggcacggtgggcagtgacccggtcatcctggccactgcaggctacgaccacaccgtgcgcttctggcaggcccacagcggcatctgcacccggacggtgcagcaccaggactcccaggtgaatgccttggaggtcacaccggaccgcagcatgattgctgctgcaggttaccagcacatccgcatgtatgatctcaactccaataaccctaaccccatcatcagctacgacggcgtcaacaagaacatcgcgtctgtgggcttccacgaagacggccgctggatgtacacgggcggcgaggactgcacagccaggatctgggacctcaggcagagctcatcgtgggtgaccagagcggggctatccacatctgggacttgaaaacagaccacaacgagcagctgatccctgagcccgaggtctccatcacgtccgcccacatcgatcccgacgccagctacatggcagctgtcaatagcaccggaaactgctatgtctggaatctgacggggggcattggtgacgaggtgacccagctcatccccaagactaagatccctgcccacacgcgctacgccctgcagtgtcgcttcagccccgactccacgtgcgtgc

SEQ ID NO: 155525 - DNA, 564 bp, Homo sapiens
  Payload ID: 10574
  Gene Symbol: MLST8
  Gene Name: MTOR associated protein, LST8 homolog
  ENST ID: ENST00000563179
  CDS Start-End: 412-564
actggagagctagagagctgggggtaaaaggcagatgactggggttgcggaatgagtgggaggtgaggacgtggaactagaaaaatggtgaggaccgctctttgaagaagataatttgggattgttttatggtgtttttttaaaggctaaccggcaggaaggagaggaggtgaaggtataggaaggaaggctccatgggaactatggcctggtcaagggacaagatgcaccccctctgcggccagaggaaggggtgcagccagggagccatcgataactctacgctcggcctcgatcgactcgctccggctcccctcgccgtcctggacacggcggagtgcggagccgcccgtaagatgctctgacctttgacccctgccgttcagctctagggcccgtgcaggccacaccatgaacacctccccaggcacggtgggcagtgacccggtcatcctggccactgcaggctacgaccacaccgtgcgcttctggcaggcccacagcggcatctgcacccggacggtgcagcaccaggactcccaggtgaatgccttggaggtcaca

SEQ ID NO: 155526 - DNA, 855 bp, Homo sapiens
  Payload ID: 10574
  Gene Symbol: MLST8
  Gene Name: MTOR associated protein, LST8 homolog
  ENST ID: ENST00000567623
  CDS Start-End: 115-465
gactcgctccggctcccctcgccgtcctggacacggcggagtgcggagccgcccgtaagatgctctgacctttgacccctgccgttcagctctagggcccgtgcaggccacaccatgaacacctccccaggcacggtgggcagtgacccggtcatcctggccactgcaggctacgaccacaccgtgcgcttctggcaggcccacagcggcatctgcacccggacggtgcagcaccaggactcccaggtgaatgccttggaggtcacaccggaccgcagcatgattgctgctgcaggttaccagcacatccgcatgtatgatctcaactccaataaccctaaccccatcatcagctacgacggcgtcaacaagaacatcgcgtctgtgggcttccacgaagacggccgctggatgtacacgggcggcgaggactgcacagccaggatctgggacctcagaggctgagacagggagcttcctgtgggcgacttactgagagaagtgaggacaggaggagagtgaattgcatcagagcgcgagtcctgccttgagcccggagccagcttgttattccccttccaccagccactggcttaggctccctgctggagcagagggccctgcgtcccaagtatttcccaagaggtcccggaacctgcagtgccagcggatcttccaggtgaacgcacccattaactgcgtgtgcctgcaccccaaccaggcagagctcatcgtgggtgaccagagcggggctatccacatctgggacttgaaaacagaccacaacgagcagctgatccctgagcccgaggtctccatcacgtccgcccacatcgatcccgacgccagctacat

SEQ ID NO: 155527 - DNA, 581 bp, Homo sapiens
  Payload ID: 10574
  Gene Symbol: MLST8
  Gene Name: MTOR associated protein, LST8 homolog
  ENST ID: ENST00000562479
  CDS Start-End: 83-581
ctcgctccggctcccctcgccgtcctggacacggcggagtgcggagccgcccgtaagctctagggcccgtgcaggccacaccatgaacacctccccaggcacggtgggcagtgacccggtcatcctggccactgcaggctacgaccacaccgtgcgcttctggcaggcccacagcggcatctgcacccggacggtgcagcaccaggactcccaggtgaatgccttggaggtcacaccggaccgcagcatgattgctgctgcagttcagcctgtgtccctaggttaccagcacatccgcatgtatgatctcaactccaataaccctaaccccatcatcagctacgacggcgtcaacaagaacatcgcgtctgtgggcttccacgaagacggccgctggatgtacacgggcggcgaggactgcacagccaggatctgggacctcaggtcccggaacctgcagtgccagcggatcttccaggtgaacgcacccattaactgcgtgtgcctgcaccccaaccaggcagagctcatcgtgggtgaccagagcggggctatccacatctgggacttgaaaacagacc

SEQ ID NO: 155528 - DNA, 575 bp, Homo sapiens
  Payload ID: 10574
  Gene Symbol: MLST8
  Gene Name: MTOR associated protein, LST8 homolog
  ENST ID: ENST00000562851
  CDS Start-End: 85-303
gactcgctccggctcccctcgccgtcctggacacggcggagtgcggagccgcccgtaagctctagggcccgtgcaggccacaccatgaacacctccccaggcacggtgggcagtgacccggtcatcctggccactgcaggctacgaccacaccgtgcgcttctggcaggcccacagcggcatctgcacccggacggtgcagcaccaggactcccaggtgaatgccttggaggtcacaccggaccgcagcatgattgctgctgcagcctgtgtccctaggttaccagcacatccgcatgtatgatctcaactccaataaccctaaccccatcatcagctacgacggcgtcaacaagaacatcgcgtctgtgggcttccacgaagacggccgctggatgtacacgggcggcgaggactgcacagccaggatctgggacctcaggtcccggaacctgcagtgccagcggatcttccaggtgaacgcacccattaactgcgtgtgcctgcaccccaaccaggcagagctcatcgtgggtgaccagagcggggctatccacatctgggacttgaaaacag

SEQ ID NO: 155529 - DNA, 947 bp, Homo sapiens
  Payload ID: 10574
  Gene Symbol: MLST8
  Gene Name: MTOR associated protein, LST8 homolog
  ENST ID: ENST00000565717
  CDS Start-End: 79-297
cggagtgcggagccgcccgtaagatgctctgacctttgacccctgccgttcagctctagggcccgtgcaggccacaccatgaacacctccccaggcacggtgggcagtgacccggtcatcctggccactgcaggctacgaccacaccgtgcgcttctggcaggcccacagcggcatctgcacccggacggtgcagcaccaggactcccaggtgaatgccttggaggtcacaccggaccgcagcatgattgctgctgcagcctgtgtccctaggttaccagcacatccgcatgtatgatctcaactccaataaccctaaccccatcatcagctacgacggcgtcaacaagaacatcgcgtctgtgggcttccacgaagacggccgctggatgtacacgggcggcgaggactgcacagccaggatctgggacctcaggtcccggaacctgcagtgccagcggatcttccaggtgaacgcacccattaactgcgtgtgcctgcaccccaaccagagctcatcgtgggtgaccagagcggggctatccacatctgggacttgaaaacagaccacaacgagcagctgatccctgagcccgaggtctccatcacgtccgcccacatcgatcccgacgccagctacatggcagctgtcaatagcacctgcatcacttgtacctcttgcccccggatttcccttctgctggcctttgtcatgctgtctctctagctggtgcccttctcctgtctacttccgttggccatcggcatcctccaggaaggagaatttgagtccttggccaggcgtggcctcctgttcttggcttgccagggaaactgctatgtctggaatctgacggggggcattggtgacgaggtgacccagctcatccccaagactaagatccctgcccacacgcgctacgccctgcagtgtcgcttcagccccga

SEQ ID NO: 155530 - DNA, 1870 bp, Homo sapiens
  Payload ID: 10574
  Gene Symbol: MLST8
  Gene Name: MTOR associated protein, LST8 homolog
  Uniprot ID: Q9BVC4
  ENST ID: ENST00000569417
  CDS Start-End: 355-1335
gacagcccgggaaacggacagccgtgtcagaagggcaggtgccagtgggcaggaggccggagagaaagccgcagcttccttccacctcgcgccgggcccgcggccgcgcacggggaccgctccgagttcctcccggcgggaaccccccgccccagaactttggtctcgtcccacccacccccgcccgcgccatggtctcgccctagggagccatcgataactctacgctcggcctcgatcgactcgctccggctcccctcgccgtcctggacacggcggagtgcggagccgcccgtaagatgctctgacctttgacccctgccgttcagctctagggcccgtgcaggccacaccatgaacacctccccaggcacggtgggcagtgacccggtcatcctggccactgcaggctacgaccacaccgtgcgcttctggcaggcccacagcggcatctgcacccggacggtgcagcaccaggactcccaggtgaatgccttggaggtcacaccggaccgcagcatgattgctgctgcaggttaccagcacatccgcatgtatgatctcaactccaataaccctaaccccatcatcagctacgacggcgtcaacaagaacatcgcgtctgtgggcttccacgaagacggccgctggatgtacacgggcggcgaggactgcacagccaggatctgggacctcaggtcccggaacctgcagtgccagcggatcttccaggtgaacgcacccattaactgcgtgtgcctgcaccccaaccaggcagagctcatcgtgggtgaccagagcggggctatccacatctgggacttgaaaacagaccacaacgagcagctgatccctgagcccgaggtctccatcacgtccgcccacatcgatcccgacgccagctacatggcagctgtcaatagcaccggaaactgctatgtctggaatctgacggggggcattggtgacgaggtgacccagctcatccccaagactaagatccctgcccacacgcgctacgccctgcagtgtcgcttcagccccgactccacgctcctcgccacctgctcggctgatcagacgtgcaagatctggaggacgtccaacttctccctgatgacggagctgagcatcaagagcggcaaccccggggagtcctcccgcggctggatgtggggctgcgccttctcgggggactcccagtacatcgtcactgcttcctcggacaacctggcccggctctggtgtgtggagactggagagatcaagagagagtatggcggccaccagaaggctgttgtctgcctggccttcaatgacagtgtgctgggctagcctgtgacccctcgggactgcctggtgcaggtggtggcagctggagggacccatgcagcacccaggtcagagcagaccctcccctgccggcctgcgccagctggacctgatggccccctgtggcgccttgacctgctgggccaggctgccctgggactctcagcccccagttgcttatccagatgtgacagagctcgacccaagccaggctgcacactcctggactgggctagcctgcactgcctgggaaagtcggccgagggcccaaagctgctgaggggtctgaggctggtgcccacccccaagctagtgtgttctctgcccctccctgcccgcgtttcagggcctcggtccatagagaacaccaccaccatggccaggtggaagggtttattagtccctgccagcagctgtcctccctggtgcaggtggcctggccagcccactggattggggacgggccaggctgggccaggtcgggggctcagtctgggaggtaataaaagcagaccgacacgcagatgttgctcgggaa

SEQ ID NO: 155531 - DNA, 939 bp, Homo sapiens
  Payload ID: 10574
  Gene Symbol: MLST8
  Gene Name: MTOR associated protein, LST8 homolog
  ENST ID: ENST00000562352
  CDS Start-End: 115-939
gactcgctccggctcccctcgccgtcctggacacggcggagtgcggagccgcccgtaagatgctctgacctttgacccctgccgttcagctctagggcccgtgcaggccacaccatgaacacctccccaggcacggtgggcagtgacccggtcatcctggccactgcaggctacgaccacaccgtgcgcttctggcaggcccacagcggcatctgcacccggacggtgcagcaccaggactcccaggtgaatgccttggaggtcacaccggaccgcagcatgattgctgctgcagttcagcctgtgtccctaggttaccagcacatccgcatgtatgatctcaactccaataaccctaaccccatcatcagctacgacggcgtcaacaagaacatcgcgtctgtgggcttccacgaagacggccgctggatgtacacgggcggcgaggactgcacagccaggatctgggacctcaggtcccggaacctgcagtgccagcggatcttccaggtgaacgcacccattaactgcgtgtgcctgcaccccaaccaggcagagctcatcgtgggtgaccagagcggggctatccacatctgggacttgaaaacagaccacaacgagcagctgatccctgagcccgaggtctccatcacgtccgcccacatcgatcccgacgccagctacatggcagctgtcaatagcaccggaaactgctatgtctggaatctgacggggggcattggtgacgaggtgacccagctcatccccaagactaagatccctgcccacacgcgctacgccctgcagtgtcgcttcagccccgactccacgctcctcgccacctgctcggctgatcagacgtgcaagatctggaggacgtccaacttctccctgatgacggagctgagcatcaagagcggcaaccccggggagtcctcc

SEQ ID NO: 155532 - DNA, 1861 bp, Homo sapiens
  Payload ID: 10574
  Gene Symbol: MLST8
  Gene Name: MTOR associated protein, LST8 homolog
  Uniprot ID: Q9BVC4
  ENST ID: ENST00000564088
  CDS Start-End: 362-1342
gtagtgggtcagggagggcaccggaacagcgcgacccgacagcccgggaaacggacagccgtgtcagaagggcaggtgccagtgggcaggaggccggagagaaagccgcagcttccttccacctcgcgccgggcccgcggccgcgcacggggaccgctccgagttcctcccggcgggaaccccccgccccagaactttggtctcgtcccacccacccccgcccgcgccatggtctcgccctagggagccatcgataactctacgctcggcctcgatcgactcgctccggctcccctcgccgtcctggacacggcggagtgcggagccgcccgtaagctctagggcccgtgcaggccacaccatgaacacctccccaggcacggtgggcagtgacccggtcatcctggccactgcaggctacgaccacaccgtgcgcttctggcaggcccacagcggcatctgcacccggacggtgcagcaccaggactcccaggtgaatgccttggaggtcacaccggaccgcagcatgattgctgctgcaggttaccagcacatccgcatgtatgatctcaactccaataaccctaaccccatcatcagctacgacggcgtcaacaagaacatcgcgtctgtgggcttccacgaagacggccgctggatgtacacgggcggcgaggactgcacagccaggatctgggacctcaggtcccggaacctgcagtgccagcggatcttccaggtgaacgcacccattaactgcgtgtgcctgcaccccaaccaggcagagctcatcgtgggtgaccagagcggggctatccacatctgggacttgaaaacagaccacaacgagcagctgatccctgagcccgaggtctccatcacgtccgcccacatcgatcccgacgccagctacatggcagctgtcaatagcaccggaaactgctatgtctggaatctgacggggggcattggtgacgaggtgacccagctcatccccaagactaagatccctgcccacacgcgctacgccctgcagtgtcgcttcagccccgactccacgctcctcgccacctgctcggctgatcagacgtgcaagatctggaggacgtccaacttctccctgatgacggagctgagcatcaagagcggcaaccccggggagtcctcccgcggctggatgtggggctgcgccttctcgggggactcccagtacatcgtcactgcttcctcggacaacctggcccggctctggtgtgtggagactggagagatcaagagagagtatggcggccaccagaaggctgttgtctgcctggccttcaatgacagtgtgctgggctagcctgtgacccctcgggactgcctggtgcaggtggtggcagctggagggacccatgcagcacccaggtcagagcagaccctcccctgccggcctgcgccagctggacctgatggccccctgtggcgccttgacctgctgggccaggctgccctgggactctcagcccccagttgcttatccagatgtgacagagctcgacccaagccaggctgcacactcctggactgggctagcctgcactgcctgggaaagtcggccgagggcccaaagctgctgaggggtctgaggctggtgcccacccccaagctagtgtgttctctgcccctccctgcccgcgtttcagggcctcggtccatagagaacaccaccaccatggccaggtggaagggtttattagtccctgccagcagctgtcctccctggtgcaggtggcctggccagcccactggattggggacgggccaggctgggccaggtcgggggctcagtctgggaggtaataaaagcagaccgacacgc

SEQ ID NO: 155533 - DNA, 854 bp, Homo sapiens
  Payload ID: 10574
  Gene Symbol: MLST8
  Gene Name: MTOR associated protein, LST8 homolog
  ENST ID: ENST00000567282
  CDS Start-End: 82-297
cggcggagtgcggagccgcccgtaagatgctctgacctttgacccctgccgttcagctctagggcccgtgcaggccacaccatgaacacctccccaggcacggtgggcagtgacccggtcatcctggccactgcaggctacgaccacaccgtgcgcttctggcaggcccacagcggcatctgcacccggacggtgcagcaccaggactccgtgaatgccttggaggtcacaccggaccgcagcatgattgctgctgcagcctgtgtccctaggttaccagcacatccgcatgtatgatctcaactccaataaccctaaccccatcatcagctacgacggcgtcaacaagaacatcgcgtctgtgggcttccacgaagacggccgctggatgtacacgggcggcgaggactgcacagccaggatctgggacctcaggtcccggaacctgcagtgccagcggatcttccaggtgaacgcacccattaactgcgtgtgcctgcaccccaaccaggcagagctcatcgtgggtgaccagagcggggctatccacatctgggacttgaaaacagaccacaacgagcagctgatccctgagcccgaggtctccatcacgtccgcccacatcgatcccgacgccagctacatggcagctgtcaatagcaccggaaactgctatgtctggaatctgacggggggcattggtgacgaggtgacccagctcatccccaagactaagatccctgcccacacgcgctacgccctgcagtgtcgcttcagccccgactccacgtgcgtgcagggcctgctggcccgggaggggacctgcctgggctgggggctggagaggggagggg

SEQ ID NO: 155534 - DNA, 1553 bp, Homo sapiens
  Payload ID: 10575
  Gene Symbol: MTRNR2L1
  Gene Name: MT-RNR2-like 1
  Uniprot ID: P0CJ68
  ENST ID: ENST00000540040
  CDS Start-End: 952-1026
cccaaacccaactaattctactaccaaataacctcaactaaaacatttacccaaataaagtataggcgatagaaatgatatctcggcacaatagacataataccgcgatggaaagatgaaaaaacataaccaagcataaagtagcaaggacaaacccctataccttctgcataatgaattaactagaaataactttacaaagagaaccaaagccaagacccccgaaaccagacgagctacctaagaacagctgaaagagcacacccatctatgtagcaaaatagtgggaagattcataggtagaggtgacaagcctaccgagcctggtgatagctggttgtccaagatagaatcttagttcaactttaaatttatctacagaaccagctaatgcctttgtaaatttaactgttagtctaaagagggacagctctttagacactaggaaaaaaccttgtagagagagtaaaaaatataacttccaaagttggcctagaagaagcgatcaattaagaaggcgttcaagctcaacacccaaccacccaaaaaattccaaacacataactgaactcctcacatcacattggaccaatctatcatttcatagaagaaataatgttagtataagtgacatgcaaacattctcctccgcataagcctacatcagaccaaaatacttcactgacaattaacagcccaatatctataaataatcaatgaaaccattattacccacactgttaacccaacacaggcatgcttacaaggaaaggttaaaaaaagtaaaaggaactcagcgaatcttacccctcctgtttatcaaaaacatcacctctagcattaccagtactagaggcaccacctgcccagtgacatatgtttaatggctgcggtaccctaaccgtgtaaaggtagcataatcacttgttccttaaatagggacttgtctgaatggctccacgagggttcagctgtctcttactttcaaccagtgaaattgacctgcccgtgaagaggcggacataatacaacaagacgagaagaccctaaggagctttaatttatgaatgcaaacaagaccaaataggcccgcaggccctaaactaccagacctgcgttaaacatttcggttggggcgacctcggagtataacctaacctccgagcaacatatgctgagactataccagtcaaggcgaatatccacatacaattgacccaataatttgaccaacggaacaagttaccctagtgataacagtacaatcctattctagggtccacatcgacagtagcattaacgacctcgatgttggatcaggacatcccaatggtgcagccgctattaaaggttcgtttgttcaacgattagagtcctatgtgatctgagttcagaccggagtaatccaggttggtttctatctattctacatttcttccagtacgaaaggataagagaaatggggcccacttcataaagtgcccctgccccatagatgatattatctcagcattttactgtacccacacccacccaagaacagggtttgttaa

SEQ ID NO: 155535 - DNA, 1530 bp, Homo sapiens
  Payload ID: 10576
  Gene Symbol: MTRNR2L10
  Gene Name: MT-RNR2-like 10
  Uniprot ID: P0CJ77
  ENST ID: ENST00000545075
  CDS Start-End: 927-1001
caaacctcactaaaaatattattaaattatcttaatcaaaccatttaccctagacaaaagtataggcaatagaaatttttaccccggcgcaatagacatagaaccgtcagggaaagatgaaagaactgtatcaagcatcaaaaagcaaagacaaacccttatatcttctgcataatgtattaactagaaataactttacacagagaattatagccaagttccccaaaaccagacgagctaccgaagaacagctgaaagagcacacttacctatgtggcaaaatagtgagaagattcataagtagcagtgacaagcctaccgagcctggtgatagctggttgtccaagatgggatcttaattcaactttaaacttacccacagaattacttaatctccccataagtttagacagctctttagaccctaggaaacaaccttcctacagagagtaaaaaatatttccaccatagttggcccaaaagcaatcaccaattaagaaagcgtttaagctcaacatctatcttaaattctagtcactctactgaactcctaacatcacattggactaatctattacttaatagaagcaataatgttaatataagtaatatgaaaacattctccattgcataagcttacatcagactggaataacccactgacagttagcctaatattaataaacgatataataagctctttattatttacactgttaacccaacacaggtatgctctaaggaaagaatacaaaaagtaaaaggaactccgcaaattttaccccgcctgtttaccaaaaacatcacctctagcattaccagtattagaggcactgcctgcccagtgacatacgttcaatggccgcagtatcctgactgtgcaaaggtagcataatcacttgttccttaaataggaacttgtatgaatgaccacacgagggttcagctgtctcctacttttaatcagggaaattgacctatccgcgaagaggcggatataaacaaataagacgagaagaccctatgtatggagctttaatttattaatgcaaataaaaacttaagcctacaggccctagcctactatccctgcattaaaatttttggttggggtgacctcagagcataattcaacctccgagcaacctaaactaagactgcactagcctaagcaagttaatatatattgacccgataatttgatcaacggagtaagttaccctagggataacagcgcaatcctattctagagtccatatcaacaatagggtttacaatctcgatgttggatcaggacatcctaatggtgtcaccgctattaggggttcgtttgttcaacaattaaagtcctacgtgatgtgagttcagaccagagtaatccaggtcggtttctatctatttaacatttcccctagtatgaaaggacaagagaaatagggcccacttcataaagtgccctcgctccacagatgatgctatctcaatctaacaaatcatcacataccctacccaagaacagggtttgttaag

SEQ ID NO: 155536 - DNA, 1552 bp, Homo sapiens
  Payload ID: 10577
  Gene Symbol: MTRNR2L11
  Gene Name: MT-RNR2-like 11 (pseudogene)
  Uniprot ID: S4R3Y5
  ENST ID: ENST00000604646
  CDS Start-End: 950-1024
cccaaacctcgctaaaaatattattaaatcatctcaatcaaaccatttaccttagacgaaagtgtaggcgatagaaatttatgccttgatgcagtagatacactaccataagggaaagatgaaagaactaaattaagcactaaaaagcaaagataaagtcttttaccttctgcataatgtactagctagaaataacttgacacagagaaccatagccaagtctcccgaaaccagacgagctactcaagaacagctgaaagagcacacccacctgtgtggcaaaatagtgggaaaattcatgagtagtggtgacaagcctacggagccttgtgatagctggttgtccaagatagaatcttagttcaactttaaacttacccacagaattacttaagctccctgtaagtctgttagtctaaagagggacagctctttagaccctagggaataacttttctgtagaaagtaaaaaatattacccccatagttgacccacaaacagccaccaattaagaaagcgttcaacctcaacatctaattatcttaaattctaatcactttactgaactcctaacaacaccttggactaatctgttatttaatagaagcaataatgttcacataagtaacgtgaaaatattctccattgcataagcttatatcagactggaataacccactgacaactaacagcctaatattaataagcaatataacaagcaccttattatttattctgttaatccaacacaggcatgctctaaggaaagattacaaaaagtaaaaggaactctgcaaatcttactcggcctgtttaccaaaaatatctcctctagcatttccagtattagaggtactgcctgcccactgacatatgttcaacggccacggtatcctgactgtgcaaaggtagcataatcacttgttccctaaatagggacttttacgaatggccacacgagggttcagctgtcttttacttgtaatcagtgaaattgacctatccgtgaagaggtgggtataaacaaataagaaaagaagaccctatggagctttaactcattaatgcaaataaaacttcaaaaagcctacaggccttagcatactgtctgtgcattaaaattttggttggggtgacctcggagtataattcaacctccaaacagcctagactaagaccgcactagtgtaagcgagctgacacacattgattcgataatttgatcaacagaagaagttaccctaggggtaacagcacaatccttttctagagtccatatagacaatagggtttacaacctcaatgttggatcaggccatcctaatggcgtagctactattaagggttcatttgttcaatgattaaagtcctacgtgatctgagttcagaccagagtaatccaggtcagtttctatctatttaacatttctcctagtacagaaggacaagagaaatagggcccacttcataaagtgccctcgccccatagatgatattatctcaatctaacaaatcatcacacaccctacccaagaacagggtttgttaaga

SEQ ID NO: 155537 - DNA, 1049 bp, Homo sapiens
  Payload ID: 10578
  Gene Symbol: MTRNR2L12
  Gene Name: MT-RNR2-like 12
  Uniprot ID: P0DMP1
  ENST ID: ENST00000600213
  CDS Start-End: 964-1038
agccaaacctagccctaaacccgttccaccttactatcaaataaccttaaccaaaccatttacccaaataaagtataggcgatagaaattgtaaaccggcgcaatagatatagtaccgcaagggaaagatgaaaaattataaccaagcataatacagcaaggactaacccctgtaccttttgcataatgaattaactagaaataactttgcaaagagaaccaaagctaaggcccccgaaaccagacgagctacctaagaacagctaaaagagcacacccgtctatgtagcaaaatagtgggaagatttataggtagaggcgacaaacctatcgagcctggtgatagctggttgtccaagatagaatcttagttcaactttaaatttacctacagaaccttctaaatccccttgtaaatttaactgttagtccaaagaggaacagctctttggacactaggaaaaaaccttgtaaagagagtaaaaaatttaatacccatagtaggcctaaaagcagccaccaattaagaaagcgttcaagctcaacacccatcgtctaaaaaatcccaaacatacaactgagctccttacactcaattggaccaatctattaccttatagaagaactaatgttagtataagtaacatgaaaacattctcctccgcataagcctacatcagaccaaaatattaaactgacaattaacagcccaatatctacaatcaaccaacaagccattattaccctcactgttaacccaacacaggcatgcccacaaggaaaggttaaaaaaagtaaaaggaactcggcaaatcttaccccgcctgtttaccaaaaacatcacctctagcattatcagtattagaggcaccgcctgcccggtgacatatgtttaacggccgcggtaccctaaccgtgcaaaggtagcataatcacttgttccttaaatagggacttgtatgaatggctccacgagggttcagctgtctcttactttcaaccagtgaaattgacctacccgtgaagaggcgggcataacatagcaagac

SEQ ID NO: 155538 - DNA, 1445 bp, Homo sapiens
  Payload ID: 10579
  Gene Symbol: MTRNR2L13
  Gene Name: MT-RNR2-like 13
  Uniprot ID: S4R3P1
  ENST ID: ENST00000604093
  CDS Start-End: 926-1000
aatattatcaaactatcttaatcaaaccatttacattaaacgaaagtataggtgatagaaatttttaccctggtgtagtagacatagtaccgtaaaagaaaggtgaaagaactatataaagcactaaaaagcaaagacaagctcttataccttccgcataatgtattaactagaagtaactttacacagaggattatagccaagtcccccaaaaccagatgagctacccaagaacaactgaagagtacacccatctatgtggcaaaatagttgggagattcatgactagcggtgacaagcctaccaagcctggtgatagttggttgtccaacgtggaatcttagttcaactttaaacttacccacagaattatttactctccctgtaaatttagctgttagtctaagagggacagctctgtagaccctaggaaacgacgttcctacagagagtaaaaaatactaccaccatagttggcccaaacgcagccaccaattaagaaagcatttaaagctcaacatctaactatcttcaattctaatcactctactgaactcctaacatcatactggactaatcaattacttaatagaaccaataatgttaatataaacattctccattgcatacgtttacatcagactggaataacccactgacagttaacaacctaatattaataaatgatataataagcaccctattatttacactgttaacccaactaaggtatgctctaaggaaagattgcaaaaagtaagaggaacatgacaaatcttaccccacctgtttaccaaaaacatcacctctagcattaccagttttagagtcactgcctgcccggtgacatatgttcaacggccatggtatcctgaccgtgcaaaggtagcataatcgcttgttccctaaatagggacttgtatgaatggacacacaagggttcagctgtctcttacttttaatcagtgaaattgacctatctgtgaagaggcggatataaacaaatgagactagaaaaccctatggagctttaattcattaatgcaaataaaaacccaaacaagtctagaggccctggcctactatccctgcattaaaaattttggttggggtgagctcggagcatagttcaacctccgaacaacctaaactaagactgcagtagtctaagcgagttagtacacattgaccaaataattcaatcaacggaataaattaccctacggataaaagtattgacaatagggtttacaacctcgatgttggatgaggacatcctaatggtgtagccgctattaagggttcgtttgtttaacggttaaagttctatgtgatctgagttcagacctgagtaatccaggtcagtttctatctatataacatttatcttagtatgaaaggacaagagaaatagggcccacttcataaagtgccctcactccata

SEQ ID NO: 155539 - DNA, 1539 bp, Homo sapiens
  Payload ID: 10580
  Gene Symbol: MTRNR2L3
  Gene Name: MT-RNR2-like 3
  Uniprot ID: P0CJ70
  ENST ID: ENST00000543500
  CDS Start-End: 942-1016
cccaaacctcgctaaaaatattatcaaactatcttaatcaaaccatttaccttaaacaaaagtataggcgatagaaatttctaccctggtagatatttctggcaatagacacagtactgtaagggaaggatgaaagaactgtattgaggactaaaaagcaaagacaagcccttataccttctgcataatgcattaactagaaataactttacatagaactatggccaagtcccccgaaaccagacgagctacccaagaatagctgaaagagcacactcacctatgtggcaaaacagtgggaagattcatgagtagcggtgacacgcctaccgagcctggtgatagctggctggcttagttcaactttcaacttacccacagaattacttaaactccctgtaagtttaactgttagtctagagagacagacagctctttagacccttcctacagagagtaaaaaacattaccaccacagttggcccaaaagcagccactaattaagaaagcatttaagctcaatatctaactatcttaaattctaaccagtctactgaactcctaacatcacattggactaatctattacttaatagaagcagtaatgttaatgtaagtaagatgaagacattctccattgcataagcttacatcagacgggagtaacccactgacagttaacatcccaatattaataaatgatataataaacaccgtattatttgcactgttaacccaacacaggcatgctctaaggaaacattacaaaaaaataaaaggaactcagcaaatcttaccccgcctgtttaccaaaaacatcacctctagcattaccagtattagaggcactatctgcccagtgacatatattcaacagctgtggtatcctgaccgtgcgaaggtagcataatcacttgttctctaaatagggacttgaatgaatggccacacgaaggttcagctgtctcttactttcaaccagtgaaattgatctatccgtgaagaggcggatataaacaaataagacgagaaaaccttatggagctttaattcatcaatgcaaataaaaactccaacaagcctacaggccctagcctcctatccctgcattaaaaattttggttggggtgacctcggagcataattcaacctcctaacaacctaagaccacacaagtctaagtgagttattacacatcgacccaataatttgataaacggagtaagttaccctagggataacagcgcaatcctatactagagtccatatcgacaatagagtttacgacctcgatgttggatcaggacatcctaatggtgtagccgctattaagagtttgtttgttcaatgattaaagtcctatgtgatctcagttcagaccagagtaatccaggtcggtttctacctacttaacattcctcctactacgaaaggacaagagaaatagggcccacttcataaagtgccctcactccatagatgatgccatcccagtctcttaaatcatcacacatcctacccaagaacagggtttgttaa

SEQ ID NO: 155540 - DNA, 1762 bp, Homo sapiens
  Payload ID: 10581
  Gene Symbol: MTRNR2L4
  Gene Name: MT-RNR2-like 4
  Uniprot ID: P0CJ71
  ENST ID: ENST00000399974
  CDS Start-End: 839-925
gggacagctgtttagaccctaggaaataaccttcctccagagagtaaaaaatattaccaccgtagttggcccaaaagcagctaccgattaagaaagcattcaaggccaggtgcggtggctcacacctgtaatcccagcactttgggagaccgaggtgggcagatcatctgaggtcagcagattgagaccagcctgaccaacatggagaaactccatctctactaaaaatacaaaattagccaggcatggtggtgcatgcctgtgatcccagctactcgggagactgaggcaggagaatcgcttgaacccgggactcggaggttgcagtgagccaagattgcgtcactgcactccagcctggacaacaaaagcgaaactccgtctcaaaaaaaaaagaaaaaagaaaaaaagaaagctttcaagctcaacatccaattattttaaatcctaatcactctattgaactcctaacattacattagactaatctattacttaatagaagcaataatgttaatattagtaacacgaagacattctccattgcataagcttatatcaaaccagaatccactgatagttaacagcctaatattaataaagaataaataccctattatttataccattaatccaacacaggtatgctctaaggaaagattacaaaaagtataaggaactcgggaaatcttaccccacctgtttaccaaaaacatcacctctggcttcaccagtattagaggcaccgcctgcccagtgacatatgttcaacagctgcggtatcctgacattgtaaaggtagcataatcacttgttccctaaatagggacttgtatgaatggccacacaagggttcagctgtctcttactttcagtcagtgaaattgacctatccatgaagaggcagtataaacaaataagatgagaagactctatagagctttaattcattaatgcaaatagaaactcaaaaaaagcctacaggccctagcctactatctttgcattaaaaattttggttggggtgcccggcgtggtggctcacgcctataatcccagcactttgggaggctgagacaggcagatcacgaggtcaggagatcgagaccatcccggccaatatggtgaaatcccgtctctactaaaaatacaaaaattagctgggtgtggtggtatgtgcctgtaatcccagctactcaggagactgaggcaggagaatggctttaacccgggaggtggagatagcagtgagccaagatcgtgccactgcactccagcctggcaacagagccagactctgtcttaaaaaataaataaataaaaaacaaaaaaaataaaaattttcttttatttcagagcataattcaacctccaaactacctaaactaagaccgcactagtctaagcaagttaacacacactgacccaataatttgatcaacggaataagttatcctagggataacggcacaatcctattctagggtccatatcaacaacagggtttacagcttcaatgctggatcaggacatcctaatagtgtagccgctattaagggttcgttttttcaactattaaagtcccatgtgatctcagttcagatcggagtaatccaggtcggtttctaactatttaacatttctcctagtacaaaaggacaagagaagcagggcccatttcacaaagcacccttgccaccataaatgatgctgtctcaatctaacaaatcatcacacactctaccatcttaaacagtgttta

SEQ ID NO: 155541 - DNA, 739 bp, Homo sapiens
  Payload ID: 10582
  Gene Symbol: MTRNR2L5
  Gene Name: MT-RNR2-like 5
  Uniprot ID: P0CJ72
  ENST ID: ENST00000512524
  CDS Start-End: 598-672
tagaattttagttcaactttaaacttaacctacagaattacttaatcctcctgtaagtttaactgttaaagggggacggatcttcagatactagaaaataaccgtcctatagagagtaaaagattttaccaccataattggcctaaaagcagccaccaattaagaaagcgtttaagctcaacatctgactaacttcatttctaatcaccctgttaaactcctaatattacattggactaatctattattcagtagaagcaataatgttagtgtaagtaacattaagacattatccattgcataagcttacatcagaccagaataatccactgacagttaacaacctaatattaacaaatgattaatagacatcttattatctttattttaacccaatacagtcatgctctaaggaaagattacaaaaagtaaaaggaactcggcacatttcaccccatctctctaccaaaaacatcacccctagcattgctagtattagaggcactgcctgctcagtgacatatgtttaagggttgcggtatcctgaacttgcaaaggtagcataatcacttgttccctaagtagggacttgtatgaatggccacaccagggtttagctgtctcttactttcaaccagtgaaattgacctacctatgaagaggcgggtataaataaataggagaagaccctgtggagcttgaattcattaatgcaaatagattcaaacaagccaacagg

SEQ ID NO: 155542 - DNA, 1447 bp, Homo sapiens
  Payload ID: 10583
  Gene Symbol: MTRNR2L6
  Gene Name: MT-RNR2-like 6
  Uniprot ID: P0CJ73
  ENST ID: ENST00000604952
  CDS Start-End: 960-1034
aactctagccctaaacttaactaatagtactaccgaataaccttaatcaaaccatttacccaaacaaaagtataggcgaaagaaattttacccaggcgcagtggacgtagtactgcaaggtaaagatgaaaaagttaaccaagaataaaatagcaaggatagacccttataccttctgcgtaatgaattaactagaaataactttacacagagaaccaaagccaaggcccccaaaaccagacgagctacccaagaacagctaaaagaacacacccatctatgtagtaaaatagtggggagattcatgagtagtggtgataagcctactgagcctagtgatagctggttgtccaagatagaatcttagttcaactttaaatttacctacagagccacttaatccccctgtaaatttaactgttagtctaaagagggacagctctttagacattaggaaacaaccttcatgtagagagtaaaaaacattatccccatagttggcccgaaagcagccatcaattaagaaagcgttcaagctcaacatccaaccactctaaattctaatcacaccactgaactcctaacaccacattggactaatctattactttatagatgcaataatattaatataagtaacatgaaatattctccactgcttaagcctacatcagaccagaataacccactgacaaattaacagcctaatattaataaacaactcaacaaatttattattaccgatactgttaatccaacacaggcatgctctaaggaaaggttaaaaaaaattaaaaggaactcggcaaattttaccctgcctgtttaccaaaaacatcacctctagcattattagtattagaggcaccacctgccagtgacatatgttcaacggccacagtaccctgaccatgcaaaggtagcataatcacttgttccttaaatagggacttgtatgaatgaccccacgagggttcagctgtctcttacttccaaccagtgaaactgacctgcctgtgaagaggcgaacatgaataaataagatgagaagatcctatggagctttaatttattaatgcaaacaaagctcagataagcccacaggccttaaactactgtccctgcattaaatattttggttggggtgacctcggagcataatttaacctccgagcaacctatgctaagactaaacaagtttaagcgaattactatacatatattgacccaataatttgatcaacggaacaagttaccctagggataacagcgcaatcctattctagagtccatattgacaatagggtttacgacctcgatgttggatcaggacatcctaatggtgtagctgctatcaagggttcatttgttcaatgattaaagtcctacgtggtctgagttcagaccggagcaagccaggtctggtacatgtgtatttaagtcctcc

SEQ ID NO: 155543 - DNA, 1447 bp, Homo sapiens
  Payload ID: 10583
  Gene Symbol: MTRNR2L6
  Gene Name: MT-RNR2-like 6
  Uniprot ID: P0CJ73
  ENST ID: ENST00000633925
  CDS Start-End: 960-1034
aactctagccctaaacttaactaatagtactaccgaataaccttaatcaaaccatttacccaaacaaaagtataggcgaaagaaattttacccaggcgcagtggacgtagtactgcaaggtaaagatgaaaaagttaaccaagaataaaatagcaaggatagacccttataccttctgcgtaatgaattaactagaaataactttacacagagaaccaaagccaaggcccccaaaaccagacgagctacccaagaacagctaaaagaacacacccatctatgtagtaaaatagtggggagattcatgagtagtggtgataagcctactgagcctagtgatagctggttgtccaagatagaatcttagttcaactttaaatttacctacagagccacttaatccccctgtaaatttaactgttagtctaaagagggacagctctttagacattaggaaacaaccttcatgtagagagtaaaaaacattatccccatagttggcccgaaagcagccatcaattaagaaagcattcaagctcaacatccaaccactctaaattctaatcacaccactgaactcctaacaccacattggactaatctattactttatagatgcaataatattaatataagtaacatgaaatattctccactgcttaagcctacatcagaccagaataacccactgacaaattaacagcctaatattaataaacaactcaacaaatttattattaccgatactgttaatccaacacaggcatgctctaaggaaaggttaaaaaaaattaaaaggaactcggcaaattttaccctgcctgtttaccaaaaacatcacctctagcattattagtattagaggcaccacctgccagtgacatatgttcaacggccacagtaccctgaccatgcaaaggtagcataatcacttgttccttaaatagggacttgtatgaatgaccccacgagggttcagctgtctcttacttccaaccagtgaaactgacctgcctgtgaagaggcgaacatgaataaataagatgagaagatcctatggagctttaatttattaatgcaaacaaagctcagataagcccacaggccttaaactactgtccctgcattaaatattttggttggggtgacctcggagcataatttaacctccgagcaacctatgctaagactaaacaagtttaagcgaattactatacatatattgacccaataatttgatcaacggaacaagttaccctagggataacagcgcaatcctattctagagtccatattgacaatagggtttacgacctcgatgttggatcaggacatcctaatggtgtagctgctatcaagggttcatttgttcaatgattaaagtcctacgtggtctgagttcagaccggagcaagccaggtctggtacatgtgtatttaagtcctcc

SEQ ID NO: 155544 - DNA, 1535 bp, Homo sapiens
  Payload ID: 10584
  Gene Symbol: MTRNR2L7
  Gene Name: MT-RNR2-like 7
  Uniprot ID: P0CJ74
  ENST ID: ENST00000544824
  CDS Start-End: 931-1005
tattatcaaactatcttaatcaaaccatttaccttaaataaaggtataggtgatagaaatttttagcctggcacaatagacttagtacagtaagggaaagatgaaagaactgtatcaagcactgaaaagcaaagacaagcccttatgccttctgcataatgtattaaccagaaataactttacacagagaactatagccaagtcccccaaaaccagccaagctacccaagaacagctgaaagagcacactcacctatgtggcaagatagtgggaagattcatgagtagaagtgacaaggctatggagcctggtgatagctggttgtccaagatagactcctagttcaactttaagcttatacacagaattacttaacctccctgtaagtttaactgttagtctaaagagggacagctctttagaccctaggaaacaaccttcctacagaaaataaaaaatattaccaccacagttggcccaaaagcagccaccaattaagaacatgtttaagttcaacatctatcttaaattctaatcactctactgaactcctaacatcacactggactaatctattacttaatagacacaataatgttagtataagtaacatgaagacattctccattgcataagcttacatcagaccagaataatccactgacagttaacagcctaatattaataaacaatataataaacaccctattatttacactgttaacccaacacaggtatgctctaaggaaagattacaaaaagtaaaaggaactcggcaaatcatactctgcctgtttaccaaaaacacacctctagcattaccagtatttgaggcactgcctgcccagtgacatttgttcaacagccacagtatcctgaccatgcaaaagtagcataatcacttgttccctaaatagggacttgtatgaatggccacaggagggttcggctgcctcttacttttaatcagggaaattgacctatccgtgaagaggcagatataaacaaataagatgagaagctccctatggagctttaattcattaatgcaaattaaaactcaaacaagcctacaggctctagcctactattcttgcattaaaaattttggttggggtgaccttggagcataattcaacctctgaacaacctacactaagactgcactagtctaagtgagttaatacatatggacccaataatttgatcaacagagtaaggtaccctagggataacagcacaatccattctacagttcatattgacaatagggtttatgaccttgatgttagatcaggacatcctaatggtgtaaccactgttaaggattcatttattcaatgattaaagtcaattaatgtgatctgagttcagactggagtaatccaggttggtttctatctatttaacatttctccaagtatgaaaggacaagagaaatagagtccctttcataaagtgccctcacttcatagaggatgctatctcaatctaaaaaatcatcaccaccctacccaagaacagggtttgttaa

SEQ ID NO: 155545 - DNA, 1303 bp, Homo sapiens
  Payload ID: 10585
  Gene Symbol: MTRNR2L8
  Gene Name: MT-RNR2-like 8
  Uniprot ID: P0CJ75
  ENST ID: ENST00000536684
  CDS Start-End: 964-1038
agccaaacctagccccaaacccattccaccttactaccgaacagctttaaccaaatcatttacccaaataaagtataggcgatagaaattgtaaatcggcgcaatagatatagtaccgcaagggaaagatgaaaaattgcaaccaagcataatacagcaaggactaatccctgtaccttctgcataatgaattaactagaaataactttgcaaagagaaccaaagctaagacccccgaaaccagacgagctacctaagaacagctaaaagagcacacccgtctatgtagcaaaatagtgggaagattcgtaggtagaggcgacaaacctaccgagtctggtgatagctggttgtccaagacagaatcttagttcaactttaaatttacccacagaaccctccaaatccccctgtaaatttaactgttagtccaaagaggaacagctctttggacactaggaaaaaaccttgtaaagagagtaaaaaatttaatacccacagtaggcctaaaagcagccaccaattaagaaagcgttcaagctcgacacctgtcatctaaaaaatcccaaacacataactgaactccttgcacccaattggaccaatctattaccctatagaagagctaatgttagtataagtaacatgaaaacattctcctccgcataagcctacatcagaccaaaatattaaactgacaattaacagcccaatatctataaccaaccaacaagccattattacccccactgttaacccaacacaggcatgcccacaaggaaaggttaaaaaaagtaaaaggaactcggcaaatcttaccccgcctgtttaccaaaaacatcacctctagcattctcagtattagaggcaccgcctgcccagtgacatgcgtttaacggccgcggtaccctaactgtgcaaaggtagcataatcacttgttccttaaatagggacttgtatgaatggctccacgagggttcagctgtctcttactttcaaccagtgaaattgacctgcccgtgaagaggcgggcatagtataacaagacgagaagaccctatggagctttaattcattaacgcaaacaacacttaacaagtccacaggccctaaactatcaaacctgcgtgaaaaatttcggttggggcgacctcggagcacaatccgacctccgagcaacacatgccgagacttcaccagtcaaagcgaattaccacgtttaattgatccaataacttgaccaacggaacaagttaccctagggataacagcgcaatcctattctagagtccatatcaacaa

SEQ ID NO: 155546 - DNA, 859 bp, Homo sapiens
  Payload ID: 10586
  Gene Symbol: MUC1
  Gene Name: mucin 1, cell surface associated
  Uniprot ID: P15941
  ENST ID: ENST00000337604
  CDS Start-End: 26-847
cctccccacccatttcaccaccaccatgacaccgggcacccagtctcctttcttcctgctgctgctcctcacagtgcttacagttgttacgggttctggtcatgcaagctctaccccaggtggagaaaaggagacttcggctacccagagaagttcagtgcccagctctactgagaagaatgctttgtctactggggtctctttctttttcctgtcttttcacatttcaaacctccagtttaattcctctctggaagatcccagcaccgactactaccaagagctgcagagagacatttctgaaatgtttttgcagatttataaacaagggggttttctgggcctctccaatattaagttcaggccaggatctgtggtggtacaattgactctggccttccgagaaggtaccatcaatgtccacgacgtggagacacagttcaatcagtataaaacggaagcagcctctcgatataacctgacgatctcagacgtcagcgtgagtgatgtgccatttcctttctctgcccagtctggggctggggtgccaggctggggcatcgcgctgctggtgctggtctgtgttctggttgcgctggccattgtctatctcattgccttggctgtctgtcagtgccgccgaaagaactacgggcagctggacatctttccagcccgggatacctaccatcctatgagcgagtaccccacctaccacacccatgggcgctatgtgccccctagcagtaccgatcgtagcccctatgagaaggtttctgcaggtaatggtggcagcagcctctcttacacaaacccagcagtggcagccacttctgccaacttgtaggggcacgtcgcc

SEQ ID NO: 155547 - DNA, 648 bp, Homo sapiens
  Payload ID: 10586
  Gene Symbol: MUC1
  Gene Name: mucin 1, cell surface associated
  Uniprot ID: P15941
  ENST ID: ENST00000343256
  CDS Start-End: 25-636
ctccccacccatttcaccaccaccatgacaccgggcacccagtctcctttcttcctgctgctgctcctcacagtgcttacagttgttacgggttctggtcatgcaagctctaccccaggtggagaaaaggagacttcggctacccagagaagttcagtgcccagctctactgagaagaatgctatcccagcaccgactactaccaagagctgcagagagacatttctgaaatgtttttgcagatttataaacaagggggttttctgggcctctccaatattaagttcagtgagtgatgtgccatttcctttctctgcccagtctggggctggggtgccaggctggggcatcgcgctgctggtgctggtctgtgttctggttgcgctggccattgtctatctcattgccttggctgtctgtcagtgccgccgaaagaactacgggcagctggacatctttccagcccgggatacctaccatcctatgagcgagtaccccacctaccacacccatgggcgctatgtgccccctagcagtaccgatcgtagcccctatgagaaggtttctgcaggtaatggtggcagcagcctctcttacacaaacccagcagtggcagccacttctgccaacttgtaggggcacgtcgcc

SEQ ID NO: 155548 - DNA, 537 bp, Homo sapiens
  Payload ID: 10586
  Gene Symbol: MUC1
  Gene Name: mucin 1, cell surface associated
  Uniprot ID: P15941
  ENST ID: ENST00000342482
  CDS Start-End: 25-525
ctccccacccatttcaccaccaccatgacaccgggcacccagtctcctttcttcctgctgctgctcctcacagtgcttacagctaccacagcccctaaacccgcaacagttgttacgggttctggtcatgcaagctctaccccaggtggagaaaaggagacttcggctacccagagaagttcagtgcccagctctactgagaagaatgcttctggggctggggtgccaggctggggcatcgcgctgctggtgctggtctgtgttctggttgcgctggccattgtctatctcattgccttggctgtctgtcagtgccgccgaaagaactacgggcagctggacatctttccagcccgggatacctaccatcctatgagcgagtaccccacctaccacacccatgggcgctatgtgccccctagcagtaccgatcgtagcccctatgagaaggtttctgcaggtaatggtggcagcagcctctcttacacaaacccagcagtggcagccacttctgccaacttgtaggggcacgtcgcc

SEQ ID NO: 155549 - DNA, 1107 bp, Homo sapiens
  Payload ID: 10586
  Gene Symbol: MUC1
  Gene Name: mucin 1, cell surface associated
  ENST ID: ENST00000338684
  CDS Start-End: 73-798
cgctccacctctcaagcagccagcgcctgcctgaatctgttctgccccctccccacccatttcaccaccaccatgacaccgggcacccagtctcctttcttcctgctgctgctcctcacagtgcttacagctaccacagcccctaaacccgcaacagttgttacgggttctggtcatgcaagctctaccccaggtggagaaaaggagacttcggctacccagagaagttcagtgcccagctctactgagaagaatgcttttttgcagatttataaacaagggggttttctgggcctctccaatattaagttcaggccaggatctgtggtggtacaattgactctggccttccgagaaggtaccatcaatgtccacgacgtggagacacagttcaatcagtataaaacggaagcagcctctcgatataacctgacgatctcagacgtcagcgtgagtgatgtgccatttcctttctctgcccagtctggggctggggtgccaggctggggcatcgcgctgctggtgctggtctgtgttctggttgcgctggccattgtctatctcattgccttggctgtctgtcagtgccgccgaaagaactacgggcagctggacatctttccagcccgggatacctaccatcctatgagcgagtaccccacctaccacacccatgggcgctatgtgccccctagcagtaccgatcgtagcccctatgagaaggtttctgcaggtaatggtggcagcagcctctcttacacaaacccagcagtggcagccacttctgccaacttgtaggggcacgtcgcccgctgagctgagtggccagccagtgccattccactccactcaggttcttcagggccagagcccctgcaccctgtttgggctggtgagctgggagttcaggtgggctgctcacagcctccttcagaggccccaccaatttctcggacacttctcagtgtgtggaagctcatgtgggcccctgagggctcatgcctgggaagtgttgtggtgggggctcccaggaggactggcccagagagccctgagatagcggggatcctgaactggactgaataaaacgtggtctcccactgcgcc

SEQ ID NO: 155550 - DNA, 543 bp, Homo sapiens
  Payload ID: 10586
  Gene Symbol: MUC1
  Gene Name: mucin 1, cell surface associated
  Uniprot ID: P15941
  ENST ID: ENST00000368389
  CDS Start-End: 25-531
ctccccacccatttcaccaccaccatgacaccgggcacccagtctcctttcttcctgctgctgctcctcacagtgcttacagttgttacgggttctggtcatgcaagctctaccccaggtggagaaaaggagacttcggctacccagagaagttcagtgcccagctctactgagaagaatgctttgtctactggggtctctttctttttcctgtcttttcacatttcaaacctccagtttaattcctctctggaagatcccagcaccgactactaccaagagctgcagagagacatttctgaaatggctgtctgtcagtgccgccgaaagaactacgggcagctggacatctttccagcccgggatacctaccatcctatgagcgagtaccccacctaccacacccatgggcgctatgtgccccctagcagtaccgatcgtagcccctatgagaaggtttctgcaggtaatggtggcagcagcctctcttacacaaacccagcagtggcagccacttctgccaacttgtaggggcacgtcgcc

SEQ ID NO: 155551 - DNA, 804 bp, Homo sapiens
  Payload ID: 10586
  Gene Symbol: MUC1
  Gene Name: mucin 1, cell surface associated
  Uniprot ID: P15941
  ENST ID: ENST00000368390
  CDS Start-End: 25-792
ctccccacccatttcaccaccaccatgacaccgggcacccagtctcctttcttcctgctgctgctcctcacagtgcttacagttgttacgggttctggtcatgcaagctctaccccaggtggagaaaaggagacttcggctacccagagaagttcagtgcccagctctactgagaagaatgcttttaattcctctctggaagatcccagcaccgactactaccaagagctgcagagagacatttctgaaatgtttttgcagatttataaacaagggggttttctgggcctctccaatattaagttcaggccaggatctgtggtggtacaattgactctggccttccgagaaggtaccatcaatgtccacgacgtggagacacagttcaatcagtataaaacggaagcagcctctcgatataacctgacgatctcagacgtcagcgtgagtgatgtgccatttcctttctctgcccagtctggggctggggtgccaggctggggcatcgcgctgctggtgctggtctgtgttctggttgcgctggccattgtctatctcattgccttggctgtctgtcagtgccgccgaaagaactacgggcagctggacatctttccagcccgggatacctaccatcctatgagcgagtaccccacctaccacacccatgggcgctatgtgccccctagcagtaccgatcgtagcccctatgagaaggtttctgcaggtaatggtggcagcagcctctcttacacaaacccagcagtggcagccacttctgccaacttgtaggggcacgtcgcc

SEQ ID NO: 155552 - DNA, 1032 bp, Homo sapiens
  Payload ID: 10586
  Gene Symbol: MUC1
  Gene Name: mucin 1, cell surface associated
  Uniprot ID: P15941
  ENST ID: ENST00000368392
  CDS Start-End: 51-845
gcgcctgcctgaatctgttctgccccctccccacccatttcaccaccaccatgacaccgggcacccagtctcctttcttcctgctgctgctcctcacagtgcttacagctaccacagcccctaaacccgcaacagttgttacgggttctggtcatgcaagctctaccccaggtggagaaaaggagacttcggctacccagagaagttcagtgcccagctctactgagaagaatgcttttaattcctctctggaagatcccagcaccgactactaccaagagctgcagagagacatttctgaaatgtttttgcagatttataaacaagggggttttctgggcctctccaatattaagttcaggccaggatctgtggtggtacaattgactctggccttccgagaaggtaccatcaatgtccacgacgtggagacacagttcaatcagtataaaacggaagcagcctctcgatataacctgacgatctcagacgtcagcgtgagtgatgtgccatttcctttctctgcccagtctggggctggggtgccaggctggggcatcgcgctgctggtgctggtctgtgttctggttgcgctggccattgtctatctcattgccttggctgtctgtcagtgccgccgaaagaactacgggcagctggacatctttccagcccgggatacctaccatcctatgagcgagtaccccacctaccacacccatgggcgctatgtgccccctagcagtaccgatcgtagcccctatgagaaggtttctgcaggtaatggtggcagcagcctctcttacacaaacccagcagtggcagccacttctgccaacttgtaggggcacgtcgcccgctgagctgagtggccagccagtgccattccactccactcaggttcttcagggccagagcccctgcaccctgtttgggctggtgagctgggagttcaggtgggctgctcacagcctccttcagaggccccaccaatttctcggacacttctcagtgtgtggaagctcatgtggg

SEQ ID NO: 155553 - DNA, 937 bp, Homo sapiens
  Payload ID: 10586
  Gene Symbol: MUC1
  Gene Name: mucin 1, cell surface associated
  Uniprot ID: P15941
  ENST ID: ENST00000368393
  CDS Start-End: 51-647
gcgcctgcctgaatctgttctgccccctccccacccatttcaccaccaccatgacaccgggcacccagtctcctttcttcctgctgctgctcctcacagtgcttacagttgttacgggttctggtcatgcaagctctaccccaggtggagaaaaggagacttcggctacccagagaagttcagtgcccagctctactgagaagaatgctttgtctactggggtctctttctttttcctgtcttttcacatttcaaacctccagtttaattcctctctggaagatcccagcaccgactactaccaagagctgcagagagacatttctgaaatgtttttgcagatttataaacaagggggttttctgggcctctccaatattaagttcaggccaggatctgtggtggtacaattgactctggccttccgagaaggtaccatcaatgtccacgacgtggagacacagttcaatcagtataaaacggaagcagcctctcgatataacctgacgatctcagacgtcagcggctgtctgtcagtgccgccgaaagaactacgggcagctggacatctttccagcccgggatacctaccatcctatgagcgagtaccccacctaccacacccatgggcgctatgtgccccctagcagtaccgatcgtagcccctatgagaaggtttctgcaggtaatggtggcagcagcctctcttacacaaacccagcagtggcagccacttctgccaacttgtaggggcacgtcgcccgctgagctgagtggccagccagtgccattccactccactcaggttcttcagggccagagcccctgcaccctgtttgggctggtgagctgggagttcaggtgggctgctcacagcctccttcagaggccccaccaatttctcggacacttctcagtgtgtggaagctcatgtggg

SEQ ID NO: 155554 - DNA, 516 bp, Homo sapiens
  Payload ID: 10586
  Gene Symbol: MUC1
  Gene Name: mucin 1, cell surface associated
  Uniprot ID: P15941
  ENST ID: ENST00000368396
  CDS Start-End: 25-504
ctccccacccatttcaccaccaccatgacaccgggcacccagtctcctttcttcctgctgctgctcctcacagtgcttacagctaccacagcccctaaacccgcaacagttgttacgggttctggtcatgcaagctctaccccaggtggagaaaaggagacttcggctacccagagaagttcagtgcccagctctactgagaagaatgcttttaattcctctctggaagatcccagcaccgactactaccaagagctgcagagagacatttctgaaatggctgtctgtcagtgccgccgaaagaactacgggcagctggacatctttccagcccgggatacctaccatcctatgagcgagtaccccacctaccacacccatgggcgctatgtgccccctagcagtaccgatcgtagcccctatgagaaggtttctgcaggtaatggtggcagcagcctctcttacacaaacccagcagtggcagccacttctgccaacttgtaggggcacgtcgcc

SEQ ID NO: 155555 - DNA, 729 bp, Homo sapiens
  Payload ID: 10586
  Gene Symbol: MUC1
  Gene Name: mucin 1, cell surface associated
  Uniprot ID: P15941
  ENST ID: ENST00000368398
  CDS Start-End: 25-717
ctccccacccatttcaccaccaccatgacaccgggcacccagtctcctttcttcctgctgctgctcctcacagtgcttacagttgttacgggttctggtcatgcaagctctaccccaggtggagaaaaggagacttcggctacccagagaagttcagtgcccagctctactgagaagaatgctatcccagcaccgactactaccaagagctgcagagagacatttctgaaatggccaggatctgtggtggtacaattgactctggccttccgagaaggtaccatcaatgtccacgacgtggagacacagttcaatcagtataaaacggaagcagcctctcgatataacctgacgatctcagacgtcagcgtgagtgatgtgccatttcctttctctgcccagtctggggctggggtgccaggctggggcatcgcgctgctggtgctggtctgtgttctggttgcgctggccattgtctatctcattgccttggctgtctgtcagtgccgccgaaagaactacgggcagctggacatctttccagcccgggatacctaccatcctatgagcgagtaccccacctaccacacccatgggcgctatgtgccccctagcagtaccgatcgtagcccctatgagaaggtttctgcaggtaatggtggcagcagcctctcttacacaaacccagcagtggcagccacttctgccaacttgtaggggcacgtcgcc

SEQ ID NO: 155556 - DNA, 1161 bp, Homo sapiens
  Payload ID: 10586
  Gene Symbol: MUC1
  Gene Name: mucin 1, cell surface associated
  ENST ID: ENST00000457295
  CDS Start-End: 51-857
gcgcctgcctgaatctgttctgccccctccccacccatttcaccaccaccatgacaccgggcacccagtctcctttcttcctgctgctgctcctcacagtgcttacagctaccacagcccctaaacccgcaacagttgttacgggttctggtcatgcaagctctaccccaggtggagaaaaggagacttcggctacccagagaagttcagtgcccagctctactgagaagaatgctttgtctactggggtctctttctttttcctgtcttttcacatttcaaacctccagtttaattcctctctggaagatcccagcaccgactactaccaagagctgcagagagacatttctgaaatgtttttgcagatttataaacaagggggttttctgggcctctccaatattaagttcaggccaggatctgtggtggtacaattgactctggccttccgagaaggtaccatcaatgtccacgacgtggagacacagttcaatcagtataaaacggaagcagcctctcgatataacctgacgatctcagacgtcagcgtgagtgatgtgccatttcctttctctgcccagtctggggctggggtgccaggctggggcatcgcgctgctggtgctggtctgtgttctggttgcgctggccattgtctatctcattgccttggctgtctgtcagtgccgccgaaagaactacgggcagctggacatctttccagcccgggatacctaccatcctatgagcgagtaccccacctaccacacccatgggcgctatgtgccccctagcagtaccgatcgtagcccctatgagaaggaatggagggtagaccgagaaaggctggcatagggggaggtttcccaggtagaagaagaagtgtcagcagaccaggtttctgcaggtaatggtggcagcagcctctcttacacaaacccagcagtggcagccacttctgccaacttgtaggggcacgtcgcccgctgagctgagtggccagccagtgccattccactccactcaggttcttcagggccagagcccctgcaccctgtttgggctggtgagctgggagttcaggtgggctgctcacagcctccttcagaggccccaccaatttctcggacacttctcagtgtgtggaagctcatgtggg

SEQ ID NO: 155557 - DNA, 927 bp, Homo sapiens
  Payload ID: 10586
  Gene Symbol: MUC1
  Gene Name: mucin 1, cell surface associated
  ENST ID: ENST00000438413
  CDS Start-End: 51-740
gcgcctgcctgaatctgttctgccccctccccacccatttcaccaccaccatgacaccgggcacccagtctcctttcttcctgctgctgctcctcacagtgcttacagttgttacgggttctggtcatgcaagctctaccccaggtggagaaaaggagacttcggctacccagagaagttcagtgcccagctctactgagaagaatgctatttataaacaagggggttttctgggcctctccaatattaagttcaggccaggatctgtggtggtacaattgactctggccttccgagaaggtaccatcaatgtccacgacgtggagacacagttcaatcagtataaaacggaagcagcctctcgatataacctgacgatctcagacgtcagcgtgagtgatgtgccatttcctttctctgcccagtctggggctggggtgccaggctggggcatcgcgctgctggtgctggtctgtgttctggttgcgctggccattgtctatctcattgccttggctgtctgtcagtgccgccgaaagaactacgggcagctggacatctttccagcccgggatacctaccatcctatgagcgagtaccccacctaccacacccatgggcgctatgtgccccctagcagtaccgatcgtagcccctatgagaaggtttctgcaggtaatggtggcagcagcctctcttacacaaacccagcagtggcagccacttctgccaacttgtaggggcacgtcgcccgctgagctgagtggccagccagtgccattccactccactcaggttcttcagggccagagcccctgcaccctgtttgggctggtgagctgggagttcaggtgggctgctcacagcctccttcagaggccccaccaatttctcggacacttctcagtgtgtggaagctcatgtggg

SEQ ID NO: 155558 - DNA, 666 bp, Homo sapiens
  Payload ID: 10586
  Gene Symbol: MUC1
  Gene Name: mucin 1, cell surface associated
  ENST ID: ENST00000485118
  CDS Start-End: 1-258
acggaagcagcctctcgatataacctgacgatctcagacgtcagcgtctggggctggggtgccaggctggggcatcgcgctgctggtgctggtctgtgttctggttgcgctggccattgtctatctcattgccttggctgtctgtcagtgccgccgaaagaactacgggcagctggacatctttccagcccgggatacctaccatcctatgagcgagtaccccacctaccacacccatgggcgctatgtgccccctagcagtaccgatcgtagcccctatgagaaggtttctgcaggtaatggtggcagcagcctctcttacacaaacccagcagtggcagccacttctgccaacttgtaggggcacgtcgcccgctgagctgagtggccagccagtgccattccactccactcaggttcttcagggccagagcccctgcaccctgtttgggctggtgagctgggagttcaggtgggctgctcacagcctccttcagaggccccaccaatttctcggacacttctcagtgtgtggaagctcatgtgggcccctgagggctcatgcctgggaagtgttgtggtgggggctcccaggaggactggcccagagagccctgagatagcggggatcctgaactggactgaataaaacgtggtctcccactg

SEQ ID NO: 155559 - DNA, 1112 bp, Homo sapiens
  Payload ID: 10586
  Gene Symbol: MUC1
  Gene Name: mucin 1, cell surface associated
  ENST ID: ENST00000462317
  CDS Start-End: 1-687
gccagtagcactcaccatagcacggtacctcctctcacctcctccaatcacagcacttctccccagttgtctactggggtctctttctttttcctgtcttttcacatttcaaacctccagtttaattcctctctggaagatcccagcaccgactactaccaagagctgcagagagacatttctgaaatgtttttgcagatttataaacaagggggttttctgggcctctccaatattaagttcaggccaggatctgtggtggtacaattgactctggccttccgagaaggtaccatcaatgtccacgacgtggagacacagttcaatcagtataaaacggaagcagcctctcgatataacctgacgatctcagacgtcagcgtgagtgatgtgccatttcctttctctgcccagtctggggctggggtgccaggctggggcatcgcgctgctggtgctggtctgtgttctggttgcgctggccattgtctatctcattgccttggctgtctgtcagtgccgccgaaagaactacgggcagctggacatctttccagcccgggatacctaccatcctatgagcgagtaccccacctaccacacccatgggcgctatgtgccccctagcagtaccgatcgtagcccctatgagaaggaatggagggtagaccgagaaaggctggcatagggggaggtttcccaggtagaagaagaagtgtcagcagaccaggtttctgcaggtaatggtggcagcagcctctcttacacaaacccagcagtggcagccacttctgccaacttgtaggggcacgtcgcccgctgagctgagtggccagccagtgccattccactccactcaggttcttcagggccagagcccctgcaccctgtttgggctggtgagctgggagttcaggtgggctgctcacagcctccttcagaggccccaccaatttctcggacacttctcagtgtgtggaagctcatgtgggcccctgagggctcatgcctgggaagtgttgtggtgggggctcccaggaggactggcccagagagccctgagatagcggggatcctgaactggactgaataaaacgtggtctcccactgcgc

SEQ ID NO: 155560 - DNA, 4170 bp, Homo sapiens
  Payload ID: 10586
  Gene Symbol: MUC1
  Gene Name: mucin 1, cell surface associated
  ENST ID: ENST00000611571
  CDS Start-End: 73-3861
cgctccacctctcaagcagccagcgcctgcctgaatctgttctgccccctccccacccatttcaccaccaccatgacaccgggcacccagtctcctttcttcctgctgctgctcctcacagtgcttacagttgttacgggttctggtcatgcaagctctaccccaggtggagaaaaggagacttcggctacccagagaagttcagtgcccagctctactgagaagaatgctgtgagtatgaccagcagcgtactctccagccacagccccggttcaggctcctccaccactcagggacaggatgtcactctggccccggccacggaaccagcttcaggttcagctgccacctggggacaggatgtcacctcggtcccagtcaccaggccagccctgggctccaccaccccgccagcccacgatgtcacctcagccccggacaacaagccagccccgggctccaccgcccccccagcccacggtgtcacctcggccccggacaccaggccggccccgggctccaccgccccccaagcccacggtgtcacctcggccccggacaccaggccggccccgggctccaccgcccccccagcccacggtgtcacctcggccccggacaccaggcccgccccgggctccaccgcccccccagcccacggtgtcacctcggccccggacaccaggtccgccccgggctccaccgcgcccgcagcccacggtgtcacctcggccccggacaccaggtcggtcccgggctccaccgccccccaagcccacggtgtcacctcggccccggacaccaggccggccccgggctccaccgcccccccagcccacggtgtcacctcggccccggacaccaggccggttccgggctccaccgcccccccagcccacggtgtcacctcggccccggacaccaggccggccccgggctccaccgcccccccagcccacggtgtcacctcggccccggacaccaggccggccccgggctccaccgccccccaagcccacggtgtcacctcggccccggacaccaggccggccccgggctccaccgcccccccagcccacggtgtcacctcggccccggacaccaggcccgccccgggctccaccgcccccccagcccacggtgtcacctcggccccggacaccaggcccgccccgggctccaccgcgcccgcagcccacggtgtcacctcggccccggacaccaggccggccccgggctccaccgccccccaagcccacggtgtcacctcggccccggacaccaggccggccccgggctccaccgcccccccagcccacggtgtcacctcggccccggacaccaggccggccccgggctccaccgcccccccagcccacggtgtcacctcggccccggacaccaggcccgccccgggctccaccgcccccccagcccacggtgtcacctcggccccggacaccaggcccgccccgggctccaccgcgcccgcagcccacggtgtcacctcggccccggacaccaggccggccccgggctccaccgccccccaagcccacggtgtcacctcggccccggacaccaggccggccccgggctccaccgcccccccagcccacggtgtcacctcggccccggacaccaggccggccccgggctccaccgcccccccagcccacggtgtcacctcggccccggacaccaggccggccccgggctccaccgcccccccaacccacggtgtcacctcggccccggacaccagtcccgccccgggctccaccgcccccccagcccacggtgtcacctcggccccggacacaaggcccgccccgggctacaccgcgcccgcagcccacggtgtcacctcggccccggacaccaggccggccccgggctccaccgccccccaagcccacggtgtcacctcggccccggacaccaggccggccccgggctccaccgcccccccagcccacggtgtcacctcggccccggacaccaggccggccccgggctccaccgcccccccagcccacggtgtcacctcggccccggacaccaggccggccccgggctccaccgcccccccagcccacggtgtcacctcggccccggagagcaggccggccccgggctccaccgcgagagcagcccacggtgtcacctcggccccggagagcaggccggccccgggctccaccgcccccccagcccacggtgtcacctcggccccggacaccaggccggccccgggctccaccgcccccccagcccacggtgtcacctcggccccggacaccaggccggccccgggctccaccgcccccccagcccacggtgtcacctcggccccggacaccaggccggccccgggctccaccgcccccccagcccacggtgtcacctcggccccggacaccaggccggccccgggctccaccgcccccccagcccacggtgtcacctcggccccggacaccaggccgtccccgccgggctccaccgcccccccagcccacggtgtcacctcggccccggacaccaggccggccccgggctccaccgcccccccagtccacggtgtcacctcggccccggacaccaggccggcaccgggctccaccgcccccccagcccacggtgtcacctcggccccggacaccaggccggccccgggctccaccgcccccccagcccacggtgtcacctcggccccggacaccaggccggccccgggctccaccgcacccccagcccacggtgtcacctcggccccggacaccaggcgggccccgggctccaccccggccccgggctccaccgcccccccagcccacggtgtcacctcggccccggacaccaggccggccccgggctccaccgcccccccagcccatggtgtcacctcggccccggacaacaggcccgccttgggctccaccgcccctccagtccacaatgtcacctcggcctcaggctctgcatcaggctcagcttctactctggtgcacaacggcacctctgccagggctaccacaaccccagccagcaagagcactccattctcaattcccagccaccactctgatactcctaccacccttgccagccatagcaccaagactgatgccagtagcactcaccatagcacggtacctcctctcacctcctccaatcacagcacttctccccagttgtctactggggtctctttctttttcctgtcttttcacatttcaaacctccagtttaattcctctctggaagatcccagcaccgactactaccaagagctgcagagagacatttctgaaatgtttttgcagatttataaacaagggggttttctgggcctctccaatattaagttcaggccaggatctgtggtggtacaattgactctggccttccgagaaggtaccatcaatgtccacgacgtggagacacagttcaatcagtataaaacggaagcagcctctcgatataacctgacgatctcagacgtcagcgtgagtgatgtgccatttcctttctctgcccagtctggggctggggtgccaggctggggcatcgcgctgctggtgctggtctgtgttctggttgcgctggccattgtctatctcattgccttggctgtctgtcagtgccgccgaaagaactacgggcagctggacatctttccagcccgggatacctaccatcctatgagcgagtaccccacctaccacacccatgggcgctatgtgccccctagcagtaccgatcgtagcccctatgagaaggtttctgcaggtaatggtggcagcagcctctcttacacaaacccagcagtggcagccacttctgccaacttgtaggggcacgtcgcccgctgagctgagtggccagccagtgccattccactccactcaggttcttcagggccagagcccctgcaccctgtttgggctggtgagctgggagttcaggtgggctgctcacagcctccttcagaggccccaccaatttctcggacacttctcagtgtgtggaagctcatgtgggcccctgagggctcatgcctgggaagtgttgtggtgggggctcccaggaggactggcccagagagccctgagatagcggggatcctgaactggactgaataaaacgtggtctcccactgcgcc

SEQ ID NO: 155561 - DNA, 1189 bp, Homo sapiens
  Payload ID: 10586
  Gene Symbol: MUC1
  Gene Name: mucin 1, cell surface associated
  ENST ID: ENST00000462215
  CDS Start-End: 51-458
gcgcctgcctgaatctgttctgccccctccccacccatttcaccaccaccatgacaccgggcacccagtctcctttcttcctgctgctgctcctcacagtgcttacagctaccacagcccctaaacccgcaacagttgttacgggttctggtcatgcaagctctaccccaggtggagaaaaggagacttcggctacccagagaagttcagtgcccagctctactgagaagaatgctgctctgcatcaggctcagcttctactctggtgcacaacggcacctctgccagggctaccacaaccccagccagcaagagcactccattctcaattcccagccaccactctgatactcctaccacccttgccagccatagcaccaagactgatgccagtagcactcaccatagcacgatcccagcaccgactactaccaagagctgcagagagacatttctgaaatgtttttgcagatttataaacaagggggttttctgggcctctccaatattaagttcaggccaggatctgtggtggtacaattgactctggccttccgagaaggtaccatcaatgtccacgacgtggagacacagttcaatcagtataaaacggaagcagcctctcgatataacctgacgatctcagacgtcagcgtgagtgatgtgccatttcctttctctgcccagtctggggctggggtgccaggctggggcatcgcgctgctggtgctggtctgtgttctggttgcgctggccattgtctatctcattgccttggctgtctgtcagtgccgccgaaagaactacgggcagctggacatctttccagcccgggatacctaccatcctatgagcgagtaccccacctaccacacccatgggcgctatgtgccccctagcagtaccgatcgtagcccctatgagaaggtttctgcaggtaatggtggcagcagcctctcttacacaaacccagcagtggcagccacttctgccaacttgtaggggcacgtcgcccgctgagctgagtggccagccagtgccattccactccactcaggttcttcagggccagagcccctgcaccctgtttgggctggtgagctgggagttcaggtgggctgctcacagcctccttcagaggccccaccaatttctcggacacttctcagtgtgtggaagctcatgtggg

SEQ ID NO: 155562 - DNA, 1811 bp, Homo sapiens
  Payload ID: 10586
  Gene Symbol: MUC1
  Gene Name: mucin 1, cell surface associated
  ENST ID: ENST00000620103
  CDS Start-End: 73-1500
cgctccacctctcaagcagccagcgcctgcctgaatctgttctgccccctccccacccatttcaccaccaccatgacaccgggcacccagtctcctttcttcctgctgctgctcctcacagtgcttacagttgttacgggttctggtcatgcaagctctaccccaggtggagaaaaggagacttcggctacccagagaagttcagtgcccagctctactgagaagaatgctgtgagtatgaccagcagcgtactctccagccacagccccggttcaggctcctccaccactcagggacaggatgtcactctggccccggccacggaaccagcttcaggttcagctgccacctggggacaggatgtcacctcggtcccagtcaccaggccagccctgggctccaccaccccgccagcccacgatgtcacctcagccccggacaacaagccagccccgggctccaccgcccccccagcccacggtgtcacctcggccccggacaccaggccggccccgggctccaccgcccccccagcccatggtgtcacctcggccccggacaacaggcccgccttgggctccaccgcccctccagtccacaatgtcacctcggcctcaggctctgcatcaggctcagcttctactctggtgcacaacggcacctctgccagggctaccacaaccccagccagcaagagcactccattctcaattcccagccaccactctgatactcctaccacccttgccagccatagcaccaagactgatgccagtagcactcaccatagcacggtacctcctctcacctcctccaatcacagcacttctccccagttgtctactggggtctctttctttttcctgtcttttcacatttcaaacctccagtttaattcctctctggaagatcccagcaccgactactaccaagagctgcagagagacatttctgaaatgtttttgcagatttataaacaagggggttttctgggcctctccaatattaagttcaggccaggatctgtggtggtacaattgactctggccttccgagaaggtaccatcaatgtccacgacgtggagacacagttcaatcagtataaaacggaagcagcctctcgatataacctgacgatctcagacgtcagcgtgagtgatgtgccatttcctttctctgcccagtctggggctggggtgccaggctggggcatcgcgctgctggtgctggtctgtgttctggttgcgctggccattgtctatctcattgccttggctgtctgtcagtgccgccgaaagaactacgggcagctggacatctttccagcccgggatacctaccatcctatgagcgagtaccccacctaccacacccatgggcgctatgtgccccctagcagtaccgatcgtagcccctatgagaaggtttctgcaggtaatggtggcagcagcctctcttacacaaacccagcagtggcagccacttctgccaacttgtaggggcacgtcgcccgctgagctgagtggccagccagtgccattccactccactcaggttcttcagggccagagcccctgcaccctgtttgggctggtgagctgggagttcaggtgggctgctcacagcctccttcagaggccccaccaatttctcggacacttctcagtgtgtggaagctcatgtgggcccctgagggctcatgcctgggaagtgttgtggtgggggctcccaggaggactggcccagagagccctgagatagcggggatcctgaactggactgaataaaacgtggtctcccactgcgccaa

SEQ ID NO: 155563 - DNA, 1162 bp, Homo sapiens
  Payload ID: 10586
  Gene Symbol: MUC1
  Gene Name: mucin 1, cell surface associated
  ENST ID: ENST00000610468
  CDS Start-End: 51-431
gcgcctgcctgaatctgttctgccccctccccacccatttcaccaccaccatgacaccgggcacccagtctcctttcttcctgctgctgctcctcacagtgcttacagttgttacgggttctggtcatgcaagctctaccccaggtggagaaaaggagacttcggctacccagagaagttcagtgcccagctctactgagaagaatgctgctctgcatcaggctcagcttctactctggtgcacaacggcacctctgccagggctaccacaaccccagccagcaagagcactccattctcaattcccagccaccactctgatactcctaccacccttgccagccatagcaccaagactgatgccagtagcactcaccatagcacgatcccagcaccgactactaccaagagctgcagagagacatttctgaaatgtttttgcagatttataaacaagggggttttctgggcctctccaatattaagttcaggccaggatctgtggtggtacaattgactctggccttccgagaaggtaccatcaatgtccacgacgtggagacacagttcaatcagtataaaacggaagcagcctctcgatataacctgacgatctcagacgtcagcgtgagtgatgtgccatttcctttctctgcccagtctggggctggggtgccaggctggggcatcgcgctgctggtgctggtctgtgttctggttgcgctggccattgtctatctcattgccttggctgtctgtcagtgccgccgaaagaactacgggcagctggacatctttccagcccgggatacctaccatcctatgagcgagtaccccacctaccacacccatgggcgctatgtgccccctagcagtaccgatcgtagcccctatgagaaggtttctgcaggtaatggtggcagcagcctctcttacacaaacccagcagtggcagccacttctgccaacttgtaggggcacgtcgcccgctgagctgagtggccagccagtgccattccactccactcaggttcttcagggccagagcccctgcaccctgtttgggctggtgagctgggagttcaggtgggctgctcacagcctccttcagaggccccaccaatttctcggacacttctcagtgtgtggaagctcatgtggg

SEQ ID NO: 155564 - DNA, 1093 bp, Homo sapiens
  Payload ID: 10586
  Gene Symbol: MUC1
  Gene Name: mucin 1, cell surface associated
  ENST ID: ENST00000614519
  CDS Start-End: 73-444
cgctccacctctcaagcagccagcgcctgcctgaatctgttctgccccctccccacccatttcaccaccaccatgacaccgggcacccagtctcctttcttcctgctgctgctcctcacagtgcttacagctaccacagcccctaaacccgcaacagttgttacgggttctggtcatgcaagctctaccccaggtggagaaaaggagacttcggctacccagagaagttcagtgcccagctctactgagaagaatgctttgtctactggggtctctttctttttcctgtcttttcacatttcaaacctccagtttaattcctctctggaagatcccagcaccgactactaccaagagctgcagagagacatttctgaaatgtttttgcagatttataaacaagggggttttctgggcctctccaatattaagttcagtgagtgatgtgccatttcctttctctgcccagtctggggctggggtgccaggctggggcatcgcgctgctggtgctggtctgtgttctggttgcgctggccattgtctatctcattgccttggctgtctgtcagtgccgccgaaagaactacgggcagctggacatctttccagcccgggatacctaccatcctatgagcgagtaccccacctaccacacccatgggcgctatgtgccccctagcagtaccgatcgtagcccctatgagaaggtttctgcaggtaatggtggcagcagcctctcttacacaaacccagcagtggcagccacttctgccaacttgtaggggcacgtcgcccgctgagctgagtggccagccagtgccattccactccactcaggttcttcagggccagagcccctgcaccctgtttgggctggtgagctgggagttcaggtgggctgctcacagcctccttcagaggccccaccaatttctcggacacttctcagtgtgtggaagctcatgtgggcccctgagggctcatgcctgggaagtgttgtggtgggggctcccaggaggactggcccagagagccctgagatagcggggatcctgaactggactgaataaaacgtggtctcccactgcgcc

SEQ ID NO: 155565 - DNA, 667 bp, Homo sapiens
  Payload ID: 10586
  Gene Symbol: MUC1
  Gene Name: mucin 1, cell surface associated
  ENST ID: ENST00000498431
  CDS Start-End: 25-315
ctccccacccatttcaccaccaccatgacaccgggcacccagtctcctttcttcctgctgctgctcctcacagtgcttacagttgttacgggttctggtcatgcaagctctaccccaggtggagaaaaggagacttcggctacccagagaagttcagtgcccagctctactgagaagaatgcttttaattcctctctggaagatcccagcaccgactactaccaagagctgcagagagacatttctgaaatgtttttgcagatttataaacaagggggttttctgggcctctccaatattaagttcagtgagtgatgtgccatttcctttctctgcccagtctggggctggggtgccaggctggggcatcgcgctgctggtgctggtctgtgttctggttgcgctggccattgtctatctcattgccttggctgtctgtcagtgccgccgaaagaactacgggcagctggacatctttccagcccgggatacctaccatcctatgagcgagtaccccacctaccacacccatgggcgctatgtgccccctagcagtaccgatcgtagcccctatgagaaggtttctgcaggtaatggtggcagcagcctctcttacacaaacccagcagtggcagccacttctgccaacttgtaggggcacgtcgcc

SEQ ID NO: 155566 - DNA, 951 bp, Homo sapiens
  Payload ID: 10586
  Gene Symbol: MUC1
  Gene Name: mucin 1, cell surface associated
  ENST ID: ENST00000615517
  CDS Start-End: 73-642
cgctccacctctcaagcagccagcgcctgcctgaatctgttctgccccctccccacccatttcaccaccaccatgacaccgggcacccagtctcctttcttcctgctgctgctcctcacagtgcttacagctaccacagcccctaaacccgcaacagttgttacgggttctggtcatgcaagctctaccccaggtggagaaaaggagacttcggctacccagagaagttcagtgcccagctctactgagaagaatgcttttaattcctctctggaagatcccagcaccgactactaccaagagctgcagagagacatttctgaaatgtctggggctggggtgccaggctggggcatcgcgctgctggtgctggtctgtgttctggttgcgctggccattgtctatctcattgccttggctgtctgtcagtgccgccgaaagaactacgggcagctggacatctttccagcccgggatacctaccatcctatgagcgagtaccccacctaccacacccatgggcgctatgtgccccctagcagtaccgatcgtagcccctatgagaaggtttctgcaggtaatggtggcagcagcctctcttacacaaacccagcagtggcagccacttctgccaacttgtaggggcacgtcgcccgctgagctgagtggccagccagtgccattccactccactcaggttcttcagggccagagcccctgcaccctgtttgggctggtgagctgggagttcaggtgggctgctcacagcctccttcagaggccccaccaatttctcggacacttctcagtgtgtggaagctcatgtgggcccctgagggctcatgcctgggaagtgttgtggtgggggctcccaggaggactggcccagagagccctgagatagcggggatcctgaactggactgaataaaacgtggtctcccactgcgcc

SEQ ID NO: 155567 - DNA, 1101 bp, Homo sapiens
  Payload ID: 10586
  Gene Symbol: MUC1
  Gene Name: mucin 1, cell surface associated
  ENST ID: ENST00000610359
  CDS Start-End: 73-792
cgctccacctctcaagcagccagcgcctgcctgaatctgttctgccccctccccacccatttcaccaccaccatgacaccgggcacccagtctcctttcttcctgctgctgctcctcacagtgcttacagctaccacagcccctaaacccgcaacagttgttacgggttctggtcatgcaagctctaccccaggtggagaaaaggagacttcggctacccagagaagttcagtgcccagctctactgagaagaatgctatcccagcaccgactactaccaagagctgcagagagacatttctgaaatggccaggatctgtggtggtacaattgactctggccttccgagaaggtaccatcaatgtccacgacgtggagacacagttcaatcagtataaaacggaagcagcctctcgatataacctgacgatctcagacgtcagcgtgagtgatgtgccatttcctttctctgcccagtctggggctggggtgccaggctggggcatcgcgctgctggtgctggtctgtgttctggttgcgctggccattgtctatctcattgccttggctgtctgtcagtgccgccgaaagaactacgggcagctggacatctttccagcccgggatacctaccatcctatgagcgagtaccccacctaccacacccatgggcgctatgtgccccctagcagtaccgatcgtagcccctatgagaaggtttctgcaggtaatggtggcagcagcctctcttacacaaacccagcagtggcagccacttctgccaacttgtaggggcacgtcgcccgctgagctgagtggccagccagtgccattccactccactcaggttcttcagggccagagcccctgcaccctgtttgggctggtgagctgggagttcaggtgggctgctcacagcctccttcagaggccccaccaatttctcggacacttctcagtgtgtggaagctcatgtgggcccctgagggctcatgcctgggaagtgttgtggtgggggctcccaggaggactggcccagagagccctgagatagcggggatcctgaactggactgaataaaacgtggtctcccactgcgcc

SEQ ID NO: 155568 - DNA, 1023 bp, Homo sapiens
  Payload ID: 10586
  Gene Symbol: MUC1
  Gene Name: mucin 1, cell surface associated
  ENST ID: ENST00000611577
  CDS Start-End: 73-714
cgctccacctctcaagcagccagcgcctgcctgaatctgttctgccccctccccacccatttcaccaccaccatgacaccgggcacccagtctcctttcttcctgctgctgctcctcacagtgcttacaggttctggtcatgcaagctctaccccaggtggagaaaaggagacttcggctacccagagaagttcagtgcccagctctactgagaagaatgctgtgagtatgaccagcagcgtactctccagccacagccccggttcaggctcctccaccactcagggacaggatgtcactctggccccggccacggaaccagcttcaggttcagctgccacctggggacaggatgtcacctcggtcccagtcaccaggccagccctgggctccaccaccccgccagctggggtgccaggctggggcatcgcgctgctggtgctggtctgtgttctggttgcgctggccattgtctatctcattgccttggctgtctgtcagtgccgccgaaagaactacgggcagctggacatctttccagcccgggatacctaccatcctatgagcgagtaccccacctaccacacccatgggcgctatgtgccccctagcagtaccgatcgtagcccctatgagaaggtttctgcaggtaatggtggcagcagcctctcttacacaaacccagcagtggcagccacttctgccaacttgtaggggcacgtcgcccgctgagctgagtggccagccagtgccattccactccactcaggttcttcagggccagagcccctgcaccctgtttgggctggtgagctgggagttcaggtgggctgctcacagcctccttcagaggccccaccaatttctcggacacttctcagtgtgtggaagctcatgtgggcccctgagggctcatgcctgggaagtgttgtggtgggggctcccaggaggactggcccagagagccctgagatagcggggatcctgaactggactgaataaaacgtggtctcccactgcgcc

SEQ ID NO: 155569 - DNA, 619 bp, Homo sapiens
  Payload ID: 10586
  Gene Symbol: MUC1
  Gene Name: mucin 1, cell surface associated
  ENST ID: ENST00000467134
  CDS Start-End: 25-267
ctccccacccatttcaccaccaccatgacaccgggcacccagtctcctttcttcctgctgctgctcctcacagtgcttacagctaccacagcccctaaacccgcaacagttgttacgggttctggtcatgcaagctctaccccaggtggagaaaaggagacttcggctacccagagaagttcagtgcccagctctactgagaagaatgctatcccagcaccgactactaccaagagctgcagagagacatttctgaaatgtgagtgatgtgccatttcctttctctgcccagtctggggctggggtgccaggctggggcatcgcgctgctggtgctggtctgtgttctggttgcgctggccattgtctatctcattgccttggctgtctgtcagtgccgccgaaagaactacgggcagctggacatctttccagcccgggatacctaccatcctatgagcgagtaccccacctaccacacccatgggcgctatgtgccccctagcagtaccgatcgtagcccctatgagaaggtttctgcaggtaatggtggcagcagcctctcttacacaaacccagcagtggcagccacttctgccaacttgtaggggcacgtcgcc

SEQ ID NO: 155570 - DNA, 635 bp, Homo sapiens
  Payload ID: 10586
  Gene Symbol: MUC1
  Gene Name: mucin 1, cell surface associated
  ENST ID: ENST00000471283
  CDS Start-End: 25-474
ctccccacccatttcaccaccaccatgacaccgggcacccagtctcctttcttcctgctgctgctcctcacagtgcttacagttgttacgggttctggtcatgcaagctctaccccaggtggagaaaaggagacttcggctacccagagaagttcagtgcccagctctactgagaagaatgcttttaattcctctctggaagatcccagcaccgactactaccaagagctgcagagagacatttctgaaatgtttttgcagatttataaacaagggggttttctgggcctctccaatattaagttcagtctggggctggggtgccaggctggggcatcgcgctgctggtgctggtctgtgttctggttgcgctggccattgtctatctcattgccttggctgtctgtcagtgccgccgaaagaactacgggcagctggacatctttccagcccgggatacctaccatcctatgagcgagtaccccacctaccacacccatgggcgctatgtgccccctagcagtaccgatcgtagcccctatgagaaggtttctgcaggtaatggtggcagcagcctctcttacacaaacccagcagtggcagccacttctgccaacttgtaggggcacgtcgcc

SEQ ID NO: 155571 - DNA, 1836 bp, Homo sapiens
  Payload ID: 10586
  Gene Symbol: MUC1
  Gene Name: mucin 1, cell surface associated
  ENST ID: ENST00000612778
  CDS Start-End: 73-1527
cgctccacctctcaagcagccagcgcctgcctgaatctgttctgccccctccccacccatttcaccaccaccatgacaccgggcacccagtctcctttcttcctgctgctgctcctcacagtgcttacagctaccacagcccctaaacccgcaacagttgttacgggttctggtcatgcaagctctaccccaggtggagaaaaggagacttcggctacccagagaagttcagtgcccagctctactgagaagaatgctgtgagtatgaccagcagcgtactctccagccacagccccggttcaggctcctccaccactcagggacaggatgtcactctggccccggccacggaaccagcttcaggttcagctgccacctggggacaggatgtcacctcggtcccagtcaccaggccagccctgggctccaccaccccgccagcccacgatgtcacctcagccccggacaacaagccagccccgggctccaccgcccccccagcccacggtgtcacctcggccccggacaccaggccggccccgggctccaccgcccccccagcccatggtgtcacctcggccccggacaacaggcccgccttgggctccaccgcccctccagtccacaatgtcacctcggcctcaggctctgcatcaggctcagcttctactctggtgcacaacggcacctctgccagggctaccacaaccccagccagcaagagcactccattctcaattcccagccaccactctgatactcctaccacccttgccagccatagcaccaagactgatgccagtagcactcaccatagcacggtacctcctctcacctcctccaatcacagcacttctccccagttgtctactggggtctctttctttttcctgtcttttcacatttcaaacctccagtttaattcctctctggaagatcccagcaccgactactaccaagagctgcagagagacatttctgaaatgtttttgcagatttataaacaagggggttttctgggcctctccaatattaagttcaggccaggatctgtggtggtacaattgactctggccttccgagaaggtaccatcaatgtccacgacgtggagacacagttcaatcagtataaaacggaagcagcctctcgatataacctgacgatctcagacgtcagcgtgagtgatgtgccatttcctttctctgcccagtctggggctggggtgccaggctggggcatcgcgctgctggtgctggtctgtgttctggttgcgctggccattgtctatctcattgccttggctgtctgtcagtgccgccgaaagaactacgggcagctggacatctttccagcccgggatacctaccatcctatgagcgagtaccccacctaccacacccatgggcgctatgtgccccctagcagtaccgatcgtagcccctatgagaaggtttctgcaggtaatggtggcagcagcctctcttacacaaacccagcagtggcagccacttctgccaacttgtaggggcacgtcgcccgctgagctgagtggccagccagtgccattccactccactcaggttcttcagggccagagcccctgcaccctgtttgggctggtgagctgggagttcaggtgggctgctcacagcctccttcagaggccccaccaatttctcggacacttctcagtgtgtggaagctcatgtgggcccctgagggctcatgcctgggaagtgttgtggtgggggctcccaggaggactggcccagagagccctgagatagcggggatcctgaactggactgaataaaacgtggtctcccactgcgcc

SEQ ID NO: 155572 - DNA, 580 bp, Homo sapiens
  Payload ID: 10587
  Gene Symbol: MUC12
  Gene Name: mucin 12, cell surface associated
  ENST ID: ENST00000305119
  CDS Start-End: 1-285
tgtgtgaacaagtgcaccaaaggaacgaagtcgcaaatgaactgtaacctgggcacatgtcagctgcaacgcagtggcccccgctgcctgtgcccaaatacgaacacacactggtactggggagagacctgtgaattcaacatcgccaagagcctcgtgtatgggatcgtgggggctgtgatggcggtgctgctgctcgcattgatcatcctaatcatcttattcagcctatcccagagaaaacggcacagaccagaatctgagggagagcagattcggccttgagaacgcctacaacaacttccggcccaccctggagactgttgactctggcacagagctccacatccagaggccggagatggtagcatccactgtgtgagccaacgggggcctcccaccctcatctagctctgttcaggagagctgcaaacacagagcccaccacaagcctccggggcgggtcaagaggagaccgaagtcaggccctgaagccggtcctgctctgagctgacagacttggccagtcccctgcctgtgctcctgctggggaaggctgggggctgtaagcctctccatc

SEQ ID NO: 155573 - DNA, 16737 bp, Homo sapiens
  Payload ID: 10587
  Gene Symbol: MUC12
  Gene Name: mucin 12, cell surface associated
  Uniprot ID: Q9UKN1
  ENST ID: ENST00000379442
  CDS Start-End: 1-16437
atgctggtgatctggattctgacgctggctctccggctctgcgcgtccgttactacagtgacaccagagggctctgctgttcacaaagccatttcccagcagggcacattgtggactggtgaggttttggagaagcagacagtcgagcaagggaagagcactctgagaaggcagaaaaatcatttccacaggtctgcaggggagctacggtgcaggaatgccctgaaagatgagggggcatctgctggatggagcgtgatgtttgctggggagagtgtggtggtgctggtgcatttgtggatgacaggagcacgagtgaagaacctgggcttggtggagtttgctagcccaggggacgacggggatggcagagccgagggctttagcctggggctcccacttagtgagcaggcaagggctgcaggagccagagagaaggagcgtcaggagacagtcataaatcatagcactttctctggtttctctcaaatcacaggctcaacagtaaacaccagtattggaggtaatacaacttctgcatccacacccagttcaagcgacccttttaccacctttagtgactatggggtgtcagtcacatttatcacgggctcaactgcaacaaaacacttccttgacagctccacaaactcaggccacagtgaggaatcaacagtatcccacagcggcccaggtgcaactggaacaacactcttcccttcccactctgcaacctcagtttttgttggagaacctaaaacctcacccatcacttcagcctcaatggaaacaacagcgttacctggcagtaccacaacagcaggcctgagtgagaaatctaccaccttctacagtagccccagatcaccagacagaacactctcacctgcccgcacgacaagctcaggcgtcagtgaaaaatcaaccacctcccacagccgaccaggcccaacgcacacaatagcgttccctgacagtaccaccatgccaggcgtcagtcaggaatctacagcttcccacagcatccccggctccacagacacaacactgtcccctggcactaccacaccatcatcccttggtccagaatctactaccttccacagcagcccaggctacactaaaacaacacgcttacctgacaacaccacaacctcaggcctccttgaagcatctacgcccgtccacagcagcactggatcgccacacacaacactgtccccttccagctctacaacccatgagggagaacctaccaccttccagagctggccaagctcaaaggacacttcgcctgcaccttctggtaccacatcagcctttgttaaactatctacaacttatcacagcagcccgagctcaactccaacaacccacttttctgccagctccacaaccttgggccatagtgaggaatcgacaccagtccacagcagcccagttgcaactgcaacaacacccccacctgcccgctccgcgacctcaggccatgttgaagaatctacagcctaccacaggagcccgggctcaactcaaacaatgcacttccctgaaagctccacaacttcaggccatagtgaagaatcagcaactttccacggcagcacaacacacacaaaatcttcaactcctagcaccacagctgccctagcacatacaagctaccacagcagcctgggctcaactgaaacaacacacttccgtgatagctccacaatctcaggccgtagtgaggaatcaaaagcatcccacagcagcccagatgcaatggcaacaacagtcttacctgccggctctacaccctcagttcttgttggagactcgacgccctcacccatcagttcaggctcaatggaaaccacagcgttacccggcagtaccacaaaaccaggcctcagtgagaaatctaccactttctacagtagccccagatcaccagacacaacacacttacctgccagcatgacaagctcaggcgtcagtgaagaatccaccacctcccacagccgaccaggctcaacacacacaacagcattccctggcagtaccaccatgccaggcctcagtcaggaatctacagcttcccacagcagcccaggccccacagacacaacattgtcccctggcagtaccacagcatcatcccttggtccagaatatactaccttccacagccgcccaggctccactgaaacaacactcttacctgacaacaccacagcctcaggactccttgaagcatctatgcccgtccacagcagcaccagatcgccacacacaacactgtcccctgccggctctacaacccgtcagggagaatctaccacattccatagctggccaagctcaaaggacactaggcctgcacctcctactaccacatcagcctttgttgagccatctacaacctcccacggcagcccgagctcaattccaacaacccacatttctgcccgctccacaacctcaggcctcgttgaagaatctacgacctaccacagcagcccgggctcaactcaaacaatgcacttccctgaaagcgacacaacttcaggccgtggtgaagaatcaacaacttcccacagcagcacaacacacacaatatcttcagctcctagcaccacatctgcccttgttgaagaacctaccagctaccacagcagcccgggctcaactgcaacaacacacttccctgacagctccacaacctcaggccgtagtgaggaatcaacagcatcgcacagcagccaagacgcaacgggaacaatagtcctacctgcccgctccacaacctcagttcttcttggagaatctacgacctcacccatcagttcaggctcaatggaaacgacagcgttacccggcagtaccacaacgccaggcctcagtgagagatctaccactttccatagtagccccagatcaccagccacaacactctcacctgccagcacgacaagctcaggcgtcagtgaagaatccaccacctcccgcagccgaccaggctcaacgcacacaacagcattccctgacagcaccaccacgccaggcctcagtcggcattctacaacttcccacagcagcccaggctcaacggatacaacactgttacctgccagcaccaccacctcaggccccagtcaggaatcaacaacttcccacagcagctcaggttcaactgacacagcactgtcccctggcagtaccacagccttatcctttggtcaagaatctacaaccttccacagcaacccaggctccactcacacaacactcttccctgacagcaccacaagctcaggcatcgttgaagcatctacacgcgtccacagcagcactggctcaccacgcacaacactgtcccctgccagctccacaagccctggacttcagggagaatctactgccttccagacccacccagcctcaactcacacaacgccttcacctcctagcaccgcaacagcccctgttgaagaatctacaacctaccaccgcagcccaggctcgactccaacaacacacttccctgccagctccacaacttcgggccacagtgagaaatcaacaatattccacagcagcccagatgcaagtggaacaacaccctcatctgcccactccacaacctcaggtcgtggagaatctacaacctcacgcatcagtccaggctcaactgaaataacaacgttacctggcagtaccacaacaccaggcctcagtgaggcatctaccaccttctacagcagccccagatcaccaaccacaacactctcacctgccagcatgacaagcctgggcgtcggtgaagaatccaccacctcccgtagccaaccaggttctactcactcaacagtgtcacctgccagcaccaccacgccaggcctcagtgaggaatctaccaccgtctacagcagcagccgaggctcaactgaaaccacagtgttccctcacagcaccacaacctcagttcatggtgaagagcctacaaccttccacagccggccagcctcaactcacacaacactgttcactgaggacagcaccacctcgggcctcactgaagaatctacagccttccccggcagcccagcctccacccaaacagggttacctgccacactcacaaccgcagacctcggtgaggaatcaactacctttcccagcagctcaggctcaactggaacaaaactctcacctgcccgctccaccacctctggcctcgttggagaatccacaccctcacgcctcagtccaagctcaaccgaaacaacaactttacctggcagtcccacaacaccaagcctcagtgagaaatcaaccaccttctacactagccccagatcaccagatgcaacactctcacctgcaaccacaacaagctcaggcgtcagcgaagaatccagcacatcccacagtcaaccaggctcaacgcacacaacagcattccctgacagcaccaccacctcagacctcagtcaggaacctacaacttcccacagcagccaaggctcaacagaggcaacactgtcccctggcagtaccacagcctcatcccttggtcaacaatctacaaccttccacagcagcccaggcgacactgaaaccacactcttacctgacgacaccataacctcaggcctcgtggaggcatctacacccacccacagcagcactggctcgctacacacaacactgacccctgccagctccacaagcgctggccttcaggaagaatctaccactttccagagctggccaagctcaagtgacacaacaccttcacctcccggcaccacagcagcccctgttgaagtatccacaacctaccacagccgcccgagctcaactccaacaacacacttttctgccagttccacaaccttgggccgtagtgaggaatcaacaacagtccacagcagcccaggtgcaactggaacagcactcttccctacccgctctgcaacctcagttcttgttggagaacctacaacgtcacccatcagttcaggctcaacggaaacaacagcgttacctggcagtaccacaacagcaggcctgagtgagaaatctaccaccttctacagtagccccagatcaccggacacaacactctcacctgccagcacgacaagctcaggcgtcagtgaagaatccaccacctcccacagccgaccaggctcaacgcacacaacagcattccctggcagtaccaccatgccaggcgtcagtcaggaatctacagcttcccacagcagcccaggctccacagacacaacattgtcccctggcagtaccacagcatcatcccttggtccagaatctactactttccacagcagcccaggctccactgaaacaacactcttacctgacaacaccacagcctcaggcctccttgaagcatctacgcccgtccacagcagcactggatcgccacacacaacactgtcccctgccggctctacaacacgtcagggagaatctaccaccttccagagctggccaagctcaaaggacactatgcctgcacctcctactaccacatcagcctttgttgagctatctacaacctcccacggcagcccgagctcaactccaacaacccacttttctgccagctccacaaccttgggccgtagtgaggaatcgacaacagtccacagcagcccagttgcaactgcaacaacaccctcgcctgcccgctccacaacctcaggcctcgttgaagaatctacggcgtaccacagcagcccgggctcaactcaaacaatgcacttccctgaaagctccacagcttcaggtcgtagtgaagaatcaagaacttcccacagcagcacaacacacacaatatcttcacctcctagcaccacatctgcccttgttgaagaacctaccagctaccacagcagcccgggctcaactgcaacaacacacttccctgacagctccacaacctcaggccgtagtgaggaatcaacagcatcccacagcagccaagacgcaacgggaacaatagtcctacctgcccgctccacaacctcagttcttcttggagaatctacgacctcacccatcagttcaggctcaatggaaacgacagcgttacccggcagtaccacaacgccaggcctcagtgagaaatctaccactttccacagtagccccagatcaccagccacaacactctcacctgccagcacgacaagctcaggcgtcagtgaagaatccaccacctcccacagccgaccaggctcaacgcacacaacagcattccctgacagcaccaccacgccaggcctcagtcggcattctacaacttcccacagcagcccaggctcaacggatacaacactgttacctgccagcaccaccacctcaggccccagtcaggaatcaacaacttcccacagcagcccaggttcaactgacacagcactgtcccctggcagtaccacagccttatcctttggtcaagaatctacaaccttccacagcagcccaggctccactcacacaacgctcttccctgacagcaccacaagctcaggcatcgttgaagcatctacacgcgtccacagcagcactggctcaccacgcacaacactgtcccctgccagctccacaagccctggacttcagggagaatctaccgccttccagacccacccagcctcaactcacacgacgccttcacctcctagcaccgcaacagcccctgttgaagaatctacaacctaccaccgcagcccaggctcgactccaacaacacacttccctgccagctccacaacttcgggccacagtgagaaatcaacaatattccacagcagcccagatgcaagtggaacaacaccctcatctgcccactccacaacctcaggtcgtggagaatctacaacctcacgcatcagtccaggctcaactgaaataacaacgttacctggcagtaccacaacaccaggcctcagtgaggcatctaccaccttctacagcagccccagatcaccaaccacaacactctcacctgccagtatgacaagcctaggcgtcggtgaagaatccaccacctcccgtagccaaccaggttctactcactcaacagtgtcacctgccagcaccaccacgccaggcctcagtgaggaatctaccaccgtctacagcagcagcccaggctcaactgaaaccacagtgttccctcgcacccccacaacctcagttcgtggtgaagagcctacaaccttccacagccggccagcctcaactcacacaacactgttcactgaggacagcaccacctcgggcctcactgaagaatctacagccttccccggcagcccagcctccacccaaacagggttacctgccacactcacaaccgcagacctcggtgaggaatcaactacctttcccagcagctcaggctcaactggaacaacactctcacctgcccgctccaccacctctggcctcgttggagaatccacaccctcacgcctcagtccaagctcaaccgaaacaacaactttacccggcagtcccacaacaccaagcctcagtgagaaatcaaccaccttctacactagccccagatcaccagatgcaacactctcacctgcaaccacaacaagctcaggcgtcagtgaagaatccagcacatcccacagtcaaccaggctcaacgcacacaacagcattccctgacagcaccaccacgccaggcctcagtcggcattctacaacttcccacagcagcccaggctcaacggatacaacactgttacctgccagcaccaccacctcaggccccagtcaggaatcaacaacttcccacagcagcccaggttcaactgacacagcactgtcccctggcagtaccacagccttatcctttggtcaagaatctacaaccttccacagcagcccaggctccactcacacaacactcttccctgacagcaccacaagctcaggcatcgttgaagcatctacacgcgtccacagcagcactggctcaccacgcacaacactgtcccctgccagctccacaagccctggacttcagggagaatctaccaccttccagacccacccagcctcaactcacacgacgccttcacctcctagcaccgcaacagcccctgttgaagaatctacaacctaccaccgcagcccaggctcgactccaacaacacacttccctgccagctccacaacttcgggccacagtgagaaatcaacaatattccacagcagcccagatgcaagtggaacaacaccctcatctgcccactccacaacctcaggtcgtggagaatctacaacctcacgcatcagtccaggctcaactgaaataacaacgttacctggcagtaccacaacaccaggcctcagtgaggcatctaccaccttctacagcagccccagatcaccaaccacaacactctcacctgccagtatgacaagcctaggcgtcggtgaagaatccaccacctcccgtagccaaccaggttctactcactcaacagtgtcacctgccagcaccaccacgccaggcctcagtgaggaatctaccaccgtctacagcagcagcccaggctcaactgaaaccacagtgttccctcgcagcaccacaacctcagttcgtggtgaagagcctacaaccttccacagccggccagcctcaactcacacaacactgttcactgaggacagcaccacctcgggcctcactgaagaatctacagccttccccggcagcccagcctccacccaaacagggttacctgccacactcacaaccgcagacctcggtgaggaatcaactacctttcccagcagctcaggctcaactggaacaacactctcacctgcccgctccaccacctctggcctcgttggagaatccacaccctcacgcctcagtccaagctcaaccgaaacaacaactttacccggcagtcccacaacaccaagcctcagtgagaaatcaaccaccttctacactagccccagatcaccagatgcaacactctcacctgcaaccacaacaagctcaggcgtcagtgaagaatccagcacatcccacagtcaaccaggctcaacgcacacaacagcgttccctgacagcaccaccacctcaggcctcagtcaggaacctacagcttcccacagcagccaaggctcaacagaggcaacactgtcccctggcagtaccacagcctcatcccttggtcaacaatctacaaccttccacagcagcccaggcgacactgaaaccacactcttacctgacgacaccataacctcaggcctcgtggaggcatctacacccacccacagcagcactggctcgctacacacaacactgacccctgccagctccacaagcgctggccttcaggaagaatctaccactttccagagctggccaagctcaagtgacacaacaccttcacctcccggcaccacagcagcccctgttgaagtatccacaacctaccacagccgcccgagctcaactccaacaacacacttttctgccagttccacaaccttgggccgtagtgaggaatcaacaacagtccacagcagcccaggtgcaactggaacagcactcttccctacccgctctgcaacctcagttcttgttggagaacctacaacgtcacccatcagttcaggctcaacggaaacaacagcgttacctggcagtaccacaacagcaggcctgagtgagaaatctaccaccttctacagtagccccagatcaccggacacaacactctcacctgccagcacgacaagctcaggcgtcagtgaagaatccaccacctcccacagccgaccaggctcaacgcacacaacagcattccctggcagtaccaccatgccaggcgtcagtcaggaatctacagcttcccacagcagcccaggctccacagacacaacactgtcccctggcagtaccacagcatcatcccttggtccagaatctactaccttccacagcggcccaggctccactgaaacaacactcttacctgacaacaccacagcctcaggcctccttgaagcatctacgcccgtccacagcagcactggatcgccacacacaacactgtcccctgccggctctacaacccgtcagggagaatctaccaccttccagagctggcctaactcgaaggacactacccctgcacctcctactaccacatcagcctttgttgagctatctacaacctcccacggcagcccgagctcaactccaacaacccacttttctgccagctccacaaccttgggccgtagtgaggaatcgacaacagtccacagcagcccagttgcaactgcaacaacaccctcgcctgcccgctccacaacctcaggcctcgttgaagaatctacgacctaccacagcagcccgggctcaactcaaacaatgcacttccctgaaagcgacacaacttcaggccgtggtgaagaatcaacaacttcccacagcagcacaacacacacaatatcttcagctcctagcaccacatctgcccttgttgaagaacctaccagctaccacagcagcccgggctcaactgcaacaacacacttccctgacagctccacaacctcaggccgtagtgaggaatcaacagcatcccacagcagccaagacgcaacgggaacaatagtcctacctgcccgctccacaacctcagttcttcttggagaatctacgacctcacccatcagttcaggctcaatggaaacgacagcgttacccggcagtaccacaacgccaggcctcagtgagaaatctaccactttccacagtagccccagatcaccagccacaacactctcacctgccagcacgacaagctcaggcgtcagtgaagaatccaccacctcccacagccgaccaggctcaacgcacacaacagcattccctgacagcaccaccacgccaggcctcagtcggcattctacaacttcccacagcagcccaggctcaacggatacaacactgttacctgccagcaccaccacctcaggctccagtcaggaatcaacaacttcccacagcagctcaggttcaactgacacagcactgtcccctggcagtaccacagccttatcctttggtcaagaatctacaaccttccacagcagcccaggctccactcacacaacactcttccctgacagcaccacaagctcaggcatcgttgaagcatctacacgcgtccacagcagcactggctcaccacgcacaacactgtcccctgccagctccacaagccctggacttcagggagaatctaccgccttccagacccacccagcctcaactcacacgacgccttcacctcctagcaccgcaacagcccctgttgaagaatctacaacctaccaccgcagcccaggctcgactccaacaacacacttccctgccagctccacaacttcgggccacagtgagaaatcaacaatattccacagcagcccagatgcaagtggaacaacaccctcatctgcccactccacaacctcaggtcgtggagaatctacaacctcacgcatcagtccaggctcaactgaaataacaacgttacctggcagtaccacaacaccaggcctcagtgaggcatctaccaccttctacagcagccccagatcaccaaccacaacactctcacctgccagtatgacaagcctaggcgtcggtgaagaatccaccacctcccgtagccaaccaggttctactcactcaacagtgtcacctgccagcaccaccacgccaggcctcagtgaggaatctaccaccgtctacagcagcagcccaggctcaactgaaaccacagtgttccctcgcagcaccacaacctcagttcgtcgtgaagagcctacaaccttccacagccggccagcctcaactcacacaacactgttcactgaggacagcaccacctcgggcctcactgaagaatctacagccttccccggcagcccagcctccacccaaacagggttacctgccacactcacaaccgcagacctcggtgaggaatcaactacctttcccagcagctcaggctcaactggaacaaaactctcacctgcccgctccaccacctctggcctcgttggagaatccacaccctcacgcctcagtccaagctcaaccgaaacaacaactttacccggcagtcccacaacaccaagcctcagtgagaaatcaaccaccttctacactagccccagatcaccagatgcaacactctcacctgcaaccacaacaagctcaggcgtcagcgaagaatccagcacatcccacagtcaaccaggctcaacgcacacaacagcgttccctgacagcaccaccacctcaggcctcagtcaggaacctacaacttcccacagcagccaaggctcaacagaggcaacactgtcccctggcagtaccacagcctcatcccttggtcaacaatctacaaccttccacagcagcccaggcgacactgaaaccacactcttacctgacgacaccataacctcaggcctcgtggaggcatctacacccacccacagcagcactggctcgctacacacaacactgacccctgccagctccacaagcactggccttcaggaagaatctaccactttccagagctggccaagctcaagtgacacaacaccttcacctcccagcaccacagcagtccctgttgaagtatccacaacctaccacagccgcccgagctcaactccaacaacacacttttctgccagttccacaaccttgggccgtagtgaggaatcaacaacagtccacagcagcccaggtgcaactggaacagcactcttccctacccgctctgcaacctcagttcttgttggagaacctacaacgtcacccatcagttcaggctcaacggaaacaacagcgttacctggcagtaccacaacagcaggcctgagtgagaaatctaccaccttctacagtagccccagatcaccggacacaacactttcacctgccagcacgacaagctcaggcgtcagtgaagaatccaccacctcccacagccgaccaggctcaatgcacacaacagcattccctagcagtaccaccatgccaggcgtcagtcaggaatctacagcttcccacagcagcccaggctccacagacacaacactgtcccctggcagtaccacagcatcatcccttggtccagaatctactaccttccacagcagcccaggctccactgaaacaacactcttacctgacaacaccacagcctcaggcctccttgaagcatctacacccgtccacagcagcactggatcgccacacacaacactgtcccctgccggctctacaacccgtcagggagaatctaccaccttccagagctggccaaactcgaaggacactacccctgcacctcctactaccacatcagcctttgttgagctatctacaacctcccacggcagcccgagctcaactccaacaacccacttttctgccagctccacaacattgggccgtagtgaggaatcgacaacagtccacagcagcccagttgcaactgcaacaacaccctcgcctgcccgctccacaacctcaggcctcgttgaagaatctacgacctaccacagcagcccgggctcaactcaaacaatgcacttccctgaaagcaacacaacttcaggccgtggtgaagaatcaacaacttcccacagcagcacaacacacacaatatcttcagctcctagcaccacatctgcccttgttgaagaacctaccagctaccacagcagcccgggctcaactgcaacaacacacttccctgacagctccacaacctcaggccgtagtgaggaatcaacagcatcccacagcagccaagacgcaacgggaacaatagtcctacctgcccgctccacaacctcagttcttcttggagaatctacgacctcacccatcagttcaggctcaatggaaacgacagcgttacccggcagtaccacaacgccaggcctcagtgagaaatctaccactttccacagtagcccgagctcaactccaacaacccacttttctgccagctccacaaccttgggccgtagtgaggaatcgacaacagtccacagcagcccagttgcaactgcaacaacaccctcgcctgcccgctccacaacctcaggcctcgttgaagaatctacggcgtaccacagcagcccgggctcaactcaaacaatgcacttccctgaaagctccacagcttcaggtcgtagtgaagaatcaagaacttcccacagcagcacaacacacacaatatcttcacctcctagcaccacatctgcccttgttgaagaacctaccagctaccacagcagcccgggctcaattgcaacaacacactttcctgagagctccacaacctccggccgtagtgaggaatcaacagcatcccacagcagcccagatacaaatggaatcacacccttacctgcccattttactacctcaggccgcattgcagaatctaccaccttctatatctctccaggctcaatggaaacaacattagccagcactgccacaacaccaggcctcagtgcaaaatctaccatcctttacagtagctccagatcaccagaccaaacactctcacctgccagcatgacaagctccagcatcagtggagaacccaccagcttgtatagccaagcagagtcaacacacacaacagcgttccctgccagcaccaccacctcaggcctcagtcaggaatcaacaactttccacagtaagccaggctcaactgagacaacactgtcccctggcagcatcacaacttcatcttttgctcaagaatttaccacccctcatagccaaccaggctcagctctgtcaacagtgtcacctgccagcaccacagtgccaggccttagtgaggaatctaccaccttctacagcagcccaggctcaactgaaaccacagcgttttctcacagcaacacaatgtccattcatagtcaacaatctacacccttccctgacagcccaggcttcactcacacagtgttacctgccaccctcacaaccacagacattggtcaggaatcaacagccttccacagcagctcagacgcaactggaacaacacccttacctgcccgctccacagcctcagaccttgttggagaacctacaactttctacatcagcccatcccctacttacacaacactctttcctgcgagttccagcacatcaggcctcactgaggaatctaccaccttccacaccagtccaagcttcacttctacaattgtgtctactgaaagcctggaaaccttagcaccagggttgtgccaggaaggacaaatttggaatggaaaacaatgcgtctgtccccaaggctacgttggttaccagtgcttgtcccctctggaatccttccctgtagaaaccccggaaaaactcaacgccactttaggtatgacagtgaaagtgacttacagaaatttcacagaaaagatgaatgacgcatcctcccaggaataccagaacttcagtaccctcttcaagaatcggatggatgtcgttttgaagggcgacaatcttcctcagtatagaggggtgaacattcggagattgctcaacggtagcatcgtggtcaagaacgatgtcatcctggaggcagactacactttagagtatgaggaactgtttgaaaacctggcagagattgtaaaggccaagattatgaatgaaactagaacaactcttcttgatcctgattcctgcagaaaggccatactgtgctatagtgaagaggacactttcgtggattcatcggtgactccgggctttgacttccaggagcaatgcacccagaaggctgccgaaggatatacccagttctactatgtggatgtcttggatgggaagctggcctgtgtgaacaagtgcaccaaaggaacgaagtcgcaaatgaactgtaacctgggcacatgtcagctgcaacgcagtggcccccgctgcctgtgcccaaatacgaacacacactggtactggggagagacctgtgaattcaacatcgccaagagcctcgtgtatgggatcgtgggggctgtgatggcggtgctgctgctcgcattgatcatcctaatcatcttattcagcctatcccagagaaaacggcacagggaacagtatgatgtgcctcaagagtggcgaaaggaaggcacccctggcatcttccagaagacggccatctgggaagaccagaatctgagggagagcagattcggccttgagaacgcctacaacaacttccggcccaccctggagactgttgactctggcacagagctccacatccagaggccggagatggtagcatccactgtgtgagccaacgggggcctcccaccctcatctagctctgttcaggagagctgcaaacacagagcccaccacaagcctccggggcgggtcaagaggagaccgaagtcaggccctgaagccggtcctgctctgagctgacagacttggccagtcccctgcctgtgctcctgctggggaaggctgggggctgtaagcctctccatccgggagcttccagactcccagaagcctcggcacccctgtctcctcctgggtggctccccactctggaatttccctaccaataaaagcaaatctgaaagctca

SEQ ID NO: 155574 - DNA, 16321 bp, Homo sapiens
  Payload ID: 10587
  Gene Symbol: MUC12
  Gene Name: mucin 12, cell surface associated
  Uniprot ID: Q9UKN1
  ENST ID: ENST00000536621
  CDS Start-End: 1-16008
atgctggtgatctggattctgacgctggctctccggctctgcgcgtccgttactacagtgacaccaggctcaacagtaaacaccagtattggaggtaatacaacttctgcatccacacccagttcaagcgacccttttaccacctttagtgactatggggtgtcagtcacatttatcacgggctcaactgcaacaaaacacttccttgacagctccacaaactcaggccacagtgaggaatcaacagtatcccacagcggcccaggtgcaactggaacaacactcttcccttcccactctgcaacctcagtttttgttggagaacctaaaacctcacccatcacttcagcctcaatggaaacaacagcgttacctggcagtaccacaacagcaggcctgagtgagaaatctaccaccttctacagtagccccagatcaccagacagaacactctcacctgcccgcacgacaagctcaggcgtcagtgaaaaatcaaccacctcccacagccgaccaggcccaacgcacacaatagcgttccctgacagtaccaccatgccaggcgtcagtcaggaatctacagcttcccacagcatccccggctccacagacacaacactgtcccctggcactaccacaccatcatcccttggtccagaatctactaccttccacagcagcccaggctacactaaaacaacacgcttacctgacaacaccacaacctcaggcctccttgaagcatctacgcccgtccacagcagcactggatcgccacacacaacactgtccccttccagctctacaacccatgagggagaacctaccaccttccagagctggccaagctcaaaggacacttcgcctgcaccttctggtaccacatcagcctttgttaaactatctacaacttatcacagcagcccgagctcaactccaacaacccacttttctgccagctccacaaccttgggccatagtgaggaatcgacaccagtccacagcagcccagttgcaactgcaacaacacccccacctgcccgctccgcgacctcaggccatgttgaagaatctacagcctaccacaggagcccgggctcaactcaaacaatgcacttccctgaaagctccacaacttcaggccatagtgaagaatcagcaactttccacggcagcacaacacacacaaaatcttcaactcctagcaccacagctgccctagcacatacaagctaccacagcagcctgggctcaactgaaacaacacacttccgtgatagctccacaatctcaggccgtagtgaggaatcaaaagcatcccacagcagcccagatgcaatggcaacaacagtcttacctgccggctctacaccctcagttcttgttggagactcgacgccctcacccatcagttcaggctcaatggaaaccacagcgttacccggcagtaccacaaaaccaggcctcagtgagaaatctaccactttctacagtagccccagatcaccagacacaacacacttacctgccagcatgacaagctcaggcgtcagtgaagaatccaccacctcccacagccgaccaggctcaacacacacaacagcattccctggcagtaccaccatgccaggcctcagtcaggaatctacagcttcccacagcagcccaggccccacagacacaacattgtcccctggcagtaccacagcatcatcccttggtccagaatatactaccttccacagccgcccaggctccactgaaacaacactcttacctgacaacaccacagcctcaggactccttgaagcatctatgcccgtccacagcagcaccagatcgccacacacaacactgtcccctgccggctctacaacccgtcagggagaatctaccacattccatagctggccaagctcaaaggacactaggcctgcacctcctactaccacatcagcctttgttgagccatctacaacctcccacggcagcccgagctcaattccaacaacccacatttctgcccgctccacaacctcaggcctcgttgaagaatctacgacctaccacagcagcccgggctcaactcaaacaatgcacttccctgaaagcgacacaacttcaggccgtggtgaagaatcaacaacttcccacagcagcacaacacacacaatatcttcagctcctagcaccacatctgcccttgttgaagaacctaccagctaccacagcagcccgggctcaactgcaacaacacacttccctgacagctccacaacctcaggccgtagtgaggaatcaacagcatcgcacagcagccaagacgcaacgggaacaatagtcctacctgcccgctccacaacctcagttcttcttggagaatctacgacctcacccatcagttcaggctcaatggaaacgacagcgttacccggcagtaccacaacgccaggcctcagtgagagatctaccactttccatagtagccccagatcaccagccacaacactctcacctgccagcacgacaagctcaggcgtcagtgaagaatccaccacctcccgcagccgaccaggctcaacgcacacaacagcattccctgacagcaccaccacgccaggcctcagtcggcattctacaacttcccacagcagcccaggctcaacggatacaacactgttacctgccagcaccaccacctcaggccccagtcaggaatcaacaacttcccacagcagctcaggttcaactgacacagcactgtcccctggcagtaccacagccttatcctttggtcaagaatctacaaccttccacagcaacccaggctccactcacacaacactcttccctgacagcaccacaagctcaggcatcgttgaagcatctacacgcgtccacagcagcactggctcaccacgcacaacactgtcccctgccagctccacaagccctggacttcagggagaatctactgccttccagacccacccagcctcaactcacacaacgccttcacctcctagcaccgcaacagcccctgttgaagaatctacaacctaccaccgcagcccaggctcgactccaacaacacacttccctgccagctccacaacttcgggccacagtgagaaatcaacaatattccacagcagcccagatgcaagtggaacaacaccctcatctgcccactccacaacctcaggtcgtggagaatctacaacctcacgcatcagtccaggctcaactgaaataacaacgttacctggcagtaccacaacaccaggcctcagtgaggcatctaccaccttctacagcagccccagatcaccaaccacaacactctcacctgccagcatgacaagcctgggcgtcggtgaagaatccaccacctcccgtagccaaccaggttctactcactcaacagtgtcacctgccagcaccaccacgccaggcctcagtgaggaatctaccaccgtctacagcagcagccgaggctcaactgaaaccacagtgttccctcacagcaccacaacctcagttcatggtgaagagcctacaaccttccacagccggccagcctcaactcacacaacactgttcactgaggacagcaccacctcgggcctcactgaagaatctacagccttccccggcagcccagcctccacccaaacagggttacctgccacactcacaaccgcagacctcggtgaggaatcaactacctttcccagcagctcaggctcaactggaacaaaactctcacctgcccgctccaccacctctggcctcgttggagaatccacaccctcacgcctcagtccaagctcaaccgaaacaacaactttacctggcagtcccacaacaccaagcctcagtgagaaatcaaccaccttctacactagccccagatcaccagatgcaacactctcacctgcaaccacaacaagctcaggcgtcagcgaagaatccagcacatcccacagtcaaccaggctcaacgcacacaacagcattccctgacagcaccaccacctcagacctcagtcaggaacctacaacttcccacagcagccaaggctcaacagaggcaacactgtcccctggcagtaccacagcctcatcccttggtcaacaatctacaaccttccacagcagcccaggcgacactgaaaccacactcttacctgacgacaccataacctcaggcctcgtggaggcatctacacccacccacagcagcactggctcgctacacacaacactgacccctgccagctccacaagcgctggccttcaggaagaatctaccactttccagagctggccaagctcaagtgacacaacaccttcacctcccggcaccacagcagcccctgttgaagtatccacaacctaccacagccgcccgagctcaactccaacaacacacttttctgccagttccacaaccttgggccgtagtgaggaatcaacaacagtccacagcagcccaggtgcaactggaacagcactcttccctacccgctctgcaacctcagttcttgttggagaacctacaacgtcacccatcagttcaggctcaacggaaacaacagcgttacctggcagtaccacaacagcaggcctgagtgagaaatctaccaccttctacagtagccccagatcaccggacacaacactctcacctgccagcacgacaagctcaggcgtcagtgaagaatccaccacctcccacagccgaccaggctcaacgcacacaacagcattccctggcagtaccaccatgccaggcgtcagtcaggaatctacagcttcccacagcagcccaggctccacagacacaacattgtcccctggcagtaccacagcatcatcccttggtccagaatctactactttccacagcagcccaggctccactgaaacaacactcttacctgacaacaccacagcctcaggcctccttgaagcatctacgcccgtccacagcagcactggatcgccacacacaacactgtcccctgccggctctacaacacgtcagggagaatctaccaccttccagagctggccaagctcaaaggacactatgcctgcacctcctactaccacatcagcctttgttgagctatctacaacctcccacggcagcccgagctcaactccaacaacccacttttctgccagctccacaaccttgggccgtagtgaggaatcgacaacagtccacagcagcccagttgcaactgcaacaacaccctcgcctgcccgctccacaacctcaggcctcgttgaagaatctacggcgtaccacagcagcccgggctcaactcaaacaatgcacttccctgaaagctccacagcttcaggtcgtagtgaagaatcaagaacttcccacagcagcacaacacacacaatatcttcacctcctagcaccacatctgcccttgttgaagaacctaccagctaccacagcagcccgggctcaactgcaacaacacacttccctgacagctccacaacctcaggccgtagtgaggaatcaacagcatcccacagcagccaagacgcaacgggaacaatagtcctacctgcccgctccacaacctcagttcttcttggagaatctacgacctcacccatcagttcaggctcaatggaaacgacagcgttacccggcagtaccacaacgccaggcctcagtgagaaatctaccactttccacagtagccccagatcaccagccacaacactctcacctgccagcacgacaagctcaggcgtcagtgaagaatccaccacctcccacagccgaccaggctcaacgcacacaacagcattccctgacagcaccaccacgccaggcctcagtcggcattctacaacttcccacagcagcccaggctcaacggatacaacactgttacctgccagcaccaccacctcaggccccagtcaggaatcaacaacttcccacagcagcccaggttcaactgacacagcactgtcccctggcagtaccacagccttatcctttggtcaagaatctacaaccttccacagcagcccaggctccactcacacaacgctcttccctgacagcaccacaagctcaggcatcgttgaagcatctacacgcgtccacagcagcactggctcaccacgcacaacactgtcccctgccagctccacaagccctggacttcagggagaatctaccgccttccagacccacccagcctcaactcacacgacgccttcacctcctagcaccgcaacagcccctgttgaagaatctacaacctaccaccgcagcccaggctcgactccaacaacacacttccctgccagctccacaacttcgggccacagtgagaaatcaacaatattccacagcagcccagatgcaagtggaacaacaccctcatctgcccactccacaacctcaggtcgtggagaatctacaacctcacgcatcagtccaggctcaactgaaataacaacgttacctggcagtaccacaacaccaggcctcagtgaggcatctaccaccttctacagcagccccagatcaccaaccacaacactctcacctgccagtatgacaagcctaggcgtcggtgaagaatccaccacctcccgtagccaaccaggttctactcactcaacagtgtcacctgccagcaccaccacgccaggcctcagtgaggaatctaccaccgtctacagcagcagcccaggctcaactgaaaccacagtgttccctcgcacccccacaacctcagttcgtggtgaagagcctacaaccttccacagccggccagcctcaactcacacaacactgttcactgaggacagcaccacctcgggcctcactgaagaatctacagccttccccggcagcccagcctccacccaaacagggttacctgccacactcacaaccgcagacctcggtgaggaatcaactacctttcccagcagctcaggctcaactggaacaacactctcacctgcccgctccaccacctctggcctcgttggagaatccacaccctcacgcctcagtccaagctcaaccgaaacaacaactttacccggcagtcccacaacaccaagcctcagtgagaaatcaaccaccttctacactagccccagatcaccagatgcaacactctcacctgcaaccacaacaagctcaggcgtcagtgaagaatccagcacatcccacagtcaaccaggctcaacgcacacaacagcattccctgacagcaccaccacgccaggcctcagtcggcattctacaacttcccacagcagcccaggctcaacggatacaacactgttacctgccagcaccaccacctcaggccccagtcaggaatcaacaacttcccacagcagcccaggttcaactgacacagcactgtcccctggcagtaccacagccttatcctttggtcaagaatctacaaccttccacagcagcccaggctccactcacacaacactcttccctgacagcaccacaagctcaggcatcgttgaagcatctacacgcgtccacagcagcactggctcaccacgcacaacactgtcccctgccagctccacaagccctggacttcagggagaatctaccaccttccagacccacccagcctcaactcacacgacgccttcacctcctagcaccgcaacagcccctgttgaagaatctacaacctaccaccgcagcccaggctcgactccaacaacacacttccctgccagctccacaacttcgggccacagtgagaaatcaacaatattccacagcagcccagatgcaagtggaacaacaccctcatctgcccactccacaacctcaggtcgtggagaatctacaacctcacgcatcagtccaggctcaactgaaataacaacgttacctggcagtaccacaacaccaggcctcagtgaggcatctaccaccttctacagcagccccagatcaccaaccacaacactctcacctgccagtatgacaagcctaggcgtcggtgaagaatccaccacctcccgtagccaaccaggttctactcactcaacagtgtcacctgccagcaccaccacgccaggcctcagtgaggaatctaccaccgtctacagcagcagcccaggctcaactgaaaccacagtgttccctcgcagcaccacaacctcagttcgtggtgaagagcctacaaccttccacagccggccagcctcaactcacacaacactgttcactgaggacagcaccacctcgggcctcactgaagaatctacagccttccccggcagcccagcctccacccaaacagggttacctgccacactcacaaccgcagacctcggtgaggaatcaactacctttcccagcagctcaggctcaactggaacaacactctcacctgcccgctccaccacctctggcctcgttggagaatccacaccctcacgcctcagtccaagctcaaccgaaacaacaactttacccggcagtcccacaacaccaagcctcagtgagaaatcaaccaccttctacactagccccagatcaccagatgcaacactctcacctgcaaccacaacaagctcaggcgtcagtgaagaatccagcacatcccacagtcaaccaggctcaacgcacacaacagcgttccctgacagcaccaccacctcaggcctcagtcaggaacctacagcttcccacagcagccaaggctcaacagaggcaacactgtcccctggcagtaccacagcctcatcccttggtcaacaatctacaaccttccacagcagcccaggcgacactgaaaccacactcttacctgacgacaccataacctcaggcctcgtggaggcatctacacccacccacagcagcactggctcgctacacacaacactgacccctgccagctccacaagcgctggccttcaggaagaatctaccactttccagagctggccaagctcaagtgacacaacaccttcacctcccggcaccacagcagcccctgttgaagtatccacaacctaccacagccgcccgagctcaactccaacaacacacttttctgccagttccacaaccttgggccgtagtgaggaatcaacaacagtccacagcagcccaggtgcaactggaacagcactcttccctacccgctctgcaacctcagttcttgttggagaacctacaacgtcacccatcagttcaggctcaacggaaacaacagcgttacctggcagtaccacaacagcaggcctgagtgagaaatctaccaccttctacagtagccccagatcaccggacacaacactctcacctgccagcacgacaagctcaggcgtcagtgaagaatccaccacctcccacagccgaccaggctcaacgcacacaacagcattccctggcagtaccaccatgccaggcgtcagtcaggaatctacagcttcccacagcagcccaggctccacagacacaacactgtcccctggcagtaccacagcatcatcccttggtccagaatctactaccttccacagcggcccaggctccactgaaacaacactcttacctgacaacaccacagcctcaggcctccttgaagcatctacgcccgtccacagcagcactggatcgccacacacaacactgtcccctgccggctctacaacccgtcagggagaatctaccaccttccagagctggcctaactcgaaggacactacccctgcacctcctactaccacatcagcctttgttgagctatctacaacctcccacggcagcccgagctcaactccaacaacccacttttctgccagctccacaaccttgggccgtagtgaggaatcgacaacagtccacagcagcccagttgcaactgcaacaacaccctcgcctgcccgctccacaacctcaggcctcgttgaagaatctacgacctaccacagcagcccgggctcaactcaaacaatgcacttccctgaaagcgacacaacttcaggccgtggtgaagaatcaacaacttcccacagcagcacaacacacacaatatcttcagctcctagcaccacatctgcccttgttgaagaacctaccagctaccacagcagcccgggctcaactgcaacaacacacttccctgacagctccacaacctcaggccgtagtgaggaatcaacagcatcccacagcagccaagacgcaacgggaacaatagtcctacctgcccgctccacaacctcagttcttcttggagaatctacgacctcacccatcagttcaggctcaatggaaacgacagcgttacccggcagtaccacaacgccaggcctcagtgagaaatctaccactttccacagtagccccagatcaccagccacaacactctcacctgccagcacgacaagctcaggcgtcagtgaagaatccaccacctcccacagccgaccaggctcaacgcacacaacagcattccctgacagcaccaccacgccaggcctcagtcggcattctacaacttcccacagcagcccaggctcaacggatacaacactgttacctgccagcaccaccacctcaggctccagtcaggaatcaacaacttcccacagcagctcaggttcaactgacacagcactgtcccctggcagtaccacagccttatcctttggtcaagaatctacaaccttccacagcagcccaggctccactcacacaacactcttccctgacagcaccacaagctcaggcatcgttgaagcatctacacgcgtccacagcagcactggctcaccacgcacaacactgtcccctgccagctccacaagccctggacttcagggagaatctaccgccttccagacccacccagcctcaactcacacgacgccttcacctcctagcaccgcaacagcccctgttgaagaatctacaacctaccaccgcagcccaggctcgactccaacaacacacttccctgccagctccacaacttcgggccacagtgagaaatcaacaatattccacagcagcccagatgcaagtggaacaacaccctcatctgcccactccacaacctcaggtcgtggagaatctacaacctcacgcatcagtccaggctcaactgaaataacaacgttacctggcagtaccacaacaccaggcctcagtgaggcatctaccaccttctacagcagccccagatcaccaaccacaacactctcacctgccagtatgacaagcctaggcgtcggtgaagaatccaccacctcccgtagccaaccaggttctactcactcaacagtgtcacctgccagcaccaccacgccaggcctcagtgaggaatctaccaccgtctacagcagcagcccaggctcaactgaaaccacagtgttccctcgcagcaccacaacctcagttcgtcgtgaagagcctacaaccttccacagccggccagcctcaactcacacaacactgttcactgaggacagcaccacctcgggcctcactgaagaatctacagccttccccggcagcccagcctccacccaaacagggttacctgccacactcacaaccgcagacctcggtgaggaatcaactacctttcccagcagctcaggctcaactggaacaaaactctcacctgcccgctccaccacctctggcctcgttggagaatccacaccctcacgcctcagtccaagctcaaccgaaacaacaactttacccggcagtcccacaacaccaagcctcagtgagaaatcaaccaccttctacactagccccagatcaccagatgcaacactctcacctgcaaccacaacaagctcaggcgtcagcgaagaatccagcacatcccacagtcaaccaggctcaacgcacacaacagcgttccctgacagcaccaccacctcaggcctcagtcaggaacctacaacttcccacagcagccaaggctcaacagaggcaacactgtcccctggcagtaccacagcctcatcccttggtcaacaatctacaaccttccacagcagcccaggcgacactgaaaccacactcttacctgacgacaccataacctcaggcctcgtggaggcatctacacccacccacagcagcactggctcgctacacacaacactgacccctgccagctccacaagcactggccttcaggaagaatctaccactttccagagctggccaagctcaagtgacacaacaccttcacctcccagcaccacagcagtccctgttgaagtatccacaacctaccacagccgcccgagctcaactccaacaacacacttttctgccagttccacaaccttgggccgtagtgaggaatcaacaacagtccacagcagcccaggtgcaactggaacagcactcttccctacccgctctgcaacctcagttcttgttggagaacctacaacgtcacccatcagttcaggctcaacggaaacaacagcgttacctggcagtaccacaacagcaggcctgagtgagaaatctaccaccttctacagtagccccagatcaccggacacaacactttcacctgccagcacgacaagctcaggcgtcagtgaagaatccaccacctcccacagccgaccaggctcaatgcacacaacagcattccctagcagtaccaccatgccaggcgtcagtcaggaatctacagcttcccacagcagcccaggctccacagacacaacactgtcccctggcagtaccacagcatcatcccttggtccagaatctactaccttccacagcagcccaggctccactgaaacaacactcttacctgacaacaccacagcctcaggcctccttgaagcatctacacccgtccacagcagcactggatcgccacacacaacactgtcccctgccggctctacaacccgtcagggagaatctaccaccttccagagctggccaaactcgaaggacactacccctgcacctcctactaccacatcagcctttgttgagctatctacaacctcccacggcagcccgagctcaactccaacaacccacttttctgccagctccacaacattgggccgtagtgaggaatcgacaacagtccacagcagcccagttgcaactgcaacaacaccctcgcctgcccgctccacaacctcaggcctcgttgaagaatctacgacctaccacagcagcccgggctcaactcaaacaatgcacttccctgaaagcaacacaacttcaggccgtggtgaagaatcaacaacttcccacagcagcacaacacacacaatatcttcagctcctagcaccacatctgcccttgttgaagaacctaccagctaccacagcagcccgggctcaactgcaacaacacacttccctgacagctccacaacctcaggccgtagtgaggaatcaacagcatcccacagcagccaagacgcaacgggaacaatagtcctacctgcccgctccacaacctcagttcttcttggagaatctacgacctcacccatcagttcaggctcaatggaaacgacagcgttacccggcagtaccacaacgccaggcctcagtgagaaatctaccactttccacagtagcccgagctcaactccaacaacccacttttctgccagctccacaaccttgggccgtagtgaggaatcgacaacagtccacagcagcccagttgcaactgcaacaacaccctcgcctgcccgctccacaacctcaggcctcgttgaagaatctacggcgtaccacagcagcccgggctcaactcaaacaatgcacttccctgaaagctccacagcttcaggtcgtagtgaagaatcaagaacttcccacagcagcacaacacacacaatatcttcacctcctagcaccacatctgcccttgttgaagaacctaccagctaccacagcagcccgggctcaattgcaacaacacactttcctgagagctccacaacctccggccgtagtgaggaatcaacagcatcccacagcagcccagatacaaatggaatcacacccttacctgcccattttactacctcaggccgcattgcagaatctaccaccttctatatctctccaggctcaatggaaacaacattagccagcactgccacaacaccaggcctcagtgcaaaatctaccatcctttacagtagctccagatcaccagaccaaacactctcacctgccagcatgacaagctccagcatcagtggagaacccaccagcttgtatagccaagcagagtcaacacacacaacagcgttccctgccagcaccaccacctcaggcctcagtcaggaatcaacaactttccacagtaagccaggctcaactgagacaacactgtcccctggcagcatcacaacttcatcttttgctcaagaatttaccacccctcatagccaaccaggctcagctctgtcaacagtgtcacctgccagcaccacagtgccaggccttagtgaggaatctaccaccttctacagcagcccaggctcaactgaaaccacagcgttttctcacagcaacacaatgtccattcatagtcaacaatctacacccttccctgacagcccaggcttcactcacacagtgttacctgccaccctcacaaccacagacattggtcaggaatcaacagccttccacagcagctcagacgcaactggaacaacacccttacctgcccgctccacagcctcagaccttgttggagaacctacaactttctacatcagcccatcccctacttacacaacactctttcctgcgagttccagcacatcaggcctcactgaggaatctaccaccttccacaccagtccaagcttcacttctacaattgtgtctactgaaagcctggaaaccttagcaccagggttgtgccaggaaggacaaatttggaatggaaaacaatgcgtctgtccccaaggctacgttggttaccagtgcttgtcccctctggaatccttccctgtagaaaccccggaaaaactcaacgccactttaggtatgacagtgaaagtgacttacagaaatttcacagaaaagatgaatgacgcatcctcccaggaataccagaacttcagtaccctcttcaagaatcggatggatgtcgttttgaagggcgacaatcttcctcagtatagaggggtgaacattcggagattgctcaacggtagcatcgtggtcaagaacgatgtcatcctggaggcagactacactttagagtatgaggaactgtttgaaaacctggcagagattgtaaaggccaagattatgaatgaaactagaacaactcttcttgatcctgattcctgcagaaaggccatactgtgctatagtgaagaggacactttcgtggattcatcggtgactccgggctttgacttccaggagcaatgcacccagaaggctgccgaaggatatacccagttctactatgtggatgtcttggatgggaagctggcctgtgtgaacaagtgcaccaaaggaacgaagtcgcaaatgaactgtaacctgggcacatgtcagctgcaacgcagtggcccccgctgcctgtgcccaaatacgaacacacactggtactggggagagacctgtgaattcaacatcgccaagagcctcgtgtatgggatcgtgggggctgtgatggcggtgctgctgctcgcattgatcatcctaatcatcttattcagcctatcccagagaaaacggcacagggaacagtatgatgtgcctcaagagtggcgaaaggaaggcacccctggcatcttccagaagacggccatctgggaagaccagaatctgagggagagcagattcggccttgagaacgcctacaacaacttccggcccaccctggagactgttgactctggcacagagctccacatccagaggccggagatggtagcatccactgtgtgagccaacgggggcctcccaccctcatctagctctgttcaggagagctgcaaacacagagcccaccacaagcctccggggcgggtcaagaggagaccgaagtcaggccctgaagccggtcctgctctgagctgacagacttggccagtcccctgcctgtgctcctgctggggaaggctgggggctgtaagcctctccatccgggagcttccagactcccagaagcctcggcacccctgtctcctcctgggtggctccccactctggaatttccctaccaataaaagcaaatctgaaagctcagaatgagaagtga

SEQ ID NO: 155575 - DNA, 587 bp, Homo sapiens
  Payload ID: 10588
  Gene Symbol: MUC13
  Gene Name: mucin 13, cell surface associated
  ENST ID: ENST00000478191
  CDS Start-End: 36-587
tttcctcctcagattaccaagcaagaacagctaaaatgaaagccatcattcatcttactcttcttgctctcctttctgtaaacacagaagacaatcaatcatcagggcctcccactggcaccgctttattggagaccagcaccctaaacagcacaggtcccagcaatccttgccaagatgatccctgtgcagataattcgttatgtgttaagctgcataatacaagtttttgcctgtgtttagaagggtattactacaactcttctacatgtaagaaaggaaaggtattccctgggaagatttcagtgacagtatcagaaacatttgacccagaagagaaacattccatggcctatcaagacttgcatagtgaaattactagcttgtttaaagatgtatttggcacatctgtttatggacagactgtaattcttactgtaagcacatctctgtcaccaagatctgaaatgcgtgctgatgacaagtttgttaatgtaacaatagtaacaattttggcagaaaccacaagtgacaatgagaagactgtgactgagaaaattaataaagcaattagaagtagctcaagc

SEQ ID NO: 155576 - DNA, 2879 bp, Homo sapiens
  Payload ID: 10588
  Gene Symbol: MUC13
  Gene Name: mucin 13, cell surface associated
  Uniprot ID: Q9H3R2
  ENST ID: ENST00000616727
  CDS Start-End: 40-1578
atcatttcctcctcagattaccaagcaagaacagctaaaatgaaagccatcattcatcttactcttcttgctctcctttctgtaaacacagccaccaaccaaggcaactcagctgatgctgtaacaaccacagaaactgcgactagtggtcctacagtagctgcagctgataccactgaaactaatttccctgaaactgctagcaccacagcaaatacaccttctttcccaacagctacttcacctgctccccccataattagtacacatagttcctccacaattcctacacctgctccccccataattagtacacatagttcctccacaattcctatacctactgctgcagacagtgagtcaaccacaaatgtaaattcattagctacctctgacataatcaccgcttcatctccaaatgatggattaatcacaatggttccttctgaaacacaaagtaacaatgaaatgtcccccaccacagaagacaatcaatcatcagggcctcccactggcaccgctttattggagaccagcaccctaaacagcacaggtcccagcaatccttgccaagatgatccctgtgcagataattcgttatgtgttaagctgcataatacaagtttttgcctgtgtttagaagggtattactacaactcttctacatgtaagaaaggaaaggtattccctgggaagatttcagtgacagtatcagaaacatttgacccagaagagaaacattccatggcctatcaagacttgcatagtgaaattactagcttgtttaaagatgtatttggcacatctgtttatggacagactgtaattcttactgtaagcacatctctgtcaccaagatctgaaatgcgtgctgatgacaagtttgttaatgtaacaatagtaacaattttggcagaaaccacaagtgacaatgagaagactgtgactgagaaaattaataaagcaattagaagtagctcaagcaactttctaaactatgatttgacccttcggtgtgattattatggctgtaaccagactgcggatgactgcctcaatggtttagcatgcgattgcaaatctgacctgcaaaggcctaacccacagagccctttctgcgttgcttccagtctcaagtgtcctgatgcctgcaacgcacagcacaagcaatgcttaataaagaagagtggtggggcccctgagtgtgcgtgcgtgcccggctaccaggaagatgctaatgggaactgccaaaagtgtgcatttggctacagtggactcgactgtaaggacaaatttcagctgatcctcactattgtgggcaccatcgctggcattgtcattctcagcatgataattgcattgattgtcacagcaagatcaaataacaaaacgaagcatattgaagaagagaacttgattgacgaagactttcaaaatctaaaactgcggtcgacaggcttcaccaatcttggagcagaagggagcgtctttcctaaggtcaggataacggcctccagagacagccagatgcaaaatccctattcaagacacagcagcatgccccgccctgactattagaatcataagaatgtggaacccgccatggcccccaaccaatgtacaagctattatttagagtgtttagaaagactgatggagaagtgagcaccagtaaagatctggcctccggggtttttcttccatctgacatctgccagcctctctgaatggaagttgtgaatgtttgcaacgaatccagctcacttgctaaataagaatctatgacattaaatgtagtagatgctattagcgcttgtcagagaggtggttttcttcaatcagtacaaagtactgagacaatggttagggttgttttcttaattcttttcctggtagggcaacaagaaccatttccaatctagaggaaagctccccagcattgcttgctcctgggcaaacattgctcttgagttaagtgacctaattcccctgggagacatacgcatcaactgtggaggtccgaggggatgagaagggatacccaccatctttcaagggtcacaagctcactctctgacaagtcagaatagggacactgcttctatccctccaatggagagattctggcaacctttgaacagcccagagcttgcaacctagcctcacccaagaagactggaaagagacatatctctcagctttttcaggaggcgtgcctgggaatccaggaactttttgatgctaattagaaggcctggactaaaaatgtccactatggggtgcactctacagtttttgaaatgctaggaggcagaaggggcagagagtaaaaaacatgacctggtagaaggaagagaggcaaaggaaactgggtggggaggatcaattagagaggaggcacctgggatccaccttcttccttaggtcccctcctccatcagcaaaggagcacttctctaatcatgccctcccgaagactggctgggagaaggtttaaaaacaaaaaatccaggagtaagagccttaggtcagtttgaaattggagacaaactgtctggcaaagggtgcgagagggagcttgtgctcaggagtccagccgtccagcctcggggtgtaggtttctgaggtgtgccattggggcctcagccttctctggtgacagaggctcagctgtggccaccaacacacaaccacacacacacaaccacacacacaaatgggggcaaccacatccagtacaagcttttacaaatgttattagtgtccttttttatttctaatgccttgtcctcttaaaagttattttatttgttattattatttgttcttgactgttaattgtgaatggtaatgcaataaagtgcctttgttagatggtg

SEQ ID NO: 155577 - DNA, 2968 bp, Homo sapiens
  Payload ID: 10589
  Gene Symbol: MUC15
  Gene Name: mucin 15, cell surface associated
  ENST ID: ENST00000281268
  CDS Start-End: 1-936
atgggcataatacaatctattcttgccacatcaagggattgttattcctttaaaaaaaaaccaataccaaagaagcctacaatgttggccttagccaaaattctgttgatttcaacgttgttttattcacttctatcggggagccatggaaaagaaaatcaagacataaacacaacacagaacattgcagaagtttttaaaacaatggaaaataaacctatttctttggaaagtgaagcaaacttaaactcagataaagaaaatataaccacctcaaatctcaaggcgagtcattcccctcctttgaatctacccaacaacagccacggaataacagatttctccagtaactcatcagcagagcattctttgggcagtctaaaacccacatctaccatttccacaagccctcccttgatccatagctttgtttctaaagtgccttggaatgcacctatagcagatgaagatcttttgcccatctcagcacatcccaatgctacacctgctctgtcttcagaaaacttcacttggtctttggtcaatgacaccgtgaaaactcctgataacagttccattacagttagcatcctctcttcagaaccaacttctccatctgtgacccccttgatagtggaaccaagtggatggcttaccacaaacagtgatagcttcactgggtttaccccttatcaagaaaaaacaactctacagcctaccttaaaattcaccaataattcaaaactctttccaaatacgtcagatccccaaaaagttctgcgattagacaatgcaccggaaccttatgatgtgagttttgggaattctagctactacaatccaactttgaatgattcagccatgccagaaagtgaagaaaatgcacgtgatggcattcctatggatgacatacctccacttcgtacttctgtatagaactaacagcaaaaaggcgttaaacagcaagtgtcatctacatcctagccttttgacaaattcatctttcaaaaggttacacaaaattactgtcacgtggattttgtcaaggagaatcataaaagcaggagaccagtagcagaaatgtagacaggatgtatcatccaaaggttttctttcttacaatttttggccatcctgaggcatttactaagtagccttaatttgtattttagtagtattttcttagtagaaaatatttgtggaatcagataaaactaaaagatttcaccattacagccctgcctcataactaaataataaaaattattccaccaaaaaattctaaaacaatgaagatgactctttactgctctgcctgaagccctagtaccataattcaagattgcattttcttaaatgaaaattgaaagggtgctttttaaagaaaatttgacttaaagctaaaaagaggacatagcccagagtttctgttattgggaaattgaggcaatagaaatgacagacctgtattctagtacgttataattttctagatcagcacacacatgatcagcccactgagttatgaagctgacaatgactgcattcaacggggccatggcaggaaagctgaccctacccaggaaagtaatagcttctttaaaagtcttcaaaggttttgggaattttaacttgtcttaatatatcttaggcttcaattatttgggtgccttaaaaactcaatgagaatcatggtaaaaaaaaaaagttaaccaaagaatatacctgtacataatttgtacagttttaagttgttagataggaactggatttcttatgtattagacattattgctcaatcataatggaatagattctgcatccctaaatgtatgaaccataaggttaaaaaagatgaatggaaatatcaaacaactttttactgagcatcagtttcataatcaataatataagaagattaatttggattctagtatgtttcagtttgtttttaattaccaccttcctttggtagaaaaaatatgttccttgatgtaggaaagtctaggttttagagattagaggatgagatcaagagttaaattcctaaagaagcactgaatatatgaagagagcaaacaaatcaagtaccaacctagaggctttatttttgaattgattcatggtgtgtgtgtgtgtgtgtgtgtgtgtgtgtgtgtgtgtgtaacacagaaacagcttcagaaaataagggatagaaagtaatgaagaaagtacttaccccatattgccataaaaatagcaaagaagactgtccctccattatcgaacaaatatgtcacctgagtagaaaacaaacagaaatattagtcatgcaaattgattataataagccagtgaatactgtttgcactcaggtactatgattttttctcaaatagaatcatattattttatagtacagaaatattatatatgaattcctttcatgggtcttgcaacaatttcacatgatttttctcatggggagaggtgaagaaacaacattagccctcttctctcctctcttgattccctttataccccaccatcatttctgattataaataattctaccattctatggaagtatttgtgggtcacagattgtcaaactacttaatgaaagttgtatgaaattagtttttcaggtgaggcattcctagttgcaattcctgttagcaaaacttctaggagtggggaagttggaaaatgcaggattcttccagtgagccagcatttcccatagctaaccctattctcttagtctttcaaaatgtagaatgggtccaataatggctataagatgtaataaatcccatcttaatttgttttaaaagtttcataaatcactgaacacttatgaaacaaagtgttttttaatcagatatcaactgaaacttcataaaggatgcatagttttataatgttattgaatcaaattttaaggcttgtattgtttgattttaataaagtataaattcaattt

SEQ ID NO: 155578 - DNA, 3156 bp, Homo sapiens
  Payload ID: 10589
  Gene Symbol: MUC15
  Gene Name: mucin 15, cell surface associated
  Uniprot ID: Q8N387
  ENST ID: ENST00000455601
  CDS Start-End: 120-1124
tctaatgcacgacagattcctttcagacaggacaactgtgatatttcagttcctgattgtaaatacctcctaagcctgaagattcctttaaaaaaaaaccaataccaaagaagcctacaatgttggccttagccaaaattctgttgatttcaacgttgttttattcacttctatcggggagccatggaaaagaaaatcaagacataaacacaacacagaacattgcagaagtttttaaaacaatggaaaataaacctatttctttggaaagtgaagcaaacttaaactcagataaagaaaatataaccacctcaaatctcaaggcgagtcattcccctcctttgaatctacccaacaacagccacggaataacagatttctccagtaactcatcagcagagcattctttgggcagtctaaaacccacatctaccatttccacaagccctcccttgatccatagctttgtttctaaagtgccttggaatgcacctatagcagatgaagatcttttgcccatctcagcacatcccaatgctacacctgctctgtcttcagaaaacttcacttggtctttggtcaatgacaccgtgaaaactcctgataacagttccattacagttagcatcctctcttcagaaccaacttctccatctgtgacccccttgatagtggaaccaagtggatggcttaccacaaacagtgatagcttcactgggtttaccccttatcaagaaaaaacaactctacagcctaccttaaaattcaccaataattcaaaactctttccaaatacgtcagatccccaaaaagaaaatagaaatacaggaatagtattcggggccattttaggtgctattctgggtgtctcattgcttactcttgtgggctacttgttgtgtggaaaaaggaaaacggattcattttcccatcggcgactttatgacgacagaaatgaaccagttctgcgattagacaatgcaccggaaccttatgatgtgagttttgggaattctagctactacaatccaactttgaatgattcagccatgccagaaagtgaagaaaatgcacgtgatggcattcctatggatgacatacctccacttcgtacttctgtatagaactaacagcaaaaaggcgttaaacagcaagtgtcatctacatcctagccttttgacaaattcatctttcaaaaggttacacaaaattactgtcacgtggattttgtcaaggagaatcataaaagcaggagaccagtagcagaaatgtagacaggatgtatcatccaaaggttttctttcttacaatttttggccatcctgaggcatttactaagtagccttaatttgtattttagtagtattttcttagtagaaaatatttgtggaatcagataaaactaaaagatttcaccattacagccctgcctcataactaaataataaaaattattccaccaaaaaattctaaaacaatgaagatgactctttactgctctgcctgaagccctagtaccataattcaagattgcattttcttaaatgaaaattgaaagggtgctttttaaagaaaatttgacttaaagctaaaaagaggacatagcccagagtttctgttattgggaaattgaggcaatagaaatgacagacctgtattctagtacgttataattttctagatcagcacacacatgatcagcccactgagttatgaagctgacaatgactgcattcaacggggccatggcaggaaagctgaccctacccaggaaagtaatagcttctttaaaagtcttcaaaggttttgggaattttaacttgtcttaatatatcttaggcttcaattatttgggtgccttaaaaactcaatgagaatcatggtaaaaaaaaaaagttaaccaaagaatatacctgtacataatttgtacagttttaagttgttagataggaactggatttcttatgtattagacattattgctcaatcataatggaatagattctgcatccctaaatgtatgaaccataaggttaaaaaagatgaatggaaatatcaaacaactttttactgagcatcagtttcataatcaataatataagaagattaatttggattctagtatgtttcagtttgtttttaattaccaccttcctttggtagaaaaaatatgttccttgatgtaggaaagtctaggttttagagattagaggatgagatcaagagttaaattcctaaagaagcactgaatatatgaagagagcaaacaaatcaagtaccaacctagaggctttatttttgaattgattcatggtgtgtgtgtgtgtgtgtgtgtgtgtgtgtgtgtgtgtgtaacacagaaacagcttcagaaaataagggatagaaagtaatgaagaaagtacttaccccatattgccataaaaatagcaaagaagactgtccctccattatcgaacaaatatgtcacctgagtagaaaacaaacagaaatattagtcatgcaaattgattataataagccagtgaatactgtttgcactcaggtactatgattttttctcaaatagaatcatattattttatagtacagaaatattatatatgaattcctttcatgggtcttgcaacaatttcacatgatttttctcatggggagaggtgaagaaacaacattagccctcttctctcctctcttgattccctttataccccaccatcatttctgattataaataattctaccattctatggaagtatttgtgggtcacagattgtcaaactacttaatgaaagttgtatgaaattagtttttcaggtgaggcattcctagttgcaattcctgttagcaaaacttctaggagtggggaagttggaaaatgcaggattcttccagtgagccagcatttcccatagctaaccctattctcttagtctttcaaaatgtagaatgggtccaataatggctataagatgtaataaatcccatcttaatttgttttaaaagtttcataaatcactgaacacttatgaaacaaagtgttttttaatcagatatcaactgaaacttcataaaggatgcatagttttataatgttattgaatcaaattttaaggcttgtattgtttgattttaataaagtataaattcaattt

SEQ ID NO: 155579 - DNA, 3118 bp, Homo sapiens
  Payload ID: 10589
  Gene Symbol: MUC15
  Gene Name: mucin 15, cell surface associated
  ENST ID: ENST00000436318
  CDS Start-End: 1-1086
atgggcataatacaatctattcttgccacatcaagggattgttattcctttaaaaaaaaaccaataccaaagaagcctacaatgttggccttagccaaaattctgttgatttcaacgttgttttattcacttctatcggggagccatggaaaagaaaatcaagacataaacacaacacagaacattgcagaagtttttaaaacaatggaaaataaacctatttctttggaaagtgaagcaaacttaaactcagataaagaaaatataaccacctcaaatctcaaggcgagtcattcccctcctttgaatctacccaacaacagccacggaataacagatttctccagtaactcatcagcagagcattctttgggcagtctaaaacccacatctaccatttccacaagccctcccttgatccatagctttgtttctaaagtgccttggaatgcacctatagcagatgaagatcttttgcccatctcagcacatcccaatgctacacctgctctgtcttcagaaaacttcacttggtctttggtcaatgacaccgtgaaaactcctgataacagttccattacagttagcatcctctcttcagaaccaacttctccatctgtgacccccttgatagtggaaccaagtggatggcttaccacaaacagtgatagcttcactgggtttaccccttatcaagaaaaaacaactctacagcctaccttaaaattcaccaataattcaaaactctttccaaatacgtcagatccccaaaaagaaaatagaaatacaggaatagtattcggggccattttaggtgctattctgggtgtctcattgcttactcttgtgggctacttgttgtgtggaaaaaggaaaacggattcattttcccatcggcgactttatgacgacagaaatgaaccagttctgcgattagacaatgcaccggaaccttatgatgtgagttttgggaattctagctactacaatccaactttgaatgattcagccatgccagaaagtgaagaaaatgcacgtgatggcattcctatggatgacatacctccacttcgtacttctgtatagaactaacagcaaaaaggcgttaaacagcaagtgtcatctacatcctagccttttgacaaattcatctttcaaaaggttacacaaaattactgtcacgtggattttgtcaaggagaatcataaaagcaggagaccagtagcagaaatgtagacaggatgtatcatccaaaggttttctttcttacaatttttggccatcctgaggcatttactaagtagccttaatttgtattttagtagtattttcttagtagaaaatatttgtggaatcagataaaactaaaagatttcaccattacagccctgcctcataactaaataataaaaattattccaccaaaaaattctaaaacaatgaagatgactctttactgctctgcctgaagccctagtaccataattcaagattgcattttcttaaatgaaaattgaaagggtgctttttaaagaaaatttgacttaaagctaaaaagaggacatagcccagagtttctgttattgggaaattgaggcaatagaaatgacagacctgtattctagtacgttataattttctagatcagcacacacatgatcagcccactgagttatgaagctgacaatgactgcattcaacggggccatggcaggaaagctgaccctacccaggaaagtaatagcttctttaaaagtcttcaaaggttttgggaattttaacttgtcttaatatatcttaggcttcaattatttgggtgccttaaaaactcaatgagaatcatggtaaaaaaaaaaagttaaccaaagaatatacctgtacataatttgtacagttttaagttgttagataggaactggatttcttatgtattagacattattgctcaatcataatggaatagattctgcatccctaaatgtatgaaccataaggttaaaaaagatgaatggaaatatcaaacaactttttactgagcatcagtttcataatcaataatataagaagattaatttggattctagtatgtttcagtttgtttttaattaccaccttcctttggtagaaaaaatatgttccttgatgtaggaaagtctaggttttagagattagaggatgagatcaagagttaaattcctaaagaagcactgaatatatgaagagagcaaacaaatcaagtaccaacctagaggctttatttttgaattgattcatggtgtgtgtgtgtgtgtgtgtgtgtgtgtgtgtgtgtgtgtaacacagaaacagcttcagaaaataagggatagaaagtaatgaagaaagtacttaccccatattgccataaaaatagcaaagaagactgtccctccattatcgaacaaatatgtcacctgagtagaaaacaaacagaaatattagtcatgcaaattgattataataagccagtgaatactgtttgcactcaggtactatgattttttctcaaatagaatcatattattttatagtacagaaatattatatatgaattcctttcatgggtcttgcaacaatttcacatgatttttctcatggggagaggtgaagaaacaacattagccctcttctctcctctcttgattccctttataccccaccatcatttctgattataaataattctaccattctatggaagtatttgtgggtcacagattgtcaaactacttaatgaaagttgtatgaaattagtttttcaggtgaggcattcctagttgcaattcctgttagcaaaacttctaggagtggggaagttggaaaatgcaggattcttccagtgagccagcatttcccatagctaaccctattctcttagtctttcaaaatgtagaatgggtccaataatggctataagatgtaataaatcccatcttaatttgttttaaaagtttcataaatcactgaacacttatgaaacaaagtgttttttaatcagatatcaactgaaacttcataaaggatgcatagttttataatgttattgaatcaaattttaaggcttgtattgtttgattttaataaagtataaattcaattt

SEQ ID NO: 155580 - DNA, 1386 bp, Homo sapiens
  Payload ID: 10589
  Gene Symbol: MUC15
  Gene Name: mucin 15, cell surface associated
  ENST ID: ENST00000527569
  CDS Start-End: 148-1083
acacttaacccatctgttttctctaatgcacgacagattcctttcagacaggacaactgtgatatttcagttcctgattgtaaatacctcctaagcctgaagcttctgttactagccattgtgagcttcagtttcttcatctgcaaaatgggcataatacaatctattcttgccacatcaagggattgttattcctttaaaaaaaaaccaataccaaagaagcctacaatgttggccttagccaaaattctgttgatttcaacgttgttttattcacttctatcggggagccatggaaaagaaaatcaagacataaacacaacacagaacattgcagaagtttttaaaacaatggaaaataaacctatttctttggaaagtgaagcaaacttaaactcagataaagaaaatataaccacctcaaatctcaaggcgagtcattcccctcctttgaatctacccaacaacagccacggaataacagatttctccagtaactcatcagcagagcattctttgggcagtctaaaacccacatctaccatttccacaagccctcccttgatccatagctttgtttctaaagtgccttggaatgcacctatagcagatgaagatcttttgcccatctcagcacatcccaatgctacacctgctctgtcttcagaaaacttcacttggtctttggtcaatgacaccgtgaaaactcctgataacagttccattacagttagcatcctctcttcagaaccaacttctccatctgtgacccccttgatagtggaaccaagtggatggcttaccacaaacagtgatagcttcactgggtttaccccttatcaagaaaaaacaactctacagcctaccttaaaattcaccaataattcaaaactctttccaaatacgtcagatccccaaaaagttctgcgattagacaatgcaccggaaccttatgatgtgagttttgggaattctagctactacaatccaactttgaatgattcagccatgccagaaagtgaagaaaatgcacgtgatggcattcctatggatgacatacctccacttcgtacttctgtatagaactaacagcaaaaaggcgttaaacagcaagtgtcatctacatcctagccttttgacaaattcatctttcaaaaggttacacaaaattactgtcacgtggattttgtcaaggagaatcataaaagcaggagaccagtagcagaaatgtagacaggatgtatcatccaaaggttttctttcttacaatttttggccatcctgaggcatttactaagtagccttaatttgtattttagtagtattttcttagtagaaaatatttgtggaatcagataaaactaaaagatttcaccattacagccc

SEQ ID NO: 155581 - DNA, 2084 bp, Homo sapiens
  Payload ID: 10589
  Gene Symbol: MUC15
  Gene Name: mucin 15, cell surface associated
  ENST ID: ENST00000529533
  CDS Start-End: 239-1324
ggttcctgggcgctctgttacacaagcaagatacagccagccccacctaattttgtttccctggcaccctcctgctcagtgcgacattgtcacacttaacccatctgttttctctaatgcacgacagattcctttcagacaggacaactgtgatatttcagttcctgattgtaaatacctcctaagcctgaagcttctgttactagccattgtgagcttcagtttcttcatctgcaaaatgggcataatacaatctattcttgccacatcaagggattgttattcctttaaaaaaaaaccaataccaaagaagcctacaatgttggccttagccaaaattctgttgatttcaacgttgttttattcacttctatcggggagccatggaaaagaaaatcaagacataaacacaacacagaacattgcagaagtttttaaaacaatggaaaataaacctatttctttggaaagtgaagcaaacttaaactcagataaagaaaatataaccacctcaaatctcaaggcgagtcattcccctcctttgaatctacccaacaacagccacggaataacagatttctccagtaactcatcagcagagcattctttgggcagtctaaaacccacatctaccatttccacaagccctcccttgatccatagctttgtttctaaagtgccttggaatgcacctatagcagatgaagatcttttgcccatctcagcacatcccaatgctacacctgctctgtcttcagaaaacttcacttggtctttggtcaatgacaccgtgaaaactcctgataacagttccattacagttagcatcctctcttcagaaccaacttctccatctgtgacccccttgatagtggaaccaagtggatggcttaccacaaacagtgatagcttcactgggtttaccccttatcaagaaaaaacaactctacagcctaccttaaaattcaccaataattcaaaactctttccaaatacgtcagatccccaaaaagaaaatagaaatacaggaatagtattcggggccattttaggtgctattctgggtgtctcattgcttactcttgtgggctacttgttgtgtggaaaaaggaaaacggattcattttcccatcggcgactttatgacgacagaaatgaaccagttctgcgattagacaatgcaccggaaccttatgatgtgagttttgggaattctagctactacaatccaactttgaatgattcagccatgccagaaagtgaagaaaatgcacgtgatggcattcctatggatgacatacctccacttcgtacttctgtatagaactaacagcaaaaaggcgttaaacagcaagtgtcatctacatcctagccttttgacaaattcatctttcaaaaggttacacaaaattactgtcacgtggattttgtcaaggagaatcataaaagcaggagaccagtagcagaaatgtagacaggatgtatcatccaaaggttttctttcttacaatttttggccatcctgaggcatttactaagtagccttaatttgtattttagtagtattttcttagtagaaaatatttgtggaatcagataaaactaaaagatttcaccattacagccctgcctcataactaaataataaaaattattccaccaaaaaattctaaaacaatgaagatgactctttactgctctgcctgaagccctagtaccataattcaagattgcattttcttaaatgaaaattgaaagggtgctttttaaagaaaatttgacttaaagctaaaaagaggacatagcccagagtttctgttattgggaaattgaggcaatagaaatgacagacctgtattctagtacgttataattttctagatcagcacacacatgatcagcccactgagttatgaagctgacaatgactgcattcaacggggccatggcaggaaagctgaccctacccaggaaagtaatagcttctttaaaagtcttcaaaggttttgggaattttaacttgtcttaatatatcttaggcttcaattatttgggtgccttaaaaactcaatgagaatcatggt

SEQ ID NO: 155582 - DNA, 32767 bp, Homo sapiens
  Payload ID: 10590
  Gene Symbol: MUC16
  Gene Name: mucin 16, cell surface associated
  ENST ID: ENST00000397910
  CDS Start-End: 205-43728
aagcgttgcacaattcccccaacctccatacatacggcagctcttctagacacaggttttcccaggtcaaatgcggggaccccagccatatctcccaccctgagaaattttggagtttcagggagctcagaagctctgcagaggccaccctctctgaggggattcttcttagacctccatccagaggcaaatgttgacctgtccatgctgaaaccctcaggccttcctgggtcatcttctcccacccgctccttgatgacagggagcaggagcactaaagccacaccagaaatggattcaggactgacaggagccaccttgtcacctaagacatctacaggtgcaatcgtggtgacagaacatactctgccctttacttccccagataagaccttggccagtcctacatcttcggttgtgggaagaaccacccagtctttgggggtgatgtcctctgctctccctgagtcaacctctagaggaatgacacactccgagcaaagaaccagcccatcgctgagtccccaggtcaatggaactccctctaggaactaccctgctacaagcatggtttcaggattgagttccccaaggaccaggaccagttccacagaaggaaattttaccaaagaagcatctacatacacactcactgtagagaccacaagtggcccagtcactgagaagtacacagtccccactgagacctcaacaactgaaggtgacagcacagagaccccctgggacacaagatatattcctgtaaaaatcacatctccaatgaaaacatttgcagattcaactgcatccaaggaaaatgccccagtgtctatgactccagctgagaccacagttactgactcacatactccaggaaggacaaacccatcatttgggacactttattcttccttccttgacctatcacctaaagggaccccaaattccagaggtgaaacaagcctggaactgattctatcaaccactggatatcccttctcctctcctgaacctggctctgcaggacacagcagaataagtaccagtgcgcctttgtcatcatctgcttcagttctcgataataaaatatcagagaccagcatattctcaggccagagtctcacctcccctctgtctcctggggtgcccgaggccagagccagcacaatgcccaactcagctatccctttttccatgacactaagcaatgcagaaacaagtgccgaaagggtcagaagcacaatttcctctctggggactccatcaatatccacaaagcagacagcagagactatccttaccttccatgccttcgctgagaccatggatatacccagcacccacatagccaagactttggcttcagaatggttgggaagtccaggtacccttggtggcaccagcacttcagcgctgacaaccacatctccatctaccactttagtctcagaggagaccaacacccatcactccacgagtggaaaggaaacagaaggaactttgaatacatctatgactccacttgagacctctgctcctggagaagagtccgaaatgactgccaccttggtccccactctaggttttacaactcttgacagcaagatcagaagtccatctcaggtctcttcatcccacccaacaagagagctcagaaccacaggcagcacctctgggaggcagagttccagcacagctgcccacgggagctctgacatcctgagggcaaccacttccagcacctcaaaagcatcatcatggaccagtgaaagcacagctcagcaatttagtgaaccccagcacacacagtgggtggagacaagtcctagcatgaaaacagagagacccccagcatcaaccagtgtggcagcccctatcaccacttctgttccctcagtggtctctggcttcaccaccctgaagaccagctccacaaaagggatttggcttgaagaaacatctgcagacacactcatcggagaatccacagctggcccaaccacccatcagtttgctgttcccactgggatttcaatgacaggaggcagcagcaccaggggaagccagggcacaacccacctactcaccagagccacagcatcatctgagacatccgcagatttgactctggccacgaacggtgtcccagtctccgtgtctccagcagtgagcaagacggctgctggctcaagtcctccaggagggacaaagccatcatatacaatggtttcttctgtcatccctgagacatcatctctacagtcctcagctttcagggaaggaaccagcctgggactgactccattaaacactagacatcccttctcttcccctgaaccagactctgcaggacacaccaagataagcaccagcattcctctgttgtcatctgcttcagttcttgaggataaagtgtcagcgaccagcacattctcacaccacaaagccacctcatctattaccacagggactcctgaaatctcaacaaagacaaagcccagctcagccgttctttcctccatgaccctaagcaatgcagcaacaagtcctgaaagagtcagaaatgcaacttcccctctgactcatccatctccatcaggggaagagacagcagggagtgtcctcactctcagcacctctgctgagactacagactcacctaacatccacccaactgggacactgacttcagaatcgtcagagagtcctagcactctcagcctcccaagtgtctctggagtcaaaaccacattttcttcatctactccttccactcatctatttactagtggagaagaaacagaggaaacttcgaatccatctgtgtctcaacctgagacttctgtttccagagtaaggaccaccttggccagcacctctgtccctaccccagtattccccaccatggacacctggcctacacgttcagctcagttctcttcatcccacctagtgagtgagctcagagctacgagcagtacctcagttacaaactcaactggttcagctcttcctaaaatatctcacctcactgggacggcaacaatgtcacagaccaatagagacacgtttaatgactctgctgcaccccaaagcacaacttggccagagactagtcccagattcaagacagggttaccttcagcaacaaccactgtttcaacctctgccacttctctctctgctactgtaatggtctctaaattcacttctccagcaactagttccatggaagcaacttctatcagggaaccatcaacaaccatcctcacaacagagaccacgaatggcccaggctctatggctgtggcttctaccaacatcccaattggaaagggctacattactgaaggaagattggacacaagccatctgcccattggaaccacagcttcctctgagacatctatggattttaccatggccaaagaaagtgtctcaatgtcagtatctccatctcagtccatggatgctgctggctcaagcactccaggaaggacaagccaattcgttgacacattttctgatgatgtctatcatttaacatccagagaaattacaatacctagagatggaacaagctcagctctgactccacaaatgactgcaactcaccctccatctcctgatcctggctctgctagaagcacctggcttggcatcttgtcctcatctccttcttctcctactcccaaagtcacaatgagctccacattttcaactcagagagtcaccacaagcatgataatggacacagttgaaactagtcggtggaacatgcccaacttaccttccacgacttccttgacaccaagtaatattccaacaagtggtgccataggaaaaagcaccctggttcccttggacactccatctccagccacatcattggaggcatcagaagggggacttccaaccctcagcacctaccctgaatcaacaaacacacccagcatccacctcggagcacacgctagttcagaaagtccaagcaccatcaaacttaccatggcttcagtagtaaaacctggctcttacacacctctcaccttcccctcaatagagacccacattcatgtatcaacagccagaatggcttactcttctgggtcttcacctgagatgacagctcctggagagactaacactggtagtacctgggaccccaccacctacatcaccactacggatcctaaggatacaagttcagctcaggtctctacaccccactcagtgaggacactcagaaccacagaaaaccatccaaagacagagtccgccaccccagctgcttactctggaagtcctaaaatctcaagttcacccaatctcaccagtccggccacaaaagcatggaccatcacagacacaactgaacactccactcaattacattacacaaaattggcagaaaaatcatctggatttgagacacagtcagctccaggacctgtctctgtagtaatccctacctcccctaccattggaagcagcacattggaactaacttctgatgtcccaggggaacccctggtccttgctcccagtgagcagaccacaatcactctccccatggcaacatggctgagtaccagtttgacagaggaaatggcttcaacagaccttgatatttcaagtccaagttcacccatgagtacatttgctatttttccacctatgtccacaccttctcatgaactttcaaagtcagaggcagataccagtgccattagaaatacagattcaacaacgttggatcagcacctaggaatcaggagtttgggcagaactggggacttaacaactgttcctatcaccccactgacaaccacgtggaccagtgtgattgaacactcaacacaagcacaggacaccctttctgcaacgatgagtcctactcacgtgacacagtcactcaaagatcaaacatctataccagcctcagcatccccttcccatcttactgaagtctaccctgagctcgggacacaagggagaagctcctctgaggcaaccactttttggaaaccatctacagacacactgtccagagagattgagactggcccaacaaacattcaatccactccacccatggacaacacaacaacagggagcagtagtagtggagtcaccctgggcatagcccaccttcccataggaacatcctccccagctgagacatccacaaacatggcactggaaagaagaagttctacagccactgtctctatggctgggacaatgggactccttgttactagtgctccaggaagaagcatcagccagtcattaggaagagtttcctctgtcctttctgagtcaactactgaaggagtcacagattctagtaagggaagcagcccaaggctgaacacacagggaaatacagctctctcctcctctcttgaacccagctatgctgaaggaagccagatgagcacaagcatccctctaacctcatctcctacaactcctgatgtggaattcatagggggcagcacattttggaccaaggaggtcaccacagttatgacctcagacatctccaagtcttcagcaaggacagagtccagctcagctacccttatgtccacagctttgggaagcactgaaaatacaggaaaagaaaaactcagaactgcctctatggatcttccatctccaactccatcaatggaggtgacaccatggatttctctcactctcagtaatgcccccaataccacagattcacttgacctcagccatggggtgcacaccagctctgcagggactttggccactgacaggtcattgaatactggtgtcactagagcctccagattggaaaacggctctgatacctcttctaagtccctgtctatgggaaacagcactcacacttccatgacttacacagagaagagtgaagtgtcttcttcaatccatccccgacctgagacctcagctcctggagcagagaccactttgacttccactcctggaaacagggccataagcttaacattgcctttttcatccattccagtggaagaagtcatttctacaggcataacctcaggaccagacatcaactcagcacccatgacacattctcccatcaccccaccaacaattgtatggaccagtacaggcacaattgaacagtccactcaaccactacatgcagtttcttcagaaaaagtttctgtgcagacacagtcaactccatatgtcaactctgtggcagtgtctgcttcccctacccatgagaattcagtctcttctggaagcagcacatcctctccatattcctcagcctcacttgaatccttggattccacaatcagtaggaggaatgcaatcacttcctggctatgggacctcactacatctctccccactacaacttggccaagtactagtttatctgaggcactgtcctcaggccattctggggtttcaaacccaagttcaactacgactgaatttccactcttttcagctgcatccacatctgctgctaagcaaagaaatccagaaacagagacccatggtccccagaatacagccgcgagtactttgaacactgatgcatcctcggtcacaggtctttctgagactcctgtgggggcaagtatcagctctgaagtccctcttccaatggccataacttctagatcagatgtttctggccttacatctgagagtactgctaacccgagtttaggcacagcctcttcagcagggaccaaattaactaggacaatatccctgcccacttcagagtctttggtttcctttagaatgaacaaggatccatggacagtgtcaatccctttggggtcccatccaactactaatacagaaacaagcatcccagtaaacagcgcaggtccacctggcttgtccacagtagcatcagatgtaattgacacaccttcagatggggctgagagtattcccactgtctccttttccccctcccctgatactgaagtgacaactatctcacatttcccagaaaagacaactcattcatttagaaccatttcatctctcactcatgagttgacttcaagagtgacacctattcctggggattggatgagttcagctatgtctacaaagcccacaggagccagtccctccattacactgggagagagaaggacaatcacctctgctgctccaaccacttcccccatagttctcactgctagtttcacagagaccagcacagtttcactggataatgaaactacagtaaaaacctcagatatccttgacgcacggaaaacaaatgagctcccctcagatagcagttcttcttctgatctgatcaacacctccatagcttcttcaactatggatgtcactaaaacagcctccatcagtcccactagcatctcaggaatgacagcaagttcctccccatctctcttctcttcagatagaccccaggttcccacatctacaacagagacaaatacagccacctctccatctgtttccagtaacacctattctcttgatgggggctccaatgtgggtggcactccatccactttaccaccctttacaatcacccaccctgtcgagacaagctcggccctattagcctggtctagaccagtaagaactttcagcaccatggtcagcactgacactgcctccggagaaaatcctacctctagcaattctgtggtgacttctgttccagcaccaggtacatggaccagtgtaggcagtactactgacttacctgccatgggctttctcaagacaagtcctgcaggagaggcacactcacttctagcatcaactattgaaccagccactgccttcactccccatctctcagcagcagtggtcactggatccagtgctacatcagaagccagtcttctcactacgagtgaaagcaaagccattcattcttcaccacagaccccaactacacccacctctggagcaaactgggaaacttcagctactcctgagagccttttggtagtcactgagacttcagacacaacacttacctcaaagattttggtcacagataccatcttgttttcaactgtgtccacgccaccttctaaatttccaagtacggggactctgtctggagcttccttccctactttactcccggacactccagccatccctctcactgccactgagccaacaagttcattagctacatcctttgattccaccccactggtgactatagcttcggatagtcttggcacagtcccagagactaccctgaccatgtcagagacctcaaatggtgatgcactggttcttaagacagtaagtaacccagataggagcatccctggaatcactatccaaggagtaacagaaagtccactccatccttcttccacttccccctctaagattgttgctccacggaatacaacctatgaaggttcgatcacagtggcactttctactttgcctgcgggaactactggttcccttgtattcagtcagagttctgaaaactcagagacaacggctttggtagactcatcagctgggcttgagagggcatctgtgatgccactaaccacaggaagccagggtatggctagctctggaggaatcagaagtgggtccactcactcaactggaaccaaaacattttcttctctccctctgaccatgaacccaggtgaggttacagccatgtctgaaatcaccacgaacagactgacagctactcaatcaacagcacccaaagggatacctgtgaagcccaccagtgctgagtcaggcctcctaacacctgtctctgcctcctcaagcccatcaaaggcctttgcctcactgactacagctcccccaacttgggggatcccacagtctaccttgacatttgagttttctgaggtcccaagtttggatactaagtccgcttctttaccaactcctggacagtccctgaacaccattccagactcagatgcaagcacagcatcttcctcactgtccaagtctccagaaaaaaacccaagggcaaggatgatgacttccacaaaggccataagtgcaagctcatttcaatcaacaggttttactgaaacccctgagggatctgcctccccttctatggcagggcatgaacccagagtccccacttcaggaacaggggaccctagatatgcctcagagagcatgtcttatccagacccaagcaaggcatcatcagctatgacatcgacctctcttgcatcaaaactcacaactctcttcagcacaggtcaagcagcaaggtctggttctagttcctctcccataagcctatccactgagaaagaaacaagcttcctttcccccactgcatccacctccagaaagacttcactatttcttgggccttccatggcaaggcagcccaacatattggtgcatcttcagacttcagctctgacactttctccaacatccactctaaatatgtcccaggaggagcctcctgagttaacctcaagccagaccattgcagaagaagagggaacaacagctgaaacacagacgttaaccttcacaccatctgagaccccaacatccttgttacctgtctcttctcccacagaacccacagccagaagaaagagttctccagaaacatgggcaagctctatttcagttcctgccaagacctccttggttgaaacaactgatggaacgctagtgaccaccataaagatgtcaagccaggcagcacaaggaaattccacgtggcctgccccagcagaggagacggggagcagtccagcaggcacatccccaggaagcccagaaatgtctaccactctcaaaatcatgagctccaaggaacccagcatcagcccagagatcaggtccactgtgagaaattctccttggaagactccagaaacaactgttcccatggagaccacagtggaaccagtcacccttcagtccacagccctaggaagtggcagcaccagcatctctcacctgcccacaggaaccacatcaccaaccaagtcaccaacagaaaatatgttggctacagaaagggtctccctctccccatccccacctgaggcttggaccaacctttattctggaactccaggagggaccaggcagtcactggccacaatgtcctctgtctccctagagtcaccaactgctagaagcatcacagggactggtcagcaaagcagtccagaactggtttcaaagacaactggaatggaattctctatgtggcatggctctactggagggaccacaggggacacacatgtctctctgagcacatcttccaatatccttgaagaccctgtaaccagcccaaactctgtgagctcattgacagataaatccaaacataaaaccgagacatgggtaagcaccacagccattccctccactgtcctgaataataagataatggcagctgaacaacagacaagtcgatctgtggatgaggcttattcatcaactagttcttggtcagatcagacatctgggagtgacatcacccttggtgcatctcctgatgtcacaaacacattatacatcacctccacagcacaaaccacctcactagtgtctctgccctctggagaccaaggcattacaagcctcaccaatccctcaggaggaaaaacaagctctgcgtcatctgtcacatctccttcaatagggcttgagactctgagggccaatgtaagtgcagtgaaaagtgacattgcccctactgctgggcatctatctcagacttcatctcctgcggaagtgagcatcctggacgtaaccacagctcctactccaggtatctccaccaccatcaccaccatgggaaccaactcaatctcaactaccacacccaacccagaagtgggtatgagtaccatggacagcaccccggccacagagaggcgcacaacttctacagaacacccttccacctggtcttccacagctgcatcagattcctggactgtcacagacatgacttcaaacttgaaagttgcaagatctcctggaacaatttccacaatgcatacaacttcattcttagcctcaagcactgaattagactccatgtctactccccatggccgtataactgtcattggaaccagcctggtcactccatcctctgatgcttcagctgtaaagacagagaccagtacaagtgaaagaacattgagtccttcagacacaactgcatctactcccatctcaactttttctcgtgtccagaggatgagcatctcagttcctgacattttaagtacaagttggactcccagtagtacagaagcagaagatgtgcctgtttcaatggtttctacagatcatgctagtacaaagactgacccaaatacgcccctgtccacttttctgtttgattctctgtccactcttgactgggacactgggagatctctgtcatcagccacagccactacctcagctcctcagggggccacaactccccaggaactcactttggaaaccatgatcagcccagctacctcacagttgcccttctctatagggcacattacaagtgcagtcacaccagctgcaatggcaaggagctctggagttactttttcaagaccagatcccacaagcaaaaaggcagagcagacttccactcagcttcccaccaccacttctgcacatccagggcaggtgcccagatcagcagcaacaactctggatgtgatcccacacacagcaaaaactccagatgcaacttttcagagacaagggcagacagctcttacaacagaggcaagagctacatctgactcctggaatgagaaagaaaaatcaaccccaagtgcaccttggatcactgagatgatgaattctgtctcagaagataccatcaaggaggttaccagctcctccagtgtattaaggaccctgaatacgctggacataaacttggaatctgggacgacttcatccccaagttggaaaagcagcccatatgagagaattgccccttctgagtccaccacagacaaagaggcaattcacccttctacaaacacagtagagaccacaggctgggtcacaagttccgaacatgcttctcattccactatcccagcccactcagcgtcatccaaactcacatctccagtggttacaacctccaccagggaacaagcaatagtttctatgtcaacaaccacatggccagagtctacaagggctagaacagagcctaattccttcttgactattgaactgagggacgtcagcccttacatggacaccagctcaaccacacaaacaagtattatctcttccccaggttccactgcgatcaccaaggggcctagaacagaaattacctcctctaagagaatatccagctcattccttgcccagtctatgaggtcgtcagacagcccctcagaagccatcaccaggctgtctaactttcctgccatgacagaatctggaggaatgatccttgctatgcaaacaagtccacctggcgctacatcactaagtgcacctactttggatacatcagccacagcctcctggacagggactccactggctacgactcagagatttacatactcagagaagaccactctctttagcaaaggtcctgaggatacatcacagccaagccctccctctgtggaagaaaccagctcttcctcttccctggtacctatccatgctacaacctcgccttccaatattttgttgacatcacaagggcacagtccctcctctactccacctgtgacctcagttttcttgtctgagacctctggcctggggaagaccacagacatgtcgaggataagcttggaacctggcacaagtttacctcccaatttgagcagtacagcaggtgaggcgttatccacttatgaagcctccagagatacaaaggcaattcatcattctgcagacacagcagtgacgaatatggaggcaaccagttctgaatattctcctatcccaggccatacaaagccatccaaagccacatctccattggttacctcccacatcatgggggacatcacttcttccacatcagtatttggctcctccgagaccacagagattgagacagtgtcctctgtgaaccagggacttcaggagagaagcacatcccaggtggccagctctgctacagagacaagcactgtcattacccatgtgtctagtggtgatgctactactcatgtcaccaagacacaagccactttctctagcggaacatccatctcaagccctcatcagtttataacttctaccaacacatttacagatgtgagcaccaacccctccacctctctgataatgacagaatcttcaggagtgaccatcaccacccaaacaggtcctactggagctgcaacacagggtccatatctcttggacacatcaaccatgccttacttgacagagactccattagctgtgactccagattttatgcaatcagagaagaccactctcataagcaaaggtcccaaggatgtgtcctggacaagccctccctctgtggcagaaaccagctatccctcttccctgacacctttcttggtcacaaccatacctcctgccacttccacgttacaagggcaacatacatcctctcctgtttctgcgacttcagttcttacctctggactggtgaagaccacagatatgttgaacacaagcatggaacctgtgaccaattcacctcaaaatttgaacaatccatcaaatgagatactggccactttggcagccaccacagatatagagactattcatccttccataaacaaagcagtgaccaatatggggactgccagttcagcacatgtactgcattccactctcccagtcagctcagaaccatctacagccacatctccaatggttcctgcctccagcatgggggacgctcttgcttctatatcaatacctggttctgagaccacagacattgagggagagccaacatcctccctgactgctggacgaaaagagaacagcaccctccaggagatgaactcaactacagagtcaaacatcatcctctccaatgtgtctgtgggggctattactgaagccacaaaaatggaagtcccctcttttgatgcaacattcataccaactcctgctcagtcaacaaagttcccagatattttctcagtagccagcagtagactttcaaactctcctcccatgacaatatctacccacatgaccaccacccagacagggtcttctggagctacatcaaagattccacttgccttagacacatcaaccttggaaacctcagcagggactccatcagtggtgactgaggggtttgcccactcaaaaataaccactgcaatgaacaatgatgtcaaggacgtgtcacagacaaaccctccctttcaggatgaagccagctctccctcttctcaagcacctgtccttgtcacaaccttaccttcttctgttgctttcacaccgcaatggcacagtacctcctctcctgtttctatgtcctcagttcttacttcttcactggtaaagaccgcaggcaaggtggatacaagcttagaaacagtgaccagttcacctcaaagtatgagcaacactttggatgacatatcggtcacttcagcagccaccacagatatagagacaacgcatccttccataaacacagtagttaccaatgtggggaccaccggttcagcatttgaatcacattctactgtctcagcttacccagagccatctaaagtcacatctccaaatgttaccacctccaccatggaagacaccacaatttccagatcaatacctaaatcctctaagactacaagaactgagactgagacaacttcctccctgactcctaaactgagggagaccagcatctcccaggagatcacctcgtccacagagacaagcactgttccttacaaagagctcactggtgccactaccgaggtatccaggacagatgtcacttcctctagcagtacatccttccctggccctgatcagtccacagtgtcactagacatctccacagaaaccaacaccaggctgtctacctccccaataatgacagaatctgcagaaataaccatcaccacccaaacaggtcctcatggggctacatcacaggatacttttaccatggacccatcaaatacaaccccccaggcagggatccactcagctatgactcatggattttcacaattggatgtgaccactcttatgagcagaattccacaggatgtatcatggacaagtcctccctctgtggataaaaccagctccccctcttcctttctgtcctcacctgcaatgaccacaccttccctgatttcttctaccttaccagaggataagctctcctctcctatgacttcacttctcacctctggcctagtgaagattacagacatattacgtacacgcttggaacctgtgaccagctcacttccaaatttcagcagcacctcagataagatactggccacttctaaagacagtaaagacacaaaggaaatttttccttctataaacacagaagagaccaatgtgaaagccaacaactctggacatgaatcccattcccctgcactggctgactcagagacacccaaagccacaactcaaatggttatcaccaccactgtgggagatccagctccttccacatcaatgccagtgcatggttcctctgagactacaaacattaagagagagccaacatatttcttgactcctagactgagagagaccagtacctctcaggagtccagctttcccacggacacaagttttctactttccaaagtccccactggtactattactgaggtctccagtacaggggtcaactcttctagcaaaatttccaccccagaccatgataagtccacagtgccacctgacaccttcacaggagagatccccagggtcttcacctcctctattaagacaaaatctgcagaaatgacgatcaccacccaagcaagtcctcctgagtctgcatcgcacagtacccttcccttggacacatcaaccacactttcccagggagggactcattcaactgtgactcagggattcccatactcagaggtgaccactctcatgggcatgggtcctgggaatgtgtcatggatgacaactccccctgtggaagaaaccagctctgtgtcttccctgatgtcttcacctgccatgacatccccttctcctgtttcctccacatcaccacagagcatcccctcctctcctcttcctgtgactgcacttcctacttctgttctggtgacaaccacagatgtgttgggcacaacaagcccagagtctgtaaccagttcacctccaaatttgagcagcatcactcatgagagaccggccacttacaaagacactgcacacacagaagccgccatgcatcattccacaaacaccgcagtgaccaatgtagggacttccgggtctggacataaatcacaatcctctgtcctagctgactcagagacatcgaaagccacacctctgatgagtaccacctccaccctgggggacacaagtgtttccacatcaactcctaatatctctcagactaaccaaattcaaacagagccaacagcatccctgagccctagactgagggagagcagcacgtctgagaagaccagctcaacaacagagacaaatactgccttttcttatgtgcccacaggtgctattactcaggcctccagaacagaaatctcctctagcagaacatccatctcagaccttgatcggcccacaatagcacccgacatctccacaggaatgatcaccaggctcttcacctcccccatcatgacaaaatctgcagaaatgaccgtcaccactcaaacaactactcctggggctacatcacagggtatccttccctgggacacatcaaccacacttttccagggagggactcattcaaccgtgtctcagggattcccacactcagagataaccactcttcggagcagaacccctggagatgtgtcatggatgacaactccccctgtggaagaaaccagctctgggttttccctgatgtcaccttccatgacatccccttctcctgtttcctccacatcaccagagagcatcccctcctctcctctccctgtgactgcacttcttacttctgttctggtgacaaccacaaatgtattgggcacaacaagcccagagcccgtaacgagttcacctccaaatttaagcagccccacacaggagagactgaccacttacaaagacactgcgcacacagaagccatgcatgcttccatgcatacaaacactgcagtggccaacgtggggacctccatttctggacatgaatcacaatcttctgtcccagctgattcacacacatccaaagccacatctccaatgggtatcaccttcgccatgggggatacaagtgtttctacatcaactcctgccttctttgagactagaattcagactgaatcaacatcctctttgattcctggattaagggacaccaggacgtctgaggagatcaacactgtgacagagaccagcactgtcctttcagaagtgcccactactactactactgaggtctccaggacagaagttatcacttccagcagaacaaccatctcagggcctgatcattccaaaatgtcaccctacatctccacagaaaccatcaccaggctctccacttttccttttgtaacaggatccacagaaatggccatcaccaaccaaacaggtcctatagggactatctcacaggctacccttaccctggacacatcaagcacagcttcctgggaagggactcactcacctgtgactcagagatttccacactcagaggagaccactactatgagcagaagtactaagggcgtgtcatggcaaagccctccctctgtggaagaaaccagttctccttcttccccagtgcctttacctgcaataacctcacattcatctctttattccgcagtatcaggaagtagccccacttctgctctccctgtgacttcccttctcacctctggcaggaggaagaccatagacatgttggacacacactcagaacttgtgaccagctccttaccaagtgcaagtagcttctcaggtgagatactcacttctgaagcctccacaaatacagagacaattcacttttcagagaacacagcagaaaccaatatggggaccaccaattctatgcataaactacattcctctgtctcaatccactcccagccatccggacacacacctccaaaggttactggatctatgatggaggacgctattgtttccacatcaacacctggttctcctgagactaaaaatgttgacagagactcaacatcccctctgactcctgaactgaaagaggacagcaccgccctggtgatgaactcaactacagagtcaaacactgttttctccagtgtgtccctggatgctgctactgaggtctccagggcagaagtcacctactatgatcctacattcatgccagcttctgctcagtcaacaaagtccccagacatttcacctgaagccagcagcagtcattctaactctcctcccttgacaatatctacacacaagaccatcgccacacaaacaggtccttctggggtgacatctcttggccaactgaccctggacacatcaaccatagccacctcagcaggaactccatcagccagaactcaggattttgtagattcagaaacaaccagtgtcatgaacaatgatctcaatgatgtgttgaagacaagccctttctctgcagaagaagccaactctctctcttctcaggcacctctccttgtgacaacctcaccttctcctgtaacttccacattgcaagagcacagtacctcctctcttgtttctgtgacctcagtacccacccctacactggcgaagatcacagacatggacacaaacttagaacctgtgactcgttcacctcaaaatttaaggaacaccttggccacttcagaagccaccacagatacacacacaatgcatccttctataaacacagcagtggccaatgtggggaccaccagttcaccaaatgaattctattttactgtctcacctgactcagacccatataaagccacatccgcagtagttatcacttccacctcgggggactcaatagtttccacatcaatgcctagatcctctgcgatgaaaaagattgagtctgagacaactttctccctgatatttagactgagggagactagcacctcccagaaaattggctcatcctcagacacaagcacggtctttgacaaagcattcactgctgctactactgaggtctccagaacagaactcacctcctctagcagaacatccatccaaggcactgaaaagcccacaatgtcaccggacacctccacaagatctgtcaccatgctttctacttttgctggcctgacaaaatccgaagaaaggaccattgccacccaaacaggtcctcatagggcgacatcacagggtacccttacctgggacacatcaatcacaacctcacaggcagggacccactcagctatgactcatggattttcacaattagatttgtccactcttacgagtagagttcctgagtacatatcagggacaagcccaccctctgtggaaaaaaccagctcttcctcttcccttctgtctttaccagcaataacctcaccgtcccctgtacctactacattaccagaaagtaggccgtcttctcctgttcatctgacttcactccccacctctggcctagtgaagaccacagatatgctggcatctgtggccagtttacctccaaacttgggcagcacctcacataagataccgactacttcagaagacattaaagatacagagaaaatgtatccttccacaaacatagcagtaaccaatgtggggaccaccacttctgaaaaggaatcttattcgtctgtcccagcctactcagaaccacccaaagtcacctctccaatggttacctctttcaacataagggacaccattgtttccacatccatgcctggctcctctgagattacaaggattgagatggagtcaacattctccctggctcatgggctgaagggaaccagcacctcccaggaccccatcgtatccacagagaaaagtgctgtccttcacaagttgaccactggtgctactgagacctctaggacagaagttgcctcttctagaagaacatccattccaggccctgatcattccacagagtcaccagacatctccactgaagtgatccccagcctgcctatctcccttggcattacagaatcttcaaatatgaccatcatcactcgaacaggtcctcctcttggctctacatcacagggcacatttaccttggacacaccaactacatcctccagggcaggaacacactcgatggcgactcaggaatttccacactcagaaatgaccactgtcatgaacaaggaccctgagattctatcatggacaatccctccttctatagagaaaaccagcttctcctcttccctgatgccttcaccagccatgacttcacctcctgtttcctcaacattaccaaagaccattcacaccactccttctcctatgacctcactgctcacccctagcctagtgatgaccacagacacattgggcacaagcccagaacctacaaccagttcacctccaaatttgagcagtacctcacatgagatactgacaacagatgaagacaccacagctatagaagccatgcatccttccacaagcacagcagcgactaatgtggaaaccaccagttctggacatgggtcacaatcctctgtcctagctgactcagaaaaaaccaaggccacagctccaatggataccacctccaccatggggcatacaactgtttccacatcaatgtctgtttcctctgagactacaaaaattaagagagagtcaacatattccttgactcctggactgagagagaccagcatttcccaaaatgccagcttttccactgacacaagtattgttctttcagaagtccccactggtactactgctgaggtctccaggacagaagtcacctcctctggtagaacatccatccctggcccttctcagtccacagttttgccagaaatatccacaagaacaatgacaaggctctttgcctcgcccaccatgacagaatcagcagaaatgaccatccccactcaaacaggtccttctgggtctacctcacaggatacccttaccttggacacatccaccacaaagtcccaggcaaagactcattcaactttgactcagagatttccacactcagagatgaccactctcatgagcagaggtcctggagatatgtcatggcaaagctctccctctctggaaaatcccagctctctcccttccctgctgtctttacctgccacaacctcacctcctcccatttcctccacattaccagtgactatctcctcctctcctcttcctgtgacttcacttctcacctctagcccggtaacgaccacagacatgttacacacaagcccagaacttgtaaccagttcacctccaaagctgagccacacttcagatgagagactgaccactggcaaggacaccacaaatacagaagctgtgcatccttccacaaacacagcagcgtccaatgtggagattcccagctctggacatgaatccccttcctctgccttagctgactcagagacatccaaagccacatcaccaatgtttattacctccacccaggaggatacaactgttgccatatcaacccctcacttcttggagactagcagaattcagaaagagtcaatttcctccctgagccctaaattgagggagacaggcagttctgtggagacaagctcagccatagagacaagtgctgtcctttctgaagtgtccattggtgctactactgagatctccaggacagaagtcacctcctctagcagaacatccatctctggttctgctgagtccacaatgttgccagaaatatccaccacaagaaaaatcattaagttccctacttcccccatcctggcagaatcatcagaaatgaccatcaagacccaaacaagtcctcctgggtctacatcagagagtacctttacattagacacatcaaccactccctccttggtaataacccattcgactatgactcagagattgccacactcagagataaccactcttgtgagtagaggtgctggggatgtgccacggcccagctctctccctgtggaagaaacaagccctccatcttcccagctgtctttatctgccatgatctcaccttctcctgtttcttccacattaccagcaagtagccactcctcttctgcttctgtgacttcacttctcacaccaggccaagtgaagactactgaggtgttggacgcaagtgcagaacctgaaaccagttcacctccaagtttgagcagcacctcagttgaaatactggccacctctgaagtcaccacagatacggagaaaattcatcctttctcaaacacggcagtaaccaaagttggaacttccagttctggacatgaatccccttcctctgtcctacctgactcagagacaaccaaagccacatcggcaatgggtaccatctccattatgggggatacaagtgtttctacattaactcctgccttatctaacactaggaaaattcagtcagagccagcttcctcactgaccaccagattgagggagaccagcacctctgaagagaccagcttagccacagaagcaaacactgttctttctaaagtgtccactggtgctactactgaggtctccaggacagaagccatctcctttagcagaacatccatgtcaggccctgagcagtccacaatgtcacaagacatctccataggaaccatccccaggatttctgcctcctctgtcctgacagaatctgcaaaaatgaccatcacaacccaaacaggtccttcggagtctacactagaaagtacccttaatttgaacacagcaaccacaccctcttgggtggaaacccactctatagtaattcagggatttccacacccagagatgaccacttccatgggcagaggtcctggaggtgtgtcatggcctagccctccctttgtgaaagaaaccagccctccatcctccccgctgtctttacctgccgtgacctcacctcatcctgtttccaccacattcctagcacatatccccccctctccccttcctgtgacttcacttctcacctctggcccggcgacaaccacagatatcttgggtacaagcacagaacctggaaccagttcatcttcaagtttgagcaccacctcccatgagagactgaccacttacaaagacactgcacatacagaagccgtgcatccttccacaaacacaggagggaccaatgtggcaaccaccagctctggatataaatcacagtcctctgtcctagctgactcatctccaatgtgtaccacctccaccatgggggatacaagtgttctcacatcaactcctgccttccttgagactaggaggattcagacagagctagcttcctccctgacccctggattgagggagtccagcggctctgaagggaccagctcaggcaccaagatgagcactgtcctctctaaagtgcccactggtgctactactgagatctccaaggaagacgtcacctccatcccaggtcccgctcaatccacaatatcaccagacatctccacaagaaccgtcagctggttctctacatcccctgtcatgacagaatcagcagaaataaccatgaacacccatacaagtcctttaggggccacaacacaaggcaccagtactttggacacgtcaagcacaacctctttgacaatgacacactcaactatatctcaaggattttcacactcacagatgagcactcttatgaggaggggtcctgaggatgtatcatggatgagccctccccttctggaaaaaactagaccttccttttctctgatgtcttcaccagccacaacttcaccttctcctgtttcctccacattaccagagagcatctcttcctctcctcttcctgtgacttcactcctcacgtctggcttggcaaaaactacagatatgttgcacaaaagctcagaacctgtaaccaactcacctgcaaatttgagcagcacctcagttgaaatactggccacctctgaagtcaccacagatacagagaaaactcatccttcttcaaacagaacagtgaccgatgtggggacctccagttctggacatgaatccacttcctttgtcctagctgactcacagacatccaaagtcacatctccaatggttattacctccaccatggaggatacgagtgtctccacatcaactcctggcttttttgagactagcagaattcagacagaaccaacatcctccctgacccttggactgagaaagaccagcagctctgaggggaccagcttagccacagagatgagcactgtcctttctggagtgcccactggtgccactgctgaagtctccaggacagaagtcacctcctctagcagaacatccatctcaggctttgctcagctcacagtgtcaccagagacttccacagaaaccatcaccagactccctacctccagcataatgacagaatcagcagaaatgatgatcaagacacaaacagatcctcctgggtctacaccagagagtactcatactgtggacatatcaacaacacccaactgggtagaaacccactcgactgtgactcagagattttcacactcagagatgaccactcttgtgagcagaagccctggtgatatgttatggcctagtcaatcctctgtggaagaaaccagctctgcctcttccctgctgtctctgcctgccacgacctcaccttctcctgtttcctctacattagtagaggatttcccttccgcttctcttcctgtgacttctcttctcaaccctggcctggtgataaccacagacaggatgggcataagcagagaacctggaaccagttccacttcaaatttgagcagcacctcccatgagagactgaccactttggaagacactgtagatacagaagacatgcagccttccacacacacagcagtgaccaacgtgaggacctccatttctggacatgaatcacaatcttctgtcctatctgactcagagacacccaaagccacatctccaatgggtaccacctacaccatgggggaaacgagtgtttccatatccacttctgacttctttgagaccagcagaattcagatagaaccaacatcctccctgacttctggattgagggagaccagcagctctgagaggatcagctcagccacagagggaagcactgtcctttctgaagtgcccagtggtgctaccactgaggtctccaggacagaagtgatatcctctaggggaacatccatgtcagggcctgatcagttcaccatatcaccagacatctctactgaagcgatcaccaggctttctacttcccccattatgacagaatcagcagaaagtgccatcactattgagacaggttctcctggggctacatcagagggtaccctcaccttggacacctcaacaacaaccttttggtcagggacccactcaactgcatctccaggattttcacactcagagatgaccactcttatgagtagaactcctggagatgtgccatggccgagccttccctctgtggaagaagccagctctgtctcttcctcactgtcttcacctgccatgacctcaacttcttttttctccacattaccagagagcatctcctcctctcctcatcctgtgactgcacttctcacccttggcccagtgaagaccacagacatgttgcgcacaagctcagaacctgaaaccagttcacctccaaatttgagcagcacctcagctgaaatattagccacgtctgaagtcaccaaagatagagagaaaattcatccctcctcaaacacacctgtagtcaatgtagggactgtgatttataaacatctatccccttcctctgttttggctgacttagtgacaacaaaacccacatctccaatggctaccacctccactctggggaatacaagtgtttccacatcaactcctgccttcccagaaactatgatgacacagccaacttcctccctgacttctggattaagggagatcagtacctctcaagagaccagctcagcaacagagagaagtgcttctctttctggaatgcccactggtgctactactaaggtctccagaacagaagccctctccttaggcagaacatccaccccaggtcctgctcaatccacaatatcaccagaaatctccacggaaaccatcactagaatttctactcccctcaccacgacaggatcagcagaaatgaccatcacccccaaaacaggtcattctggggcatcctcacaaggtacctttaccttggacacatcaagcagagcctcctggccaggaactcactcagctgcaactcacagatctccacactcagggatgaccactcctatgagcagaggtcctgaggatgtgtcatggccaagccgcccatcagtggaaaaaactagccctccatcttccctggtgtctttatctgcagtaacctcaccttcgccactttattccacaccatctgagagtagccactcatctcctctccgggtgacttctcttttcacccctgtcatgatgaagaccacagacatgttggacacaagcttggaacctgtgaccacttcacctcccagtatgaatatcacctcagatgagagtctggccacttctaaagccaccatggagacagaggcaattcagctttcagaaaacacagctgtgactcagatgggcaccatcagcgctagacaagaattctattcctcttatccaggcctcccagagccatccaaagtgacatctccagtggtcacctcttccaccataaaagacattgtttctacaaccatacctgcttcctctgagataacaagaattgagatggagtcaacatccaccctgacccccacaccaagggagaccagcacctcccaggagatccactcagccacaaagccaagcactgttccttacaaggcactcactagtgccacgattgaggactccatgacacaagtcatgtcctctagcagaggacctagccctgatcagtccacaatgtcacaagacatatccactgaagtgatcaccaggctctctacctcccccatcaagacagaatctacagaaatgaccattaccacccaaacaggttctcctggggctacatcaaggggtacccttaccttggacacttcaacaacttttatgtcagggacccactcaactgcatctcaaggattttcacactcacagatgaccgctcttatgagtagaactcctggagatgtgccatggctaagccatccctctgtggaagaagccagctctgcctctttctcactgtcttcacctgtcatgacctcatcttctcccgtttcttccacattaccagacagcatccactcttcttcgcttcctgtgacatcacttctcacctcagggctggtgaagaccacagagctgttgggcacaagctcagaacctgaaaccagttcacccccaaatttgagcagcacctcagctgaaatactggccatcactgaagtcactacagatacagagaaactggagatgaccaatgtggtaacctcaggttatacacatgaatctccttcctctgtcctagctgactcagtgacaacaaaggccacatcttcaatgggtatcacctaccccacaggagatacaaatgttctcacatcaacccctgccttctctgacaccagtaggattcaaacaaagtcaaagctctcactgactcctgggttgatggagaccagcatctctgaagagaccagctctgccacagaaaaaagcactgtcctttctagtgtgcccactggtgctactactgaggtctccaggacagaagccatctcttctagcagaacatccatcccaggccctgctcaatccacaatgtcatcagacacctccatggaaaccatcactagaatttctacccccctcacaaggaaagaatcaacagacatggccatcacccccaaaacaggtccttctggggctacctcgcagggtacctttaccttggactcatcaagcacagcctcctggccaggaactcactcagctacaactcagagatttccacagtcagtggtgacaactcctatgagcagaggtcctgaggatgtgtcatggccaagcccgctgtctgtggaaaaaaacagccctccatcttccctggtatcttcatcttcagtaacctcaccttcgccactttattccacaccatctgggagtagccactcctctcctgtccctgtcacttctcttttcacctctatcatgatgaaggccacagacatgttggatgcaagtttggaacctgagaccacttcagctcccaatatgaatatcacctcagatgagagtctggccgcttctaaagccaccacggagacagaggcaattcacgtttttgaaaatacagcagcgtcccatgtggaaaccaccagtgctacagaggaactctattcctcttccccaggcttctcagagccaacaaaagtgatatctccagtggtcacctcttcctctataagagacaacatggtttccacaacaatgcctggctcctctggcattacaaggattgagatagagtcaatgtcatctctgacccctggactgagggagaccagaacctcccaggacatcacctcatccacagagacaagcactgtcctttacaagatgccctctggtgccactcctgaggtctccaggacagaagttatgccctctagcagaacatccattcctggccctgctcagtccacaatgtcactagacatctccgatgaagttgtcaccaggctgtctacctctcccatcatgacagaatctgcagaaataaccatcaccacccaaacaggttattctctggctacatcccaggttacccttcccttgggcacctcaatgacctttttgtcagggacccactcaactatgtctcaaggactttcacactcagagatgaccaatcttatgagcaggggtcctgaaagtctgtcatggacgagccctcgctttgtggaaacaactagatcttcctcttctctgacatcattacctctcacgacctcactttctcctgtgtcctccacattactagacagtagcccctcctctcctcttcctgtgacttcacttatcctcccaggcctggtgaagactacagaagtgttggatacaagctcagagcctaaaaccagttcatctccaaatttgagcagcacctcagttgaaataccggccacctctgaaatcatgacagatacagagaaaattcatccttcctcaaacacagcggtggccaaagtgaggacctccagttctgttcatgaatctcattcctctgtcctagctgactcagaaacaaccataaccataccttcaatgggtatcacctccgctgtggacgataccactgttttcacatcaaatcctgccttctctgagactaggaggattccgacagagccaacattctcattgactcctggattcagggagactagcacctctgaagagaccacctcaatcacagaaacaagtgcagtcctttatggagtgcccactagtgctactactgaagtctccatgacagaaatcatgtcctctaatagaatacacatccctgactctgatcagtccacgatgtctccagacatcatcactgaagtgatcaccaggctctcttcctcatccatgatgtcagaatcaacacaaatgaccatcaccacccaaaaaagttctcctggggctacagcacagagtactcttaccttggccacaacaacagcccccttggcaaggacccactcaactgttcctcctagatttttacactcagagatgacaactcttatgagtaggagtcctgaaaatccatcatggaagagctctctctttgtggaaaaaactagctcttcatcttctctgttgtccttacctgtcacgacctcaccttctgtttcttccacattaccgcagagtatcccttcctcctctttttctgtgacttcactcctcaccccaggcatggtgaagactacagacacaagcacagaacctggaaccagtttatctccaaatctgagtggcacctcagttgaaatactggctgcctctgaagtcaccacagatacagagaaaattcatccttcttcaagcatggcagtgaccaatgtgggaaccaccagttctggacatgaactatattcctctgtttcaatccactcggagccatccaaggctacatacccagtgggtactccctcttccatggctgaaacctctatttccacatcaatgcctgctaattttgagaccacaggatttgaggctgagccattttctcatttgacttctggatttaggaagacaaacatgtccctggacaccagctcagtcacaccaacaaatacaccttcttctcctgggtccactcaccttttacagagttccaagactgatttcacctcttctgcaaaaacatcatccccagactggcctccagcctcacagtatactgaaattccagtggacataatcaccccctttaatgcttctccatctattacggagtccactgggataacctccttcccagaatccaggtttactatgtctgtaacagaaagtactcatcatctgagtacagatttgctgccttcagctgagactatttccactggcacagtgatgccttctctatcagaggccatgacttcatttgccaccactggagttccacgagccatctcaggttcaggtagtccattctctaggacagagtcaggccctggggatgctactctgtccaccattgcagagagcctgccttcatccactcctgtgccattctcctcttcaaccttcactaccactgattcttcaaccatcccagccctccatgagataacttcctcttcagctaccccatatagagtggacaccagtcttgggacagagagcagcactactgaaggacgcttggttatggtcagtactttggacacttcaagccaaccaggcaggacatcttcatcacccattttggataccagaatgacagagagcgttgagctgggaacagtgacaagtgcttatcaagttccttcactctcaacacggttgacaagaactgatggcattatggaacacatcacaaaaatacccaatgaagcagcacacagaggtaccataagaccagtcaaaggccctcagacatccacttcgcctgccagtcctaaaggactacacacaggagggacaaaaagaatggagaccaccaccacagctctgaagaccaccaccacagctctgaagaccacttccagagccaccttgaccaccagtgtctatactcccactttgggaacactgactcccctcaatgcatcaatgcaaatggccagcacaatccccacagaaatgatgatcacaaccccatatgttttccctgatgttccagaaacgacatcctcattggctaccagcctgggagcagaaaccagcacagctcttcccaggacaaccccatctgttttcaatagagaatcagagaccacagcctcactggtctctcgttctggggcagagagaagtccggttattcaaactctagatgtttcttctagtgagccagatacaacagcttcatgggttatccatcctgcagagaccatcccaactgtttccaagacaacccccaattttttccacagtgaattagacactgtatcttccacagccaccagtcatggggcagacgtcagctcagccattccaacaaatatctcacctagtgaactagatgcactgaccccactggtcactatttcggggacagatactagtacaacattcccaacactgactaagtccccacatgaaacagagacaagaaccacatggctcactcatcctgcagagaccagctcaactattcccagaacaatccccaatttttctcatcatgaatcagatgccacaccttcaatagccaccagtcctggggcagaaaccagttcagctattccaattatgactgtctcacctggtgcagaagatctggtgacctcacaggtcactagttctgggacagacagaaatatgactattccaactttgactctttctcctggtgaaccaaagacgatagcctcattagtcacccatcctgaagcacagacaagttcggccattccaacttcaactatctcgcctgctgtatcacggttggtgacctcaatggtcaccagtttggcggcaaagacaagtacaactaatcgagctctgacaaactcccctggtgaaccagctacaacagtttcattggtcacgcatcctgcacagaccagcccaacagttccctggacaacttccatttttttccatagtaaatcagacaccacaccttcaatgacca

SEQ ID NO: 155583 - DNA, 4078 bp, Homo sapiens
  Payload ID: 10590
  Gene Symbol: MUC16
  Gene Name: mucin 16, cell surface associated
  ENST ID: ENST00000601404
  CDS Start-End: 1-3674
ccaccggccctctcctggtgccattcacactcaacttcaccatcactaacctacagtatgaggagaacatgggtcaccctggctccaggaagttcaacatcacggagagtgttctgcagggtctgctcaagcccttgttcaagagcaccagtgttggccctctgtattctggctgcagactgaccttgctcaggcctgagaaggatggagtagccaccagagtggacgccatctgcacccaccgccctgaccccaaaatccctgggctagacagacagcagctatactgggagctgagccagctgacccacagcatcactgagctgggaccctacaccctggatagggacagtctctatgtcaatggtttcacccagcggagctctgtgcccaccaccagcactcctgggactttcacagtacagccggaaacctctgagactccatcatccctccctggccccacagccactggccctgtcctgctgccattcaccctcaattttaccatcactaacctgcagtatgaggaggacatgcgtcgccctggctccaggaagttcaacaccacggagagggtccttcagggtctgcttatgcccttgttcaagaacaccagtgtcagctctctgtactctggttgcagactgaccttgctcaggcctgagaaggatggggcagccaccagagtggatgctgtctgcacccatcgtcctgaccccaaaagccctggactggacagagagcggctgtactggaagctgagccagctgacccacggcatcactgagctgggcccctacaccctggacaggcacagtctctatgtcaatggtttcacccatcagagctctatgacgaccaccagaactcctgatacctccacaatgcacctggcaacctcgagaactccagcctccctgtctggacccatgaccgccagccctctcctggtgctattcacaattaacttcaccatcactaacctgcggtatgaggagaacatgcatcaccctggctctagaaagtttaacaccacggagagagtccttcagggtctgctcaggcctgtgttcaagaacaccagtgttggccctctgtactctggctgcagactgaccttgctcaggcccaagaaggatggggcagccaccaaagtggatgccatctgcacctaccgccctgatcccaaaagccctggactggacagagagcagctatactgggagctgagccagctgacccacagcatcactgagctgggcccctacaccctggacagggacagtctctatgtcaatggtttcacacagcggagctctgtgcccaccactagcattcctgggacccccacagtggacctgggaacatctgggactccagtttctaaacctggtccctcggctgccagccctctcctggtgctattcactctcaacttcaccatcaccaacctgcggtatgaggagaacatgcagcaccctggctccaggaagttcaacaccacggagagggtccttcagggcctgctcaggtccctgttcaagagcaccagtgttggccctctgtactctggctgcagactgactttgctcaggcctgaaaaggatgggacagccactggagtggatgccatctgcacccaccaccctgaccccaaaagccctaggctggacagagagcagctgtattgggagctgagccagctgacccacaatatcactgagctgggcccctatgccctggacaacgacagcctctttgtcaatggtttcactcatcggagctctgtgtccaccaccagcactgccagccatctcctgatactattcaccctcaacttcaccatcactaacctgcggtatgaggagaacatgtggcctggctccaggaagttcaacactacagagagggtccttcagggcctgctaaggcccttgttcaagaacaccagtgttggccctctgtactctggctgcaggctgaccttgctcaggccagagaaagatggggaagccaccggagtggatgccatctgcacccaccgccctgaccccacaggccctgggctggacagagagcagctgtatttggagctgagccagctgacccacagcatcactgagctgggcccctacacactggacagggacagtctctatgtcaatggtttcacccatcggagctctgtacccaccaccagcaccggggtggtcagcgaggagccattcacactgaacttcaccatcaacaacctgcgctacatggcggacatgggccaacccggctccctcaagttcaacatcacagacaacgtcatgcagcacctgctcagtcctttgttccagaggagcagcctgggtgcacggtacacaggctgcagggtcatcgcactaaggtctgtgaagaacggtgctgagacacgggtggacctcctctgcacctacctgcagcccctcagcggcccaggtctgcctatcaagcaggtgttccatgagctgagccagcagacccatggcatcacccggctgggcccctactctctggacaaagacagcctctaccttaacggttacaatgaacctggtccagatgagcctcctacaactcccaagccagccaccacattcctgcctcctctgtcagaagccacaacagccatggggtaccacctgaagaccctcacactcaacttcaccatctccaatctccagtattcaccagatatgggcaagggctcagctacattcaactccaccgagggggtccttcagcacctgctcagacccttgttccagaagagcagcatgggccccttctacttgggttgccaactgatctccctcaggcctgagaaggatggggcagccactggtgtggacaccacctgcacctaccaccctgaccctgtgggccccgggctggacatacagcagctttactgggagctgagtcagctgacccatggtgtcacccaactgggcttctatgtcctggacagggatagcctcttcatcaatggctatgcaccccagaatttatcaatccggggcgagtaccagataaatttccacattgtcaactggaacctcagtaatccagaccccacatcctcagagtacatcaccctgctgagggacatccaggacaaggtcaccacactctacaaaggcagtcaactacatgacacattccgcttctgcctggtcaccaacttgacgatggactccgtgttggtcactgtcaaggcattgttctcctccaatttggaccccagcctggtggagcaagtctttctagataagaccctgaatgcctcattccattggctgggctccacctaccagttggtggacatccatgtgacagaaatggagtcatcagtttatcaaccaacaagcagctccagcacccagcacttctacctgaatttcaccatcaccaacctaccatattcccaggacaaagcccagccaggcaccaccaattaccagaggaacaaaaggaatattgaggatgcggtgagaagggggtgctcaaccaactcttccgaaacagcagcatcaagagttatttttctgactgtcaagtttcaacattcaggtctgtccccaacaggcaccacaccggggtggactccctgtgtaacttctcgccactggctcggagagtagacagagttgccatctatgaggaatttctgcggatgacccggaatggtacccagctgcagaacttcaccctggacaggagcagtgtccttgtggatgggtattctcccaacagaaatgagcccttaactgggaattctgaccttcccttctgggctgtcatcctcatcggcttggcaggactcctgggagtcatcacatgcctgatctgcggtgtcctggtgaccacccgccggcggaagaaggaaggagaatacaacgtccagcaacagtgcccaggctactaccagtcacacctagacctggaggatctgcaatgactggaacttgccggtgcctggggtgcctttcccccagccagggtccaaagaagcttggctggggcagaaataaaccatattggtcgg

SEQ ID NO: 155584 - DNA, 4079 bp, Homo sapiens
  Payload ID: 10590
  Gene Symbol: MUC16
  Gene Name: mucin 16, cell surface associated
  ENST ID: ENST00000599436
  CDS Start-End: 1-3992
ccaccggccctctcctggtgccattcacactcaacttcaccatcactaacctacagtatgaggagaacatgggtcaccctggctccaggaagttcaacatcacggagagtgttctgcagggtctgctcaagcccttgttcaagagcaccagtgttggccctctgtattctggctgcagactgaccttgctcaggcctgagaaggatggagtagccaccagagtggacgccatctgcacccaccgccctgaccccaaaatccctgggctagacagacagcagctatactgggagctgagccagctgacccacagcatcactgagctgggaccctacaccctggatagggacagtctctatgtcaatggtttcacccagcggagctctgtgcccaccaccagcactcctgggactttcacagtacagccggaaacctctgagactccatcatccctccctggccccacagccactggccctgtcctgctgccattcaccctcaattttaccatcactaacctgcagtatgaggaggacatgcgtcgccctggctccaggaagttcaacaccacggagagggtccttcagggtctgcttatgcccttgttcaagaacaccagtgtcagctctctgtactctggttgcagactgaccttgctcaggcctgagaaggatggggcagccaccagagtggatgctgtctgcacccatcgtcctgaccccaaaagccctggactggacagagagcggctgtactggaagctgagccagctgacccacggcatcactgagctgggcccctacaccctggacaggcacagtctctatgtcaatggtttcacccatcagagctctatgacgaccaccagaactcctgatacctccacaatgcacctggcaacctcgagaactccagcctccctgtctggacccatgaccgccagccctctcctggtgctattcacaattaacttcaccatcactaacctgcggtatgaggagaacatgcatcaccctggctctagaaagtttaacaccacggagagagtccttcagggtctgctcaggcctgtgttcaagaacaccagtgttggccctctgtactctggctgcagactgaccttgctcaggcccaagaaggatggggcagccaccaaagtggatgccatctgcacctaccgccctgatcccaaaagccctggactggacagagagcagctatactgggagctgagccagctgacccacagcatcactgagctgggcccctacaccctggacagggacagtctctatgtcaatggtttcacacagcggagctctgtgcccaccactagcattcctgggacccccacagtggacctgggaacatctgggactccagtttctaaacctggtccctcggctgccagccctctcctggtgctattcactctcaacttcaccatcaccaacctgcggtatgaggagaacatgcagcaccctggctccaggaagttcaacaccacggagagggtccttcagggcctgctcaggtccctgttcaagagcaccagtgttggccctctgtactctggctgcagactgactttgctcaggcctgaaaaggatgggacagccactggagtggatgccatctgcacccaccaccctgaccccaaaagccctaggctggacagagagcagctgtattgggagctgagccagctgacccacaatatcactgagctgggcccctatgccctggacaacgacagcctctttgtcaatggtttcactcatcggagctctgtgtccaccaccagcactcctgggacccccacagtgtatctgggagcatctaagactccagcctcgatatttggcccttcagctgccagccatctcctgatactattcaccctcaacttcaccatcactaacctgcggtatgaggagaacatgtggcctggctccaggaagttcaacactacagagagggtccttcagggcctgctaaggcccttgttcaagaacaccagtgttggccctctgtactctggctgcaggctgaccttgctcaggccagagaaagatggggaagccaccggagtggatgccatctgcacccaccgccctgaccccacaggccctgggctggacagagagcagctgtatttggagctgagccagctgacccacagcatcactgagctgggcccctacacactggacagggacagtctctatgtcaatggtttcacccatcggagctctgtacccaccaccagcaccggggtggtcagcgaggagccattcacactgaacttcaccatcaacaacctgcgctacatggcggacatgggccaacccggctccctcaagttcaacatcacagacaacgtcatgcagcacctgctcagtcctttgttccagaggagcagcctgggtgcacggtacacaggctgcagggtcatcgcactaaggtctgtgaagaacggtgctgagacacgggtggacctcctctgcacctacctgcagcccctcagcggcccaggtctgcctatcaagcaggtgttccatgagctgagccagcagacccatggcatcacccggctgggcccctactctctggacaaagacagcctctaccttaacggttacaatgaacctggtccagatgagcctcctacaaccatggggtaccacctgaagaccctcacactcaacttcaccatctccaatctccagtattcaccagatatgggcaagggctcagctacattcaactccaccgagggggtccttcagcacctgctcagacccttgttccagaagagcagcatgggccccttctacttgggttgccaactgatctccctcaggcctgagaaggatggggcagccactggtgtggacaccacctgcacctaccaccctgaccctgtgggccccgggctggacatacagcagctttactgggagctgagtcagctgacccatggtgtcacccaactgggcttctatgtcctggacagggatagcctcttcatcaatggctatgcaccccagaatttatcaatccggggcgagtaccagataaatttccacattgtcaactggaacctcagtaatccagaccccacatcctcagagtacatcaccctgctgagggacatccaggacaaggtcaccacactctacaaaggcagtcaactacatgacacattccgcttctgcctggtcaccaacttgacgatggactccgtgttggtcactgtcaaggcattgttctcctccaatttggaccccagcctggtggagcaagtctttctagataagaccctgaatgcctcattccattggctgggctccacctaccagttggtggacatccatgtgacagaaatggagtcatcagtttatcaaccaacaagcagctccagcacccagcacttctacctgaatttcaccatcaccaacctaccatattcccaggacaaagcccagccaggcaccaccaattaccagaggaacaaaaggaatattgaggatgcgctcaaccaactcttccgaaacagcagcatcaagagttatttttctgactgtcaagtttcaacattcaggtctgtccccaacaggcaccacaccggggtggactccctgtgtaacttctcgccactggctcggagagtagacagagttgccatctatgaggaatttctgcggatgacccggaatggtacccagctgcagaacttcaccctggacaggagcagtgtccttgtggatgggtattctcccaacagaaatgagcccttaactgggaattctgaccttcccttctgggctgtcatcctcatcggcttggcaggactcctgggagtcatcacatgcctgatctgcggtgtcctggtgaccacccgccggcggaagaaggaaggagaatacaacgtccagcaacagtgcccaggctactaccagtcacacctagacctggaggatctgcaatgactggaacttgccggtgcctggggtgcctttcccccagccagggtccaaagaagcttggctggggcagaaataaaccatattggtcgg

SEQ ID NO: 155585 - DNA, 2888 bp, Homo sapiens
  Payload ID: 10590
  Gene Symbol: MUC16
  Gene Name: mucin 16, cell surface associated
  ENST ID: ENST00000596768
  CDS Start-End: 1-2011
gcctgagaaggatggggcagccaccagagtggatgctgtctgcacccatcgtcctgaccccaaaagccctggactggacagagagcggctgtactggaagctgagccagctgacccacggcatcactgagctgggcccctacaccctggacaggcacagtctctatgtcaatggtttcacccatcagagctctatgacgaccaccagaactcctgatacctccacaatgcacctggcaacctcgagaactccagcctccctgtctggacccatgaccgccagccctctcctggtgctattcacaattaacttcaccatcactaacctgcggtatgaggagaacatgcatcaccctggctctagaaagtttaacaccacggagagagtccttcagggtctgctcaggcctgtgttcaagaacaccagtgttggccctctgtactctggctgcagactgaccttgctcaggcccaagaaggatggggcagccaccaaagtggatgccatctgcacctaccgccctgatcccaaaagccctggactggacagagagcagctatactgggagctgagccagctgacccacagcatcactgagctgggcccctacaccctggacagggacagtctctatgtcaatggtttcacacagcggagctctgtgcccaccactagcattcctgggacccccacagtggacctgggaacatctgggactccagtttctaaacctggtccctcggctgccagccctctcctggtgctattcactctcaacttcaccatcaccaacctgcggtatgaggagaacatgcagcaccctggctccaggaagttcaacaccacggagagggtccttcagggcctgctcaggtccctgttcaagagcaccagtgttggccctctgtactctggctgcagactgactttgctcaggcctgaaaaggatgggacagccactggagtggatgccatctgcacccaccaccctgaccccaaaagccctaggctggacagagagcagctgtattgggagctgagccagctgacccacaatatcactgagctgggcccctatgccctggacaacgacagcctctttgtcaatggtttcactcatcggagctctgtgtccaccaccagcactcctgggacccccacagtgtatctgggagcatctaagactccagcctcgatatttggcccttcagctgccagccatctcctgatactattcaccctcaacttcaccatcactaacctgcggtatgaggagaacatgtggcctggctccaggaagttcaacactacagagagggtccttcagggcctgctaaggcccttgttcaagaacaccagtgttggccctctgtactctggctgcaggctgaccttgctcaggccagagaaagatggggaagccaccggagtggatgccatctgcacccaccgccctgaccccacaggccctgggctggacagagagcagctgtatttggagctgagccagctgacccacagcatcactgagctgggcccctacacactggacagggacagtctctatgtcaatggtttcacccatcggagctctgtacccaccaccagcaccggggtggtcagcgaggagccattcacactgaacttcaccatcaacaacctgcgctacatggcggacatgggccaacccggctccctcaagttcaacatcacagacaacgtcatgcagcacctgctcagtcctttgttccagaggagcagcctgggtgcacggtacacaggctgcagggtcatcgcactaaggtctgtgaagaacggtgctgagacacgggtggacctcctctgcacctacctgcagcccctcagcggcccaggtctgcctatcaagcaggtgttccatgagctgagccagcagacccatggcatcacccggctgggcccctactctctggacaaagacagcctctaccttaacggtcaccacactctacaaaggcagtcaactacatgacacattccgcttctgcctggtcaccaacttgacgatggactccgtgttggtcactgtcaaggcattgttctcctccaatttggaccccagcctggtggagcaagtctttctagataagaccctgaatgcctcattccattggctgggctccacctaccagttggtggacatccatgtgacagaaatggagtcatcagtttatcaaccaacaagcagctccagcacccagcacttctacctgaatttcaccatcaccaacctaccatattcccaggacaaagcccagccaggcaccaccaattaccagaggaacaaaaggaatattgaggatgcgctcaaccaactcttccgaaacagcagcatcaagagttatttttctgactgtcaagtttcaacattcaggtctgtccccaacaggcaccacaccggggtggactccctgtgtaacttctcgccactggctcggagagtagacagagttgccatctatgaggaatttctgcggatgacccggaatggtacccagctgcagaacttcaccctggacaggagcagtgtccttgtggatgggtattctcccaacagaaatgagcccttaactgggaattctgaccttcccttctgggctgtcatcctcatcggcttggcaggactcctgggagtcatcacatgcctgatctgcggtgtcctggtgaccacccgccggcggaagaaggaaggagaatacaacgtccagcaacagtgcccaggctactaccagtcacacctagacctggaggatctgcaatgactggaacttgccggtgcctggggtgcctttcccccagccagggtccaaagaagcttggctggggcagaaataaaccatattggtcgg

SEQ ID NO: 155586 - DNA, 14247 bp, Homo sapiens
  Payload ID: 10591
  Gene Symbol: MUC17
  Gene Name: mucin 17, cell surface associated
  Uniprot ID: Q685J3
  ENST ID: ENST00000306151
  CDS Start-End: 65-13546
tctgaggctcatttcgccagctcctctgggggtgacaggcaagtgagacgtgctcagagctccgatgccaaggccagggaccatggcgctgtgtctgctgaccttggtcctctcgctcttgcccccacaagctgctgcagaacaggacctcagtgtgaacagggctgtgtgggatggaggagggtgcatctcccaaggggacgtcttgaaccgtcagtgccagcagctgtctcagcacgttaggacaggttctgcggcaaacaccgccacaggtacaacatctacaaatgtcgtggagccaagaatgtatttgagttgcagcaccaaccctgagatgacctcgattgagtccagtgtgacttcagacactcctggtgtctccagtaccaggatgacaccaacagaatccagaacaacttcagaatctaccagtgacagcaccacacttttccccagttctactgaagacacttcatctcctacaactcctgaaggcaccgacgtgcccatgtcaacaccaagtgaagaaagcatttcatcaacaatggcttttgtcagcactgcacctcttcccagttttgaggcctacacatctttaacatataaggttgatatgagcacacctctgaccacttctactcaggcaagttcatctcctactactcctgaaagcaccaccatacccaaatcaactaacagtgaaggaagcactccattaacaagtatgcctgccagcaccatgaaggtggccagttcagaggctatcacccttttgacaactcctgttgaaatcagcacacctgtgaccatttctgctcaagccagttcatctcctacaactgctgaaggtcccagcctgtcaaactcagctcctagtggaggaagcactccattaacaagaatgcctctcagcgtgatgctggtggtcagttctgaggctagcaccctttcaacaactcctgctgccaccaacattcctgtgatcacttctactgaagccagttcatctcctacaacggctgaaggcaccagcataccaacctcaacttatactgaaggaagcactccattaacaagtacgcctgccagcaccatgccggttgccacttctgaaatgagcacactttcaataactcctgttgacaccagcacacttgtgaccacttctactgaacccagttcacttcctacaactgctgaagctaccagcatgctaacctcaactcttagtgaaggaagcactccattaacaaatatgcctgtcagcaccatattggtggccagttctgaggctagcaccacttcaacaattcctgttgactccaaaacttttgtgaccactgctagtgaagccagctcatctcccacaactgctgaagataccagcattgcaacctcaactcctagtgaaggaagcactccattaacaagtatgcctgtcagcaccactccagtggccagttctgaggctagcaacctttcaacaactcctgttgactccaaaactcaggtgaccacttctactgaagccagttcatctcctccaactgctgaagttaacagcatgccaacctcaactcctagtgaaggaagcactccattaacaagtatgtctgtcagcaccatgccggtggccagttctgaggctagcaccctttcaacaactcctgttgacaccagcacacctgtgaccacttctagtgaagccagttcatcttctacaactcctgaaggtaccagcataccaacctcaactcctagtgaaggaagcactccattaacaaacatgcctgtcagcaccaggctggtggtcagttctgaggctagcaccacttcaacaactcctgctgactccaacacttttgtgaccacttctagtgaagctagttcatcttctacaactgctgaaggtaccagcatgccaacctcaacttacagtgaaagaggcactacaataacaagtatgtctgtcagcaccacactggtggccagttctgaggctagcaccctttcaacaactcctgttgactccaacactcctgtgaccacttcaactgaagccacttcatcttctacaactgcggaaggtaccagcatgccaacctcaacttatactgaaggaagcactccattaacaagtatgcctgtcaacaccacactggtggccagttctgaggctagcaccctttcaacaactcctgttgacaccagcacacctgtgaccacttcaactgaagccagttcctctcctacaactgctgatggtgccagtatgccaacctcaactcctagtgaaggaagcactccattaacaagtatgcctgtcagcaaaacgctgttgaccagttctgaggctagcaccctttcaacaactcctcttgacacaagcacacatatcaccacttctactgaagccagttgctctcctacaaccactgaaggtaccagcatgccaatctcaactcctagtgaaggaagtcctttattaacaagtatacctgtcagcatcacaccggtgaccagtcctgaggctagcaccctttcaacaactcctgttgactccaacagtcctgtgaccacttctactgaagtcagttcatctcctacacctgctgaaggtaccagcatgccaacctcaacttatagtgaaggaagaactcctttaacaagtatgcctgtcagcaccacactggtggccacttctgcaatcagcaccctttcaacaactcctgttgacaccagcacacctgtgaccaattctactgaagcccgttcgtctcctacaacttctgaaggtaccagcatgccaacctcaactcctggggaaggaagcactccattaacaagtatgcctgacagcaccacgccggtagtcagttctgaggctagaacactttcagcaactcctgttgacaccagcacacctgtgaccacttctactgaagccacttcatctcctacaactgctgaaggtaccagcataccaacctcgactcctagtgaaggaacgactccattaacaagcacacctgtcagccacacgctggtggccaattctgaggctagcaccctttcaacaactcctgttgactccaacactcctttgaccacttctactgaagccagttcacctcctcccactgctgaaggtaccagcatgccaacctcaactcctagtgaaggaagcactccattaacacgtatgcctgtcagcaccacaatggtggccagttctgaaacgagcacactttcaacaactcctgctgacaccagcacacctgtgaccacttattctcaagccagttcatcttctacaactgctgacggtaccagcatgccaacctcaacttatagtgaaggaagcactccactaacaagtgtgcctgtcagcaccaggctggtggtcagttctgaggctagcaccctttccacaactcctgtcgacaccagcatacctgtcaccacttctactgaagccagttcatctcctacaactgctgaaggtaccagcataccaacctcacctcccagtgaaggaaccactccgttagcaagtatgcctgtcagcaccacgctggtggtcagttctgaggctaacaccctttcaacaactcctgtggactccaaaactcaggtggccacttctactgaagccagttcacctcctccaactgctgaagttaccagcatgccaacctcaactcctggagaaagaagcactccattaacaagtatgcctgtcagacacacgccagtggccagttctgaggctagcaccctttcaacatctcccgttgacaccagcacacctgtgaccacttctgctgaaaccagttcctctcctacaaccgctgaaggtaccagcttgccaacctcaactactagtgaaggaagtactctattaacaagtatacctgtcagcaccacgctggtgaccagtcctgaggctagcacccttttaacaactcctgttgacactaaaggtcctgtggtcacttctaatgaagtcagttcatctcctacacctgctgaaggtaccagcatgccaacctcaacttatagtgaaggaagaactcctttaacaagtatacctgtcaacaccacactggtggccagttctgcaatcagcatcctttcaacaactcctgttgacaacagcacacctgtgaccacttctactgaagcctgttcatctcctacaacttctgaaggtaccagcatgccaaactcaaatcctagtgaaggaaccactccgttaacaagtatacctgtcagcaccacgccggtagtcagttctgaggctagcaccctttcagcaactcctgttgacaccagcacccctgggaccacttctgctgaagccacttcatctcctacaactgctgaaggtatcagcataccaacctcaactcctagtgaaggaaagactccattaaaaagtatacctgtcagcaacacgccggtggccaattctgaggctagcaccctttcaacaactcctgttgactctaacagtcctgtggtcacttctacagcagtcagttcatctcctacacctgctgaaggtaccagcatagcaatctcaacgcctagtgaaggaagcactgcattaacaagtatacctgtcagcaccacaacagtggccagttctgaaatcaacagcctttcaacaactcctgctgtcaccagcacacctgtgaccacttattctcaagccagttcatctcctacaactgctgacggtaccagcatgcaaacctcaacttatagtgaaggaagcactccactaacaagtttgcctgtcagcaccatgctggtggtcagttctgaggctaacaccctttcaacaacccctattgactccaaaactcaggtgaccgcttctactgaagccagttcatctacaaccgctgaaggtagcagcatgacaatctcaactcctagtgaaggaagtcctctattaacaagtatacctgtcagcaccacgccggtggccagtcctgaggctagcaccctttcaacaactcctgttgactccaacagtcctgtgatcacttctactgaagtcagttcatctcctacacctgctgaaggtaccagcatgccaacctcaacttatactgaaggaagaactcctttaacaagtataactgtcagaacaacaccggtggccagctctgcaatcagcaccctttcaacaactcccgttgacaacagcacacctgtgaccacttctactgaagcccgttcatctcctacaacttctgaaggtaccagcatgccaaactcaactcctagtgaaggaaccactccattaacaagtatacctgtcagcaccacgccggtactcagttctgaggctagcaccctttcagcaactcctattgacaccagcacccctgtgaccacttctactgaagccacttcgtctcctacaactgctgaaggtaccagcataccaacctcgactcttagtgaaggaatgactccattaacaagcacacctgtcagccacacgctggtggccaattctgaggctagcaccctttcaacaactcctgttgactctaacagtcctgtggtcacttctacagcagtcagttcatctcctacacctgctgaaggtaccagcatagcaacctcaacgcctagtgaaggaagcactgcattaacaagtatacctgtcagcaccacaacagtggccagttctgaaaccaacaccctttcaacaactcccgctgtcaccagcacacctgtgaccacttatgctcaagtcagttcatctcctacaactgctgacggtagcagcatgccaacctcaactcctagggaaggaaggcctccattaacaagtatacctgtcagcaccacaacagtggccagttctgaaatcaacaccctttcaacaactcttgctgacaccaggacacctgtgaccacttattctcaagccagttcatctcctacaactgctgatggtaccagcatgccaaccccagcttatagtgaaggaagcactccactaacaagtatgcctctcagcaccacgctggtggtcagttctgaggctagcactctttccacaactcctgttgacaccagcactcctgccaccacttctactgaaggcagttcatctcctacaactgcaggaggtaccagcatacaaacctcaactcctagtgaacggaccactccattagcaggtatgcctgtcagcactacgcttgtggtcagttctgagggtaacaccctttcaacaactcctgttgactccaaaactcaggtgaccaattctactgaagccagttcatctgcaaccgctgaaggtagcagcatgacaatctcagctcctagtgaaggaagtcctctactaacaagtatacctctcagcaccacgccggtggccagtcctgaggctagcaccctttcaacaactcctgttgactccaacagtcctgtgatcacttctactgaagtcagttcatctcctatacctactgaaggtaccagcatgcaaacctcaacttatagtgacagaagaactcctttaacaagtatgcctgtcagcaccacagtggtggccagttctgcaatcagcaccctttcaacaactcctgttgacaccagcacacctgtgaccaattctactgaagcccgttcatctcctacaacttctgaaggtaccagcatgccaacctcaactcctagtgaaggaagcactccattcacaagtatgcctgtcagcaccatgccggtagttacttctgaggctagcaccctttcagcaactcctgttgacaccagcacacctgtgaccacttctactgaagccacttcatctcctacaactgctgaaggtaccagcataccaacttcaactcttagtgaaggaacgactccattaacaagtatacctgtcagccacacgctggtggccaattctgaggttagcaccctttcaacaactcctgttgactccaacactcctttcactacttctactgaagccagttcacctcctcccactgctgaaggtaccagcatgccaacctcaacttctagtgaaggaaacactccattaacacgtatgcctgtcagcaccacaatggtggccagttttgaaacaagcacactttctacaactcctgctgacaccagcacacctgtgactacttattctcaagccggttcatctcctacaactgctgacgatactagcatgccaacctcaacttatagtgaaggaagcactccactaacaagtgtgcctgtcagcaccatgccggtggtcagttctgaggctagcacccattccacaactcctgttgacaccagcacacctgtcaccacttctactgaagccagttcatctcctacaactgctgaaggtaccagcataccaacctcacctcctagtgaaggaaccactccgttagcaagtatgcctgtcagcaccacgccggtggtcagttctgaggctggcaccctttccacaactcctgttgacaccagcacacctatgaccacttctactgaagccagttcatctcctacaactgctgaagatatcgtcgtgccaatctcaactgctagtgaaggaagtactctattaacaagtatacctgtcagcaccacgccagtggccagtcctgaggctagcaccctttcaacaactcctgttgactccaacagtcctgtggtcacttctactgaaatcagttcatctgctacatccgctgaaggtaccagcatgcctacctcaacttatagtgaaggaagcactccattaagaagtatgcctgtcagcaccaagccgttggccagttctgaggctagcactctttcaacaactcctgttgacaccagcatacctgtcaccacttctactgaaaccagttcatctcctacaactgcaaaagataccagcatgccaatctcaactcctagtgaagtaagtacttcattaacaagtatacttgtcagcaccatgccagtggccagttctgaggctagcaccctttcaacaactcctgttgacaccaggacacttgtgaccacttccactggaaccagttcatctcctacaactgctgaaggtagcagcatgccaacctcaactcctggtgaaagaagcactccattaacaaatatacttgtcagcaccacgctgttggccaattctgaggctagcaccctttcaacaactcctgttgacaccagcacacctgtcaccacttctgctgaagccagttcttctcctacaactgctgaaggtaccagcatgcgaatctcaactcctagtgatggaagtactccattaacaagtatacttgtcagcaccctgccagtggccagttctgaggctagcaccgtttcaacaactgctgttgacaccagcatacctgtcaccacttctactgaagccagttcctctcctacaactgctgaagttaccagcatgccaacctcaactcctagtgaaacaagtactccattaactagtatgcctgtcaaccacacgccagtggccagttctgaggctggcaccctttcaacaactcctgttgacaccagcacacctgtgaccacttctactaaagccagttcatctcctacaactgctgaaggtatcgtcgtgccaatctcaactgctagtgaaggaagtactctattaacaagtatacctgtcagcaccacgccggtggccagttctgaggctagcaccctttcaacaactcctgttgataccagcatacctgtcaccacttctactgaaggcagttcttctcctacaactgctgaaggtaccagcatgccaatctcaactcctagtgaagtaagtactccattaacaagtatacttgtcagcaccgtgccagtggccggttctgaggctagcaccctttcaacaactcctgttgacaccaggacacctgtcaccacttctgctgaagctagttcttctcctacaactgctgaaggtaccagcatgccaatctcaactcctggcgaaagaagaactccattaacaagtatgtctgtcagcaccatgccggtggccagttctgaggctagcaccctttcaagaactcctgctgacaccagcacacctgtgaccacttctactgaagccagttcctctcctacaactgctgaaggtaccggcataccaatctcaactcctagtgaaggaagtactccattaacaagtatacctgtcagcaccacgccagtggccattcctgaggctagcaccctttcaacaactcctgttgactccaacagtcctgtggtcacttctactgaagtcagttcatctcctacacctgctgaaggtaccagcatgccaatctcaacttatagtgaaggaagcactccattaacaggtgtgcctgtcagcaccacaccggtgaccagttctgcaatcagcaccctttcaacaactcctgttgacaccagcacacctgtgaccacttctactgaagcccattcatctcctacaacttctgaaggtaccagcatgccaacctcaactcctagtgaaggaagtactccattaacatatatgcctgtcagcaccatgctggtagtcagttctgaggatagcaccctttcagcaactcctgttgacaccagcacacctgtgaccacttctactgaagccacttcatctacaactgctgaaggtaccagcattccaacctcaactcctagtgaaggaatgactccattaactagtgtacctgtcagcaacacgccggtggccagttctgaggctagcatcctttcaacaactcctgttgactccaacactcctttgaccacttctactgaagccagttcatctcctcccactgctgaaggtaccagcatgccaacctcaactcctagtgaaggaagcactccattaacaagtatgcctgtcagcaccacaacggtggccagttctgaaacgagcaccctttcaacaactcctgctgacaccagcacacctgtgaccacttattctcaagccagttcatctcctccaattgctgacggtactagcatgccaacctcaacttatagtgaaggaagcactccactaacaaatatgtctttcagcaccacgccagtggtcagttctgaggctagcaccctttccacaactcctgttgacaccagcacacctgtcaccacttctactgaagccagtttatctcctacaactgctgaaggtaccagcataccaacctcaagtcctagtgaaggaaccactccattagcaagtatgcctgtcagcaccacgccggtggtcagttctgaggttaacaccctttcaacaactcctgtggactccaacactctggtgaccacttctactgaagccagttcatctcctacaatcgctgaaggtaccagcttgccaacctcaactactagtgaaggaagcactccattatcaattatgcctctcagtaccacgccggtggccagttctgaggctagcaccctttcaacaactcctgttgacaccagcacacctgtgaccacttcttctccaaccaattcatctcctacaactgctgaagttaccagcatgccaacatcaactgctggtgaaggaagcactccattaacaaatatgcctgtcagcaccacaccggtggccagttctgaggctagcaccctttcaacaactcctgttgactccaacacttttgttaccagttctagtcaagccagttcatctccagcaactcttcaggtcaccactatgcgtatgtctactccaagtgaaggaagctcttcattaacaactatgctcctcagcagcacatatgtgaccagttctgaggctagcacaccttccactccttctgttgacagaagcacacctgtgaccacttctactcagagcaattctactcctacacctcctgaagttatcaccctgccaatgtcaactcctagtgaagtaagcactccattaaccattatgcctgtcagcaccacatcggtgaccatttctgaggctggcacagcttcaacacttcctgttgacaccagcacacctgtgatcacttctacccaagtcagttcatctcctgtgactcctgaaggtaccaccatgccaatctggacgcctagtgaaggaagcactccattaacaactatgcctgtcagcaccacacgtgtgaccagctctgagggtagcaccctttcaacaccttctgttgtcaccagcacacctgtgaccacttctactgaagccatttcatcttctgcaactcttgacagcaccaccatgtctgtgtcaatgcccatggaaataagcacccttgggaccactattcttgtcagtaccacacctgttacgaggtttcctgagagtagcaccccttccataccatctgtttacaccagcatgtctatgaccactgcctctgaaggcagttcatctcctacaactcttgaaggcaccaccaccatgcctatgtcaactacgagtgaaagaagcactttattgacaactgtcctcatcagccctatatctgtgatgagtccttctgaggccagcacactttcaacacctcctggtgataccagcacacctttgctcacctctaccaaagccggttcattctccatacctgctgaagtcactaccatacgtatttcaattaccagtgaaagaagcactccattaacaactctccttgtcagcaccacacttccaactagctttcctggggccagcatagcttcgacacctcctcttgacacaagcacaacttttaccccttctactgacactgcctcaactcccacaattcctgtagccaccaccatatctgtatcagtgatcacagaaggaagcacacctgggacaaccatttttattcccagcactcctgtcaccagttctactgctgatgtctttcctgcaacaactggtgctgtatctacccctgtgataacttccactgaactaaacacaccatcaacctccagtagtagtaccaccacatctttttcaactactaaggaatttacaacacccgcaatgactactgcagctcccctcacatatgtgaccatgtctactgcccccagcacacccagaacaaccagcagaggctgcactacttctgcatcaacgctttctgcaaccagtacacctcacacctctacttctgtcaccacccgtcctgtgaccccttcatcagaatccagcaggccgtcaacaattacttctcacaccatcccacctacatttcctcctgctcactccagtacacctccaacaacctctgcctcctccacgactgtgaaccctgaggctgtcaccaccatgaccaccaggacaaaacccagcacacggaccacttccttccccacggtgaccaccaccgctgtccccacgaatactacaattaagagcaaccccacctcaactcctactgtgccaagaaccacaacatgctttggagatgggtgccagaatacggcctctcgctgcaagaatggaggcacctgggatgggctcaagtgccagtgtcccaacctctattatggggagttgtgtgaggaggtggtcagcagcattgacatagggccaccggagactatctctgcccaaatggaactgactgtgacagtgaccagtgtgaagttcaccgaagagctaaaaaaccactcttcccaggaattccaggagttcaaacagacattcacggaacagatgaatattgtgtattccgggatccctgagtatgtcggggtgaacatcacaaagctacgtcttggcagtgtggtggtggagcatgacgtcctcctaagaaccaagtacacaccagaatacaagacagtattggacaatgccaccgaagtagtgaaagagaaaatcacaaaagtgaccacacagcaaataatgattaatgatatttgctcagacatgatgtgtttcaacaccactggcacccaagtgcaaaacattacggtgacccagtacgaccctgaagaggactgccggaagatggccaaggaatatggagactacttcgtagtggagtaccgggaccagaagccatactgcatcagcccctgtgagcctggcttcagtgtctccaagaactgtaacctcggcaagtgccagatgtctctaagtggacctcagtgcctctgcgtgaccacggaaactcactggtacagtggggagacctgtaaccagggcacccagaagagtctggtgtacggcctcgtgggggcaggggtcgtgctgatgctgatcatcctggtagctctcctgatgctcgttttccgctccaagagagaggtgaaacggcaaaagtacagattgtctcagttatacaagtggcaagaagaggacagtggaccagctcctgggaccttccaaaacattggctttgacatctgccaagatgatgattccatccacctggagtccatctatagtaatttccagccctccttgagacacatagaccctgaaacaaagatccgaattcagaggcctcaggtaatgacgacatcattttaaggcatggagctgagaagtctgggagtgaggagatcccagtccggctaagcttggtggagcattttcccattgagagccttccatgggaactcaatgttcccattgtaagtacaggaaacaagccctgtacttaccaaggagaaagaggagagacagcagtgctgggagattctcaaatagaaacccgtggacgctccaatgggcttgtcatgatatcaggctaggctttcctgctcatttttcaaagacgctccagatttgagggtactctgactgcaacatctttcaccccattgatcgccaggattgatttggttgatctggctgagcaggcgggtgtccccgtcctccctcactgccccatatgtgtccctcctaaagctgcatgctcagttgaagaggacgagaggacgaccttctctgatagaggaggaccacgcttcagtcaaaggcatacaagtatctatctggacttccctgctagcacttccaaacaagctcagagatgttcctcccctcatctgcccgggttcagtaccatggacagcgccctcgacccgctgtttacaaccatgaccccttggacactggactgcatgcactttacatatcacaaaatgctctcataagaattattgcataccatcttcatgaaaaacacctgtatttaaatatagagcatttaccttttggtatataag

SEQ ID NO: 155587 - DNA, 14089 bp, Homo sapiens
  Payload ID: 10591
  Gene Symbol: MUC17
  Gene Name: mucin 17, cell surface associated
  ENST ID: ENST00000379439
  CDS Start-End: 65-12853
tctgaggctcatttcgccagctcctctgggggtgacaggcaagtgagacgtgctcagagctccgatgccaaggccagggaccatggcgctgtgtctgctgaccttggtcctctcgctcttgcccccacaagctgctgcagaacaggacctcagtgtgaacagggctgtgtgggatggaggagggtgcatctcccaaggggacgtcttgaaccgtcagtgccagcagctgtctcagcacgttaggacaggttctgcggcaaacaccgccacaggtacaacatctacaaatgtcgtggagccaagaatgtatttgagttgcagcaccaaccctgagatgacctcgattgagtccagtgtgacttcagacactcctggtgtctccagtaccaggatgacaccaacagaatccagaacaacttcagaatctaccagtgacagcaccacacttttccccagttctactgaagacacttcatctcctacaactcctgaaggcaccgacgtgcccatgtcaacaccaagtgaagaaagcatttcatcaacaatggcttttgtcagcactgcacctcttcccagttttgaggcctacacatctttaacatataaggttgatatgagcacacctctgaccacttctactcaggcaagttcatctcctactactcctgaaagcaccaccatacccaaatcaactaacagtgaaggaagcactccattaacaagtatgcctgccagcaccatgaaggtggccagttcagaggctatcacccttttgacaactcctgttgaaatcagcacacctgtgaccatttctgctcaagccagttcatctcctacaactgctgaaggtcccagcctgtcaaactcagctcctagtggaggaagcactccattaacaagaatgcctctcagcgtgatgctggtggtcagttctgaggctagcaccctttcaacaactcctgctgccaccaacattcctgtgatcacttctactgaagccagttcatctcctacaacggctgaaggcaccagcataccaacctcaacttatactgaaggaagcactccattaacaagtacgcctgccagcaccatgccggttgccacttctgaaatgagcacactttcaataactcctgttgacaccagcacacttgtgaccacttctactgaacccagttcacttcctacaactgctgaagctaccagcatgctaacctcaactcttagtgaaggaagcactccattaacaaatatgcctgtcagcaccatattggtggccagttctgaggctagcaccacttcaacaattcctgttgactccaaaacttttgtgaccactgctagtgaagccagctcatctcccacaactgctgaagataccagcattgcaacctcaactcctagtgaaggaagcactccattaacaagtatgcctgtcagcaccactccagtggccagttctgaggctagcaacctttcaacaactcctgttgactccaaaactcaggtgaccacttctactgaagccagttcatctcctccaactgctgaagttaacagcatgccaacctcaactcctagtgaaggaagcactccattaacaagtatgtctgtcagcaccatgccggtggccagttctgaggctagcaccctttcaacaactcctgttgacaccagcacacctgtgaccacttctagtgaagccagttcatcttctacaactcctgaaggtaccagcataccaacctcaactcctagtgaaggaagcactccattaacaaacatgcctgtcagcaccaggctggtggtcagttctgaggctagcaccacttcaacaactcctgctgactccaacacttttgtgaccacttctagtgaagctagttcatcttctacaactgctgaaggtaccagcatgccaacctcaacttacagtgaaagaggcactacaataacaagtatgtctgtcagcaccacactggtggccagttctgaggctagcaccctttcaacaactcctgttgactccaacactcctgtgaccacttcaactgaagccacttcatcttctacaactgcggaaggtaccagcatgccaacctcaacttatactgaaggaagcactccattaacaagtatgcctgtcaacaccacactggtggccagttctgaggctagcaccctttcaacaactcctgttgacaccagcacacctgtgaccacttcaactgaagccagttcctctcctacaactgctgatggtgccagtatgccaacctcaactcctagtgaaggaagcactccattaacaagtatgcctgtcagcaaaacgctgttgaccagttctgaggctagcaccctttcaacaactcctcttgacacaagcacacatatcaccacttctactgaagccagttgctctcctacaaccactgaaggtaccagcatgccaatctcaactcctagtgaaggaagtcctttattaacaagtatacctgtcagcatcacaccggtgaccagtcctgaggctagcaccctttcaacaactcctgttgactccaacagtcctgtgaccacttctactgaagtcagttcatctcctacacctgctgaaggtaccagcatgccaacctcaacttatagtgaaggaagaactcctttaacaagtatgcctgtcagcaccacactggtggccacttctgcaatcagcaccctttcaacaactcctgttgacaccagcacacctgtgaccaattctactgaagcccgttcgtctcctacaacttctgaaggtaccagcatgccaacctcaactcctggggaaggaagcactccattaacaagtatgcctgacagcaccacgccggtagtcagttctgaggctagaacactttcagcaactcctgttgacaccagcacacctgtgaccacttctactgaagccacttcatctcctacaactgctgaaggtaccagcataccaacctcgactcctagtgaaggaacgactccattaacaagcacacctgtcagccacacgctggtggccaattctgaggctagcaccctttcaacaactcctgttgactccaacactcctttgaccacttctactgaagccagttcacctcctcccactgctgaaggtaccagcatgccaacctcaactcctagtgaaggaagcactccattaacacgtatgcctgtcagcaccacaatggtggccagttctgaaacgagcacactttcaacaactcctgctgacaccagcacacctgtgaccacttattctcaagccagttcatcttctacaactgctgacggtaccagcatgccaacctcaacttatagtgaaggaagcactccactaacaagtgtgcctgtcagcaccaggctggtggtcagttctgaggctagcaccctttccacaactcctgtcgacaccagcatacctgtcaccacttctactgaagccagttcatctcctacaactgctgaaggtaccagcataccaacctcacctcccagtgaaggaaccactccgttagcaagtatgcctgtcagcaccacgctggtggtcagttctgaggctaacaccctttcaacaactcctgtggactccaaaactcaggtggccacttctactgaagccagttcacctcctccaactgctgaagttaccagcatgccaacctcaactcctggagaaagaagcactccattaacaagtatgcctgtcagacacacgccagtggccagttctgaggctagcaccctttcaacatctcccgttgacaccagcacacctgtgaccacttctgctgaaaccagttcctctcctacaaccgctgaaggtaccagcttgccaacctcaactactagtgaaggaagtactctattaacaagtatacctgtcagcaccacgctggtgaccagtcctgaggctagcacccttttaacaactcctgttgacactaaaggtcctgtggtcacttctaatgaagtcagttcatctcctacacctgctgaaggtaccagcatgccaacctcaacttatagtgaaggaagaactcctttaacaagtatacctgtcaacaccacactggtggccagttctgcaatcagcatcctttcaacaactcctgttgacaacagcacacctgtgaccacttctactgaagcctgttcatctcctacaacttctgaaggtaccagcatgccaaactcaaatcctagtgaaggaaccactccgttaacaagtatacctgtcagcaccacgccggtagtcagttctgaggctagcaccctttcagcaactcctgttgacaccagcacccctgggaccacttctgctgaagccacttcatctcctacaactgctgaaggtatcagcataccaacctcaactcctagtgaaggaaagactccattaaaaagtatacctgtcagcaacacgccggtggccaattctgaggctagcaccctttcaacaactcctgttgactctaacagtcctgtggtcacttctacagcagtcagttcatctcctacacctgctgaaggtaccagcatagcaatctcaacgcctagtgaaggaagcactgcattaacaagtatacctgtcagcaccacaacagtggccagttctgaaatcaacagcctttcaacaactcctgctgtcaccagcacacctgtgaccacttattctcaagccagttcatctcctacaactgctgacggtaccagcatgcaaacctcaacttatagtgaaggaagcactccactaacaagtttgcctgtcagcaccatgctggtggtcagttctgaggctaacaccctttcaacaacccctattgactccaaaactcaggtgaccgcttctactgaagccagttcatctacaaccgctgaaggtagcagcatgacaatctcaactcctagtgaaggaagtcctctattaacaagtatacctgtcagcaccacgccggtggccagtcctgaggctagcaccctttcaacaactcctgttgactccaacagtcctgtgatcacttctactgaagtcagttcatctcctacacctgctgaaggtaccagcatgccaacctcaacttatactgaaggaagaactcctttaacaagtataactgtcagaacaacaccggtggccagctctgcaatcagcaccctttcaacaactcccgttgacaacagcacacctgtgaccacttctactgaagcccgttcatctcctacaacttctgaaggtaccagcatgccaaactcaactcctagtgaaggaaccactccattaacaagtatacctgtcagcaccacgccggtactcagttctgaggctagcaccctttcagcaactcctattgacaccagcacccctgtgaccacttctactgaagccacttcgtctcctacaactgctgaaggtaccagcataccaacctcgactcttagtgaaggaatgactccattaacaagcacacctgtcagccacacgctggtggccaattctgaggctagcaccctttcaacaactcctgttgactctaacagtcctgtggtcacttctacagcagtcagttcatctcctacacctgctgaaggtaccagcatagcaacctcaacgcctagtgaaggaagcactgcattaacaagtatacctgtcagcaccacaacagtggccagttctgaaaccaacaccctttcaacaactcccgctgtcaccagcacacctgtgaccacttatgctcaagtcagttcatctcctacaactgctgacggtagcagcatgccaacctcaactcctagggaaggaaggcctccattaacaagtatacctgtcagcaccacaacagtggccagttctgaaatcaacaccctttcaacaactcttgctgacaccaggacacctgtgaccacttattctcaagccagttcatctcctacaactgctgatggtaccagcatgccaaccccagcttatagtgaaggaagcactccactaacaagtatgcctctcagcaccacgctggtggtcagttctgaggctagcactctttccacaactcctgttgacaccagcactcctgccaccacttctactgaaggcagttcatctcctacaactgcaggaggtaccagcatacaaacctcaactcctagtgaacggaccactccattagcaggtatgcctgtcagcactacgcttgtggtcagttctgagggtaacaccctttcaacaactcctgttgactccaaaactcaggtgaccaattctactgaagccagttcatctgcaaccgctgaaggtagcagcatgacaatctcagctcctagtgaaggaagtcctctactaacaagtatacctctcagcaccacgccggtggccagtcctgaggctagcaccctttcaacaactcctgttgactccaacagtcctgtgatcacttctactgaagtcagttcatctcctatacctactgaaggtaccagcatgcaaacctcaacttatagtgacagaagaactcctttaacaagtatgcctgtcagcaccacagtggtggccagttctgcaatcagcaccctttcaacaactcctgttgacaccagcacacctgtgaccaattctactgaagcccgttcatctcctacaacttctgaaggtaccagcatgccaacctcaactcctagtgaaggaagcactccattcacaagtatgcctgtcagcaccatgccggtagttacttctgaggctagcaccctttcagcaactcctgttgacaccagcacacctgtgaccacttctactgaagccacttcatctcctacaactgctgaaggtaccagcataccaacttcaactcttagtgaaggaacgactccattaacaagtatacctgtcagccacacgctggtggccaattctgaggttagcaccctttcaacaactcctgttgactccaacactcctttcactacttctactgaagccagttcacctcctcccactgctgaaggtaccagcatgccaacctcaacttctagtgaaggaaacactccattaacacgtatgcctgtcagcaccacaatggtggccagttttgaaacaagcacactttctacaactcctgctgacaccagcacacctgtgactacttattctcaagccggttcatctcctacaactgctgacgatactagcatgccaacctcaacttatagtgaaggaagcactccactaacaagtgtgcctgtcagcaccatgccggtggtcagttctgaggctagcacccattccacaactcctgttgacaccagcacacctgtcaccacttctactgaagccagttcatctcctacaactgctgaaggtaccagcataccaacctcacctcctagtgaaggaaccactccgttagcaagtatgcctgtcagcaccacgccggtggtcagttctgaggctggcaccctttccacaactcctgttgacaccagcacacctatgaccacttctactgaagccagttcatctcctacaactgctgaagatatcgtcgtgccaatctcaactgctagtgaaggaagtactctattaacaagtatacctgtcagcaccacgccagtggccagtcctgaggctagcaccctttcaacaactcctgttgactccaacagtcctgtggtcacttctactgaaatcagttcatctgctacatccgctgaaggtaccagcatgcctacctcaacttatagtgaaggaagcactccattaagaagtatgcctgtcagcaccaagccgttggccagttctgaggctagcactctttcaacaactcctgttgacaccagcatacctgtcaccacttctactgaaaccagttcatctcctacaactgcaaaagataccagcatgccaatctcaactcctagtgaagtaagtacttcattaacaagtatacttgtcagcaccatgccagtggccagttctgaggctagcaccctttcaacaactcctgttgacaccaggacacttgtgaccacttccactggaaccagttcatctcctacaactgctgaaggtagcagcatgccaacctcaactcctggtgaaagaagcactccattaacaaatatacttgtcagcaccacgctgttggccaattctgaggctagcaccctttcaacaactcctgttgacaccagcacacctgtcaccacttctgctgaagccagttcttctcctacaactgctgaaggtaccagcatgcgaatctcaactcctagtgatggaagtactccattaacaagtatacttgtcagcaccctgccagtggccagttctgaggctagcaccgtttcaacaactgctgttgacaccagcatacctgtcaccacttctactgaagccagttcctctcctacaactgctgaagttaccagcatgccaacctcaactcctagtgaaacaagtactccattaactagtatgcctgtcaaccacacgccagtggccagttctgaggctggcaccctttcaacaactcctgttgacaccagcacacctgtgaccacttctactaaagccagttcatctcctacaactgctgaaggtatcgtcgtgccaatctcaactgctagtgaaggaagtactctattaacaagtatacctgtcagcaccacgccggtggccagttctgaggctagcaccctttcaacaactcctgttgataccagcatacctgtcaccacttctactgaaggcagttcttctcctacaactgctgaaggtaccagcatgccaatctcaactcctagtgaagtaagtactccattaacaagtatacttgtcagcaccgtgccagtggccggttctgaggctagcaccctttcaacaactcctgttgacaccaggacacctgtcaccacttctgctgaagctagttcttctcctacaactgctgaaggtaccagcatgccaatctcaactcctggcgaaagaagaactccattaacaagtatgtctgtcagcaccatgccggtggccagttctgaggctagcaccctttcaagaactcctgctgacaccagcacacctgtgaccacttctactgaagccagttcctctcctacaactgctgaaggtaccggcataccaatctcaactcctagtgaaggaagtactccattaacaagtatacctgtcagcaccacgccagtggccattcctgaggctagcaccctttcaacaactcctgttgactccaacagtcctgtggtcacttctactgaagtcagttcatctcctacacctgctgaaggtaccagcatgccaatctcaacttatagtgaaggaagcactccattaacaggtgtgcctgtcagcaccacaccggtgaccagttctgcaatcagcaccctttcaacaactcctgttgacaccagcacacctgtgaccacttctactgaagcccattcatctcctacaacttctgaaggtaccagcatgccaacctcaactcctagtgaaggaagtactccattaacatatatgcctgtcagcaccatgctggtagtcagttctgaggatagcaccctttcagcaactcctgttgacaccagcacacctgtgaccacttctactgaagccacttcatctacaactgctgaaggtaccagcattccaacctcaactcctagtgaaggaatgactccattaactagtgtacctgtcagcaacacgccggtggccagttctgaggctagcatcctttcaacaactcctgttgactccaacactcctttgaccacttctactgaagccagttcatctcctcccactgctgaaggtaccagcatgccaacctcaactcctagtgaaggaagcactccattaacaagtatgcctgtcagcaccacaacggtggccagttctgaaacgagcaccctttcaacaactcctgctgacaccagcacacctgtgaccacttattctcaagccagttcatctcctccaattgctgacggtactagcatgccaacctcaacttatagtgaaggaagcactccactaacaaatatgtctttcagcaccacgccagtggtcagttctgaggctagcaccctttccacaactcctgttgacaccagcacacctgtcaccacttctactgaagccagtttatctcctacaactgctgaaggtaccagcataccaacctcaagtcctagtgaaggaaccactccattagcaagtatgcctgtcagcaccacgccggtggtcagttctgaggttaacaccctttcaacaactcctgtggactccaacactctggtgaccacttctactgaagccagttcatctcctacaatcgctgaaggtaccagcttgccaacctcaactactagtgaaggaagcactccattatcaattatgcctctcagtaccacgccggtggccagttctgaggctagcaccctttcaacaactcctgttgacaccagcacacctgtgaccacttcttctccaaccaattcatctcctacaactgctgaagttaccagcatgccaacatcaactgctggtgaaggaagcactccattaacaaatatgcctgtcagcaccacaccggtggccagttctgaggctagcaccctttcaacaactcctgttgactccaacacttttgttaccagttctagtcaagccagttcatctccagcaactcttcaggtcaccactatgcgtatgtctactccaagtgaaggaagctcttcattaacaactatgctcctcagcagcacatatgtgaccagttctgaggctagcacaccttccactccttctgttgacagaagcacacctgtgaccacttctactcagagcaattctactcctacacctcctgaagttatcaccctgccaatgtcaactcctagtgaagtaagcactccattaaccattatgcctgtcagcaccacatcggtgaccatttctgaggctggcacagcttcaacacttcctgttgacaccagcacacctgtgatcacttctacccaagtcagttcatctcctgtgactcctgaaggtaccaccatgccaatctggacgcctagtgaaggaagcactccattaacaactatgcctgtcagcaccacacgtgtgaccagctctgagggtagcaccctttcaacaccttctgttgtcaccagcacacctgtgaccacttctactgaagccatttcatcttctgcaactcttgacagcaccaccatgtctgtgtcaatgcccatggaaataagcacccttgggaccactattcttgtcagtaccacacctgttacgaggtttcctgagagtagcaccccttccataccatctgtttacaccagcatgtctatgaccactgcctctgaaggcagttcatctcctacaactcttgaaggcaccaccaccatgcctatgtcaactacgagtgaaagaagcactttattgacaactgtcctcatcagccctatatctgtgatgagtccttctgaggccagcacactttcaacacctcctggtgataccagcacacctttgctcacctctaccaaagccggttcattctccatacctgctgaagtcactaccatacgtatttcaattaccagtgaaagaagcactccattaacaactctccttgtcagcaccacacttccaactagctttcctggggccagcatagcttcgacacctcctcttgacacaagcacaacttttaccccttctactgacactgcctcaactcccacaattcctgtagccaccaccatatctgtatcagtgatcacagaaggaagcacacctgggacaaccatttttattcccagcactcctgtcaccagttctactgctgatgtctttcctgcaacaactggtgctgtatctacccctgtgataacttccactgaactaaacacaccatcaacctccagtagtagtaccaccacatctttttcaactactaaggaatttacaacacccgcaatgactactgcagctcccctcacatatgtgaccatgtctactgcccccagcacacccagaacaaccagcagaggctgcactacttctgcatcaacgctttctgcaaccagtacacctcacacctctacttctgtcaccacccgtcctgtgaccccttcatcagaatccagcaggccgtcaacaattacttctcacaccatcccacctacatttcctcctgctcactccagtacacctccaacaacctctgcctcctccacgactgtgaaccctgaggctgtcaccaccatgaccaccaggacaaaacccagcacacggaccacttccttccccacggtgaccaccaccgctgtccccacgaatactacaattaagagcaaccccacctcaactcctactgtgccaagaaccacaacatgctttggagatgggtgccagaatacggcctctcgctgcaagaatggaggcacctgggatgggctcaagtgccagtgtcccaacctctattatggggagttgtgtgaggaggtggtcagcagcattgacatagggccaccggagactatctctgcccaaatggaactgactgtgacagtgaccagtgtgaagttcaccgaagagctaaaaaaccactcttcccaggaattccaggagttcaaacagacattcacggaacagatgaatattgtgtattccgggatccctgagtatgtcggggtgaacatcacaaagctacgacatgatgtgtttcaacaccactggcacccaagtgcaaaacattacggtgacccagtacgaccctgaagaggactgccggaagatggccaaggaatatggagactacttcgtagtggagtaccgggaccagaagccatactgcatcagcccctgtgagcctggcttcagtgtctccaagaactgtaacctcggcaagtgccagatgtctctaagtggacctcagtgcctctgcgtgaccacggaaactcactggtacagtggggagacctgtaaccagggcacccagaagagtctggtgtacggcctcgtgggggcaggggtcgtgctgatgctgatcatcctggtagctctcctgatgctcgttttccgctccaagagagaggtgaaacggcaaaagtacagattgtctcagttatacaagtggcaagaagaggacagtggaccagctcctgggaccttccaaaacattggctttgacatctgccaagatgatgattccatccacctggagtccatctatagtaatttccagccctccttgagacacatagaccctgaaacaaagatccgaattcagaggcctcaggtaatgacgacatcattttaaggcatggagctgagaagtctgggagtgaggagatcccagtccggctaagcttggtggagcattttcccattgagagccttccatgggaactcaatgttcccattgtaagtacaggaaacaagccctgtacttaccaaggagaaagaggagagacagcagtgctgggagattctcaaatagaaacccgtggacgctccaatgggcttgtcatgatatcaggctaggctttcctgctcatttttcaaagacgctccagatttgagggtactctgactgcaacatctttcaccccattgatcgccaggattgatttggttgatctggctgagcaggcgggtgtccccgtcctccctcactgccccatatgtgtccctcctaaagctgcatgctcagttgaagaggacgagaggacgaccttctctgatagaggaggaccacgcttcagtcaaaggcatacaagtatctatctggacttccctgctagcacttccaaacaagctcagagatgttcctcccctcatctgcccgggttcagtaccatggacagcgccctcgacccgctgtttacaaccatgaccccttggacactggactgcatgcactttacatatcacaaaatgctctcataagaattattgcataccatcttcatgaaaaacacctgtatttaaatatagagcatttaccttttggta

SEQ ID NO: 155588 - DNA, 5337 bp, Homo sapiens
  Payload ID: 10592
  Gene Symbol: MUC2
  Gene Name: mucin 2, oligomeric mucus/gel-forming
  ENST ID: ENST00000622511
  CDS Start-End: 1-5337
atggggctgccactagcccgcctggcggctgtgtgcctggccctgtctttggcagggggctcggagctccagacagagggcagaacccgaaaccacggccacaacgtctgcagcacctggggcaacttccactacaagaccttcgacggggacgtcttccgcttccccggcctctgcgactacaacttcgcctccgactgccgaggctcctacaaggaatttgctgtgcacctgaagcggggtccgggccaggctgaggcccccgccggggtggagtccatcctgctgaccatcaaggatgacaccatctacctcacccgccacctggctgtgcttaacggggccgtggtcagcaccccgcactacagccccgggctgctcattgagaagagcgatgcctacaccaaagtctactcccgcgccggcctcaccctcatgtggaaccgggaggatgcactcatgctggagctggacactaagttccggaaccacacctgtggcctctgcggggactacaacggcctgcagagctattcagaattcctctctgacggcgtgctcttcagtcccctggagtttgggaacatgcagaagatcaaccagcccgatgtggtgtgtgaggatcccgaggaggaggtggcccccgcatcctgctccgagcaccgcgccgagtgtgagaggctgctgaccgccgaggccttcgcggactgtcaggacctggtgccgctggagccgtatctgcgcgcctgccagcaggaccgctgccggtgcccgggcggtgacacctgcgtctgcagcaccgtggccgagttctcccgccagtgctcccacgccggcggccggcccgggaactggaggaccgccacgctctgccccaagacctgccccgggaacctggtgtacctggagagcggctcgccctgcatggacacctgctcacacctggaggtgagcagcctgtgcgaggagcaccgcatggacggctgtttctgcccagaaggcaccgtatatgacgacatcggggacagtggctgcgttcctgtgagccagtgccactgcaggctgcacggacacctgtacacaccgggccaggagatcaccaatgactgcgagcagtgtgtctgtaacgctggccgctgggtgtgcaaagacctgccctgccccggcacctgtgccctggaaggcggctcccacatcaccaccttcgatgggaagacgtacaccttccacggggactgctactatgtcctggccaagggtgaccacaacgattcctacgctctcctgggcgagctggccccctgtggctccacagacaagcagacctgcctgaagacggtggtgctgctggctgacaagaagaagaatgtggtggtcttcaagtccgatggcagtgtactgctcaacgagctgcaggtgaacctgccccacgtgaccgcgagcttctctgtcttccgcccgtcttcctaccacatcatggtgagcatggccattggcgtccggctgcaggtgcagctggccccagtcatgcaactctttgtgacactggaccaggcctcccaggggcaggtgcagggcctctgcgggaacttcaacggcctggaaggtgacgacttcaagacggccagcgggctggtggaggccacgggggccggctttgccaacacctggaaggcacagtcaagctgccatgacaagctggactggttggacgatccctgctccctgaacatcgagagcgccaactacgccgagcactggtgctccctcctgaagaagacagagaccccctttggcaggtgccactcggctgtggaccctgctgagtattacaagaggtgcaaatatgacacgtgtaactgtcagaacaatgaggactgcctgtgcgccgccctgtcctcctacgcgcgcgcctgcaccgccaagggcgtcatgctgtggggctggcgggagcatgtctgcaacaaggatgtgggctcctgccccaactcgcaggtcttcctgtacaacctgaccacctgccagcagacctgccgctccctctccgaggccgacagccactgtctcgagggctttgcgcctgtggacggctgcggctgccctgaccacaccttcctggacgagaagggccgctgcgtacccctggccaagtgctcctgttaccaccgcggtctctacctggaggcgggggatgtggtcgtcaggcaggaagaacgatgtgtgtgccgggatgggcggctgcactgtaggcagatccggctgatcggccagagctgcacggccccaaagatccacatggactgcagcaacctgactgcactggccacctcgaagccccgagccctcagctgccagacgctggccgccggctattaccacacagagtgtgtcagtggctgtgtgtgccccgacgggctgatggatgacggccggggtggctgcgtggtggagaaggaatgcccttgcgtccataacaacgacctgtattcttccggcgccaagatcaaggtggactgcaatacctgcacctgcaagagaggacgctgggtgtgcacccaggctgtgtgccatggcacctgctccatttacgggagtggccactacatcacctttgatgggaagtactacgactttgacggacactgctcctacgtggctgttcaggactactgcggccagaactcctcactgggctcattcagcatcatcaccgagaacgtcccctgtggcactacgggcgtcacctgctccaaggccatcaagatcttcatggggaggacggagctgaagttggaagacaagcaccgtgtggtgatccagcgtgatgagggtcaccacgtggcctacaccacgcgggaggtgggccagtacctggtggtggagtccagcacgggcatcatcgtcatctgggacaagaggaccaccgtgttcatcaagctggctccctcctacaagggcaccgtgtgtggcctgtgtgggaactttgaccaccgctccaacaacgacttcaccacgcgggaccacatggtggtgagcagcgagctggacttcgggaacagctggaaggaggcccccacctgcccagatgtgagcaccaaccccgagccctgcagcctgaacccgcaccgccgctcctgggccgagaagcagtgcagcatcctcaaaagcagcgtgttcagcatctgccacagcaaggtggaccccaagcccttctacgaggcctgtgtgcacgactcgtgctcctgtgacacgggtggggactgtgagtgcttctgctctgccgtggcctcctacgcccaggagtgtaccaaagagggggcctgcgtgttctggaggacgccggacctgtgccccatattctgcgactactacaaccctccgcatgagtgtgagtggcactatgagccatgtgggaaccggagcttcgagacctgcaggaccatcaacggcatccactccaacatctccgtgtcctacctggagggctgctacccccggtgccccaaggacaggcccatctatgaggaggatctgaagaagtgtgtcactgcagacaagtgtggctgctatgtcgaggacacccactacccacctggagcatcggttcccaccgaggagacctgcaagtcctgcgtgtgtaccaactcctcccaagtcgtctgcaggccggaggaaggaaagattcttaaccagacccaggatggcgccttctgctactgggagatctgtggccccaacgggacggtggagaagcacttcaacatctgttccattacgacacgcccgtccaccctgaccaccttcaccaccatcaccctccccaccacccccaccaccttcaccactaccaccaccaccaccaccccgacctccagcacagttttatcaacaactccgaagctgtgctgcctctggtctgactggatcaatgaggaccaccccagcagtggcagcgacgacggtgaccgagaaacatttgatggggtctgcggggcccctgaggacatcgagtgcaggtcggtcaaggatccccacctcagcttggagcagctaggccagaaggtgcagtgtgatgtctctgttgggttcatttgcaagaatgaagaccagtttggaaatggaccatttggactgtgttacgactacaagatacgtgtcaattgttgctggcccatggataagtgtatcaccactcccagccctccaactaccactcccagccctccaccaaccagcacgaccacccttccaccaaccaccacccccagccctccaaccaccaccacaaccacccctccaccaaccaccacccccagccctccaataaccaccacgaccacccctccaccaaccaccactcccagccctccaataagcaccacaaccacccctccaccaaccaccactcccagccctccaaccaccactcccagccctccaaccaccactcccagccctccaacaaccaccacaaccacccctccaccaaccaccactcccagccctccaacgactacgcccatcactccaccagccagcactaccacccttccaccaaccaccactcccagccctccaacaaccaccacaaccacccctccaccaaccaccactcccatcaccaccaccaccacggtgaccccaaccccaacacccaccggcacacagaccccaacaacgacacccatcaccaccaccaccacggtgaccccaaccccaacacccaccggcacacagaccccaacatcgacacccatcaccaccaccactacgaccccaaccccaacagccatcaccaccaccactacggtgaccccaaccccaacacccaccggcacacagaccccaaccacgacacccatcaccaccaccactacggtgacaccaaccccaacacccaccggcacacagtccccaaccccaacagccatcaccaccaccactacggtgaccccaaccccaacacccaccggcacacagaccccaacatcgacacccatcaccaccaccactacggtgaccccaaccccaacacccaccggcacacagaccccaaccccgacacccatctccaccaccactacggtgaccccaaccccaacacccaccggcacacagaccccaaccacgacacccatcaccaccaccaccacggtgaccccaaccccgacacccaccggcacacagaccccaaccacgaccccaacacccaccagcacaaagagtacaaccgtgacacccatcaccaccacaactacggtgaccgcaaccccaacacccaccggcacacagaccccaaccatgatacccatcagcaccaccactacggtgacccca

SEQ ID NO: 155589 - DNA, 393 bp, Homo sapiens
  Payload ID: 10592
  Gene Symbol: MUC2
  Gene Name: mucin 2, oligomeric mucus/gel-forming
  ENST ID: ENST00000620037
  CDS Start-End: 1-393
ttcgacggactctactacagctaccagggcaactgcacctacgtgctggtggaggagatcagcccctccgtggacaacttcggagtttacatcgacaactaccactgcgatcccaacgacaaggtgtcctgtccccgcaccctcatcgtgcgccacgagacccaggaggtgctgatcaagaccgtgcatatgatgcccatgcaggtgcaggtgcaggtgaacaggcaggcggtggcactgccctacaagaagtacgggctggaggtgtaccagtctggcatcaactacgtggtggacatccccgagctgggtgtcctcgtctcctacaatggcctgtccttctccgtcaggctgccctaccaccggtttggcaacaacaccaagggccagtgt

SEQ ID NO: 155590 - DNA, 8637 bp, Homo sapiens
  Payload ID: 10592
  Gene Symbol: MUC2
  Gene Name: mucin 2, oligomeric mucus/gel-forming
  ENST ID: ENST00000630886
  CDS Start-End: 28-8481
caacccacaccgcccctgccagccaccatggggctgccactagcccgcctggcggctgtgtgcctggccctgtctttggcagggggctcggagctccagacagagggcagaacccgaaaccacggccacaacgtctgcagcacctggggcaacttccactacaagaccttcgacggggacgtcttccgcttccccggcctctgcgactacaacttcgcctccgactgccgaggctcctacaaggaatttgctgtgcacctgaagcggggtccgggccaggctgaggcccccgccggggtggagtccatcctgctgaccatcaaggatgacaccatctacctcacccgccacctggctgtgcttaacggggccgtggtcagcaccccgcactacagccccgggctgctcattgagaagagcgatgcctacaccaaagtctactcccgcgccggcctcaccctcatgtggaaccgggaggatgcactcatgctggagctggacactaagttccggaaccacacctgtggcctctgcggggactacaacggcctgcagagctattcagaattcctctctgacggcgtgctcttcagtcccctggagtttgggaacatgcagaagatcaaccagcccgatgtggtgtgtgaggatcccgaggaggaggtggcccccgcatcctgctccgagcaccgcgccgagtgtgagaggctgctgaccgccgaggccttcgcggactgtcaggacctggtgccgctggagccgtatctgcgcgcctgccagcaggaccgctgccggtgcccgggcggtgacacctgcgtctgcagcaccgtggccgagttctcccgccagtgctcccacgccggcggccggcccgggaactggaggaccgccacgctctgccccaagacctgccccgggaacctggtgtacctggagagcggctcgccctgcatggacacctgctcacacctggaggtgagcagcctgtgcgaggagcaccgcatggacggctgtttctgcccagaaggcaccgtatatgacgacatcggggacagtggctgcgttcctgtgagccagtgccactgcaggctgcacggacacctgtacacaccgggccaggagatcaccaatgactgcgagcagtgtgtctgtaacgctggccgctgggtgtgcaaagacctgccctgccccggcacctgtgccctggaaggcggctcccacatcaccaccttcgatgggaagacgtacaccttccacggggactgctactatgtcctggccaagggtgaccacaacgattcctacgctctcctgggcgagctggccccctgtggctccacagacaagcagacctgcctgaagacggtggtgctgctggctgacaagaagaagaatgtggtggtcttcaagtccgatggcagtgtactgctcaacgagctgcaggtgaacctgccccacgtgaccgcgagcttctctgtcttccgcccgtcttcctaccacatcatggtgagcatggccattggcgtccggctgcaggtgcagctggccccagtcatgcaactctttgtgacactggaccaggcctcccaggggcaggtgcagggcctctgcgggaacttcaacggcctggaaggtgacgacttcaagacggccagcgggctggtggaggccacgggggccggctttgccaacacctggaaggcacagtcaagctgccatgacaagctggactggttggacgatccctgctccctgaacatcgagagcgccaactacgccgagcactggtgctccctcctgaagaagacagagaccccctttggcaggtgccactcggctgtggaccctgctgagtattacaagaggtgcaaatatgacacgtgtaactgtcagaacaatgaggactgcctgtgcgccgccctgtcctcctacgcgcgcgcctgcaccgccaagggcgtcatgctgtggggctggcgggagcatgtctgcaacaaggatgtgggctcctgccccaactcgcaggtcttcctgtacaacctgaccacctgccagcagacctgccgctccctctccgaggccgacagccactgtctcgagggctttgcgcctgtggacggctgcggctgccctgaccacaccttcctggacgagaagggccgctgcgtacccctggccaagtgctcctgttaccaccgcggtctctacctggaggcgggggatgtggtcgtcaggcaggaagaacgatgtgtgtgccgggatgggcggctgcactgtaggcagatccggctgatcggccagagctgcacggccccaaagatccacatggactgcagcaacctgactgcactggccacctcgaagccccgagccctcagctgccagacgctggccgccggctattaccacacagagtgtgtcagtggctgtgtgtgccccgacgggctgatggatgacggccggggtggctgcgtggtggagaaggaatgcccttgcgtccataacaacgacctgtattcttccggcgccaagatcaaggtggactgcaatacctgcacctgcaagagaggacgctgggtgtgcacccaggctgtgtgccatggcacctgctccatttacgggagtggccactacatcacctttgatgggaagtactacgactttgacggacactgctcctacgtggctgttcaggactactgcggccagaactcctcactgggctcattcagcatcatcaccgagaacgtcccctgtggcactacgggcgtcacctgctccaaggccatcaagatcttcatggggaggacggagctgaagttggaagacaagcaccgtgtggtgatccagcgtgatgagggtcaccacgtggcctacaccacgcgggaggtgggccagtacctggtggtggagtccagcacgggcatcatcgtcatctgggacaagaggaccaccgtgttcatcaagctggctccctcctacaagggcaccgtgtgtggcctgtgtgggaactttgaccaccgctccaacaacgacttcaccacgcgggaccacatggtggtgagcagcgagctggacttcgggaacagctggaaggaggcccccacctgcccagatgtgagcaccaaccccgagccctgcagcctgaacccgcaccgccgctcctgggccgagaagcagtgcagcatcctcaaaagcagcgtgttcagcatctgccacagcaaggtggaccccaagcccttctacgaggcctgtgtgcacgactcgtgctcctgtgacacgggtggggactgtgagtgcttctgctctgccgtggcctcctacgcccaggagtgtaccaaagagggggcctgcgtgttctggaggacgccggacctgtgccccatattctgcgactactacaaccctccgcatgagtgtgagtggcactatgagccatgtgggaaccggagcttcgagacctgcaggaccatcaacggcatccactccaacatctccgtgtcctacctggagggctgctacccccggtgccccaaggacaggcccatctatgaggaggatctgaagaagtgtgtcactgcagacaagtgtggctgctatgtcgaggacacccactacccacctggagcatcggttcccaccgaggagacctgcaagtcctgcgtgtgtaccaactcctcccaagtcgtctgcaggccggaggaaggaaagattcttaaccagacccaggatggcgccttctgctactgggagatctgtggccccaacgggacggtggagaagcacttcaacatctgttccattacgacacgcccgtccaccctgaccaccttcaccaccatcaccctccccaccacccccaccaccttcaccactaccaccaccaccaccaccccgacctccagcacagttttatcaacaactccgaagctgtgctgcctctggtctgactggatcaatgaggaccaccccagcagtggcagcgacgacggtgaccgagaaacatttgatggggtctgcggggcccctgaggacatcgagtgcaggtcggtcaaggatccccacctcagcttggagcagctaggccagaaggtgcagtgtgatgtctctgttgggttcatttgcaagaatgaagaccagtttggaaatggaccatttggactgtgttacgactacaagatacgtgtcaattgttgctggcccatggataagtgtatcaccactcccagccctccaactaccactcccagccctccaccaaccagcacgaccacccttccaccaaccaccacccccagccctccaaccaccaccacaaccacccctccaccaaccaccacccccagccctccaataaccaccacgaccacccctccaccaaccaccactcccagccctccaataagcaccacaaccacccctccaccaaccaccactcccagccctccaaccaccactcccagccctccaaccaccactcccagccctccaacaaccaccacaaccacccctccaccaaccaccactcccagccctccaacgactacgcccatcactccaccagccagcactaccacccttccaccaaccaccactcccagccctccaacaaccaccacaaccacccctccaccaaccaccactcccatcaccaccaccaccacggtgaccccaaccccaacacccaccggcacacagaccccaacaacgacacccatcaccaccaccaccacggtgaccccaaccccaacacccaccggcacacagaccccaacatcgacacccatcaccaccaccactacggtgaccccaaccccaacacccaccggcacacagaccccaaccacgacacccatcaccaccaccactacggtgaccccaaccccaacacccactggcacacagaccccaaccccaacagccatcaccaccaccactacggtgaccccaaccccaacacccaccggcacacagaccccaaccacgacacccatcaccaccaccactacggtgacaccaaccccaacacccaccggcacacagtccccaaccccaacagccatcaccaccaccactacggtgaccccaaccccaacacccaccggcacacagaccccaacatcgacacccatcaccaccaccactacggtgaccccaaccccaacacccaccggcacacagaccccaaccccgacacccatctccaccaccactacggtgaccccaaccccaacacccaccggcacacagaccccaaccacgacacccatcaccaccaccaccacggtgaccccaaccccgacacccaccggcacacagaccccaaccacggtactcatcaccaccaccactacgatgaccccaaccccaacacccaccagcacaaagagtacaaccgtgacacccatcaccaccacaactacggtgaccgcaaccccaacacccaccggcacacagaccccaaccatgatacccatcagcaccaccactacggtgaccccaaccccaacacccaccactggaagcacggggccccccacccacacaagcacagcacccattgctgagttgaccacatccaatcctccgcctgagtcctcaacccctcagacctctcggtccacctcttcccctctcacggagtcaaccacccttctgagtaccctaccacctgccattgagatgaccagcacggccccaccctccacacccacggcacccacgaccacgagcggaggccacacactgtctccaccgcccagcaccaccacgtcccctccaggcacccccactcgcggtaccacgaccgggtcatcttcagcccccacccccagcactgtgcagacgaccaccaccagtgcctggaccccaacgccgaccccactctccacacccagcatcatcaggaccacaggcctgaggccctacccttcctctgtgcttatctgctgtgtcctgaacgacacctactacgcaccaggtgaggaggtgtacaacggcacatacggagacacctgttatttcgtcaactgctcactgagctgtacgttggagttctataactggtcctgcccatccacgccctccccaacacccacgccctccaagtcgacgcccacgccttccaagccatcgtccacgccctccaagccgacgcccggcaccaagccccccgagtgcccagactttgatcctcccagacaggagaacgagacttggtggctgtgcgactgcttcatggccacgtgcaagtacaacaacacggtggagatcgtgaaggtggagtgtgagccgccgcccatgcccacctgctccaacggcctccaacccgtgcgcgtcgaggaccccgacggctgctgctggcactgggagtgcgactgctactgcacgggctggggcgacccgcactatgtcaccttcgacggactctactacagctaccagggcaactgcacctacgtgctggtggaggagatcagcccctccgtggacaacttcggagtttacatcgacaactaccactgcgatcccaacgacaaggtgtcctgtccccgcaccctcatcgtgcgccacgagacccaggaggtgctgatcaagaccgtgcatatgatgcccatgcaggtgcaggtgcaggtgaacaggcaggcggtggcactgccctacaagaagtacgggctggaggtgtaccagtctggcatcaactacgtggtggacatccccgagctgggtgtcctcgtctcctacaatggcctgtccttctccgtcaggctgccctaccaccggtttggcaacaacaccaagggccagtgtggcacctgcaccaacaccacctccgacgactgcattctgcccagcggggagatcgtctccaactgtgaggctgcggctgaccagtggctggtgaacgacccctccaagccacactgcccccacagcagctccacgaccaagcgcccggccgtcactgtgcccgggggcggtaaaacgaccccacacaaggactgcaccccatctcccctctgccagctcatcaaggacagcctgtttgcccagtgccacgcactggtgcccccgcagcactactacgatgcctgcgtgttcgacagctgcttcatgccgggctcgagcctggagtgcgccagtctgcaggcctacgcagccctctgtgcccagcagaacatctgcctcgactggcggaaccacacgcatggggcctgcttggtggagtgcccatctcacagggagtaccaggcctgtggccctgcagaagagcccacgtgcaaatccagctcctcccagcagaacaacacagtcctggtggaaggctgcttctgtcctgagggcaccatgaactacgctcctggctttgatgtctgcgtgaagacctgcggctgtgtgggacctgacaatgtgcccagagagtttggggagcacttcgagttcgactgcaagaactgtgtctgcctggagggtggaagtggcatcatctgccaacccaagaggtgcagccagaagcccgttacccactgcgtggaagacggcacctacctcgccacggaggtcaaccctgccgacacctgctgcaacattaccgtctgcaagtgcaacaccagcctgtgcaaagagaagccctccgtgtgcccgctgggattcgaagtgaagagcaagatggtgcctggaaggtgctgtcctttctactggtgtgagtccaagggggtgtgtgttcacgggaatgctgagtaccagcccggttctccagtttattcctccaagtgccaggactgcgtgtgcacggacaaggtggacaacaacaccctgctcaacgtcatcgcctgcacccacgtgccctgcaacacctcctgcagccctggcttcgaactcatggaggcccccggggagtgctgtaagaagtgtgaacagacgcactgtatcatcaaacggcccgacaaccagcacgtcatcctgaagcccggggacttcaagagcgacccgaagaacaactgcacattcttcagctgcgtgaagatccacaaccagctcatctcgtccgtctccaacatcacctgccccaactttgatgccagcatttgcatcccgggctccatcacattcatgcccaatggatgctgcaagacctgcacccctcgcaatgagaccagggtgccctgctccaccgtccccgtcaccacggaggtttcgtacgccggctgcaccaagaccgtcctcatgaatcattgctccgggtcctgcgggacatttgtcatgtactcggccaaggcccaggccctggaccacagctgctcctgctgcaaagaggagaaaaccagccagcgtgaggtggtcctgagctgccccaatggcggctcgctgacacacacctacacccacatcgagagctgccagtgccaggacaccgtctgcgggctccccaccggcacctcccgccgggcccggcgctcccctaggcatctggggagcgggtgagcggggtgggcacagcccccttcactgccctcgacagctttacctcccccggaccctctgagcctcctaagctcggcttcctctcttcagatatttattgtctgagtctttgttcagtccttgctttccaataataaactcagggggacatgctgt

SEQ ID NO: 155591 - DNA, 1916 bp, Homo sapiens
  Payload ID: 10593
  Gene Symbol: MUC20
  Gene Name: mucin 20, cell surface associated
  ENST ID: ENST00000320736
  CDS Start-End: 14-1630
gtggccggctaggatgggctgtctctggggtctggctctgccccttttcttcttctgctgggaggttggggtctctgggagctctgcaggccccagcacccgcagagcagacactgcgatgacaacggacgacacagaagtgcccgctatgactctagcaccgggccacgccgctctggaaactcaaacgctgagcgctgagacctcttctagggcctcaaccccagccggccccattccagaagcagagaccaggggagccaagagaatttcccctgcaagagagaccaggagtttcacaaaaacatctcccaacttcatggtgctgatcgccacctccgtggagacatcagccgccagtggcagccccgagggagctggaatgaccacagttcagaccatcacaggcagtgatcccagggaagccatctttgacaccctttgcaccgatgacagctctgaagaggcaaagacactcacaatggacatattgacattggctcacacctccacagaagctaagggcctgtcctcagagagcagcgcctcttccgacagcccccatccagtcatcaccccgtcacgggcctcagagagcagcgcctcttccgacggcccccatccagtcatcaccccgtcacgggcctcagagagcagcgcctcttccgacggcccccatccagtcatcaccccctcatggtccccgggatctgacgtcactctcctcgctgaagccctggtgactgtcacaaacatcgaggttattaattgcagcatcacagaaatagaaacaacgacttccagcatccctggggcctcagacacagatctcatccccacggaaggggtgaaggcctcgtccacctccgatccaccagctctgcctgactccactgaagcaaaaccacacatcactgaggtcacagcctctgccgagaccctgtccacagccggcaccacagagtcagctgcacctgatgccacggttgggaccccactccccactaacagcgccacagaaagagaagtgacagcacccggggccacgaccctcagtggagctctggtcacagttagcaggaatccccttgaagaaacctcagccctctctgttgagacaccaagttacgtcaaagtctcaggagcagctccggtctccatagaggctgggtcagcagtgggcaaaacaacttcctttgctgggagctctgcttcctcctacagcccctcggaagccgccctcaagaacttcaccccttcagagacaccgaccatggacatcgcaaccaaggggcccttccccaccagcagggaccctcttccttctgtccctccgactacaaccaacagcagccgagggacgaacagcaccttagccaagatcacaacctcagcgaagaccacgatgaagcccccaacagccacgcccacgactgcccggacgaggccgaccacagacgtgagtgcaggtgaaaatggaggtttcctcctcctgcggctgagtgtggcttccccggaagacctcactgaccccagagtggcagaaaggctgatgcagcagctccaccgggaactccacgcccacgcgcctcacttccaggtctccttactgcgtgtcaggagaggctaacggacatcagctgcagccaggcatgtcccgtatgccaaaagagggtgctgcccctagcctgggcccccaccgacagactgcagctgcgttactgtgctgagaggtacccagaaggttcccatgaagggcagcatgtccaagcccctgaccccagatgtggcaacaggaccctcgctcacatccaccggagtgtatgtgtggggaggggcttcacctgttcccagaggtgtccttggactcaccttggcacatgttctgtgtttcagtaaagagagacctgatcacc

SEQ ID NO: 155592 - DNA, 2463 bp, Homo sapiens
  Payload ID: 10593
  Gene Symbol: MUC20
  Gene Name: mucin 20, cell surface associated
  ENST ID: ENST00000436408
  CDS Start-End: 125-2296
atttgtgatcacctggtcacacacctgggcaggaggctgcccctcctccctggtttgaggaagcaggaaaaggtacccgcgagagacagccagcagttctgtggagcagcggtggccggctaggatgggctgtctctggggtctggctctgccccttttcttcttctgctgggaggttggggtctctgggagctctgcaggccccagcacccgcagagcagacactgcgatgacaacggacgacacagaagtgcccgctatgactctagcaccgggccacgccgctctggaaactcaaacgctgagcgctgagacctcttctagggcctcaaccccagccggccccattccagaagcagagaccaggggagccaagagaatttcccctgcaagagagaccaggagtttcacaaaaacatctcccaacttcatggtgctgatcgccacctccgtggagacatcagccgccagtggcagccccgagggagctggaatgaccacagttcagaccatcacaggcagtgatcccagggaagccatctttgacaccctttgcaccgatgacagctctgaagaggcaaagacactcacaatggacatattgacattggctcacacctccacagaagctaagggcctgtcctcagagagcagcgcctcttccgacagcccccatccagtcatcaccccgtcacgggcctcagagagcagcgcctcttccgacggcccccatccagtcatcaccccgtcacgggcctcagagagcagcgcctcttccgacggcccccatccagtcatcaccccgtcacgggcctcagagagcagcgcctcttccgacggcccccatccagtcatcaccccgtcacgggcctcagagagcagcgcctcttccgacggcccccatccagtcatcaccccgtcacgggcctcagagagcagcgcctcttccgacggcccccatccagtcatcaccccgtcacgggcctcagagagcagcgcctcttccgacggcccccatccagtcatcaccccgtcacgggcctcagagagcagcgcctcttccgacggcccccatccagtcatcaccccgtcacgggcctcagagagcagcgcctcttccgacggcccccatccagtcatcaccccgtcacgggcctcagagagcagcgcctcttccgacggcctccatccagtcatcaccccgtcacgggcctcagagagcagcgcctcttccgacggcccccatccagtcatcaccccgtcacgggcctcagagagcagcgcctcttccgacggcccccatccagtcatcaccccctcatggtccccgggatctgacgtcactctcctcgctgaagccctggtgactgtcacaaacatcgaggttattaattgcagcatcacagaaatagaaacaacgacttccagcatccctggggcctcagacacagatctcatccccacggaaggggtgaaggcctcgtccacctccgatccaccagctctgcctgactccactgaagcaaaaccacacatcactgaggtcacagcctctgccgagaccctgtccacagccggcaccacagagtcagctgcacctgatgccacggttgggaccccactccccactaacagcgccacagaaagagaagtgacagcacccggggccacgaccctcagtggagctctggtcacagttagcaggaatccccttgaagaaacctcagccctctctgttgagacaccaagttacgtcaaagtctcaggagcagctccggtctccatagaggctgggtcagcagtgggcaaaacaacttcctttgctgggagctctgcttcctcctacagcccctcggaagccgccctcaagaacttcaccccttcagagacaccgaccatggacatcgcaaccaaggggcccttccccaccagcagggaccctcttccttctgtccctccgactacaaccaacagcagccgagggacgaacagcaccttagccaagatcacaacctcagcgaagaccacgatgaagcccccaacagccacgcccacgactgcccggacgaggccgaccacagacgtgagtgcaggtgaaaatggaggtttcctcctcctgcggctgagtgtggcttccccggaagacctcactgaccccagagtggcagaaaggctgatgcagcagatggaaaggagcctggctctgtcacccaggctggagtgcagtggcgtgatctcagctcactgcaagctccacctcttgggttcacgtgattctcctgcctcagcctcctgagtatctgggactacaggtgccaccaccatgctcggctaattttttgaatttttagtagagacggagtttcaccgtgtcagccagcctggtctcaaactcctgacctcaagtgatccacccacctcggcctcccaaagtgctgggattccagttaatgagcactgctc

SEQ ID NO: 155593 - DNA, 521 bp, Homo sapiens
  Payload ID: 10593
  Gene Symbol: MUC20
  Gene Name: mucin 20, cell surface associated
  ENST ID: ENST00000423938
  CDS Start-End: 1-385
accgaccatggacatcgcaaccaaggggcccttccccaccagcagggaccctcttccttctgtccctccgactacaaccaacagcagccgagggacgaacagcaccttagccaagatcacaacctcagcgaagaccacgatgaagcccccaacagccacgcccacgactgcccggacgaggccgaccacagacgtgagtgcaggtgaaaatggaggtttcctcctcctgcggctgagtgtggcttccccggaagacctcactgaccccagagtggcagaaaggctgatgcagcagttgatgacacagggcacccacagcgctcacgtgccttccatggtgggggtgaatcctttgccaatagtgcctggtgggtttcagcactgaataatattccatcgtctgaatgcaccataggttatttacccgttcacctgctgaaggacatcttggttgcttccaagttttggcaattatgaataaagctgctataaattatgaataaagctgctataaacctcca

SEQ ID NO: 155594 - DNA, 2842 bp, Homo sapiens
  Payload ID: 10593
  Gene Symbol: MUC20
  Gene Name: mucin 20, cell surface associated
  Uniprot ID: Q8N307
  ENST ID: ENST00000445522
  CDS Start-End: 483-2507
ggcctttctcgtcttttaagggtttttacttccatggggaactatgtgttggatgagaaaagtatccggggaaggggacagaggttcagaaagctctgcgagtcctggacgctggtctgccttcttggctcaccctggaaggtggacgctggccccacacatcccctcttaaagacgcaggccgatagccagcagatcctggggcttgctggccccaagtgagttgtcagggtttcagaggacaccagtcatggcaaccccagctccatggctgccacacaggcctgggcttcccaggactgcctccttcttgttcgcttatgtagatgaaaaatgaggtaacggcactcccctgccccaccctcctcccagaagtgcccagggtgtaaacgcaatagcttgtgtgaagtccactggaacccaggctcaccaagtcagtcttaaccaacacaggccccagcacccgcagagcagacactgcgatgacaacggacgacacagaagtgcccgctatgactctagcaccgggccacgccgctctggaaactcaaacgctgagcgctgagacctcttctagggcctcaaccccagccggccccattccagaagcagagaccaggggagccaagagaatttcccctgcaagagagaccaggagtttcacaaaaacatctcccaacttcatggtgctgatcgccacctccgtggagacatcagccgccagtggcagccccgagggagctggaatgaccacagttcagaccatcacaggcagtgatcccagggaagccatctttgacaccctttgcaccgatgacagctctgaagaggcaaagacactcacaatggacatattgacattggctcacacctccacagaagctaagggcctgtcctcagagagcagcgcctcttccgacagcccccatccagtcatcaccccgtcacgggcctcagagagcagcgcctcttccgacggcccccatccagtcatcaccccgtcacgggcctcagagagcagcgcctcttccgacggcccccatccagtcatcaccccgtcacgggcctcagagagcagcgcctcttccgacggcccccatccagtcatcaccccgtcacgggcctcagagagcagcgcctcttccgacggcccccatccagtcatcaccccgtcacgggcctcagagagcagcgcctcttccgacggcccccatccagtcatcaccccgtcacgggcctcagagagcagcgcctcttccgacggcccccatccagtcatcaccccgtcacgggcctcagagagcagcgcctcttccgacggcccccatccagtcatcaccccgtcacgggcctcagagagcagcgcctcttccgacggcccccatccagtcatcaccccgtcacgggcctcagagagcagcgcctcttccgacggcctccatccagtcatcaccccgtcacgggcctcagagagcagcgcctcttccgacggcccccatccagtcatcaccccgtcacgggcctcagagagcagcgcctcttccgacggcccccatccagtcatcaccccctcatggtccccgggatctgacgtcactctcctcgctgaagccctggtgactgtcacaaacatcgaggttattaattgcagcatcacagaaatagaaacaacgacttccagcatccctggggcctcagacacagatctcatccccacggaaggggtgaaggcctcgtccacctccgatccaccagctctgcctgactccactgaagcaaaaccacacatcactgaggtcacagcctctgccgagaccctgtccacagccggcaccacagagtcagctgcacctgatgccacggttgggaccccactccccactaacagcgccacagaaagagaagtgacagcacccggggccacgaccctcagtggagctctggtcacagttagcaggaatccccttgaagaaacctcagccctctctgttgagacaccaagttacgtcaaagtctcaggagcagctccggtctccatagaggctgggtcagcagtgggcaaaacaacttcctttgctgggagctctgcttcctcctacagcccctcggaagccgccctcaagaacttcaccccttcagagacaccgaccatggacatcgcaaccaaggggcccttccccaccagcagggaccctcttccttctgtccctccgactacaaccaacagcagccgagggacgaacagcaccttagccaagatcacaacctcagcgaagaccacgatgaagcccccaacagccacgcccacgactgcccggacgaggccgaccacagacgtgagtgcaggtgaaaatggaggtttcctcctcctgcggctgagtgtggcttccccggaagacctcactgaccccagagtggcagaaaggctgatgcagcagctccaccgggaactccacgcccacgcgcctcacttccaggtctccttactgcgtgtcaggagaggctaacggacatcagctgcagccaggcatgtcccgtatgccaaaagagggtgctgcccctagcctgggcccccaccgacagactgcagctgcgttactgtgctgagaggtacccagaaggttcccatgaagggcagcatgtccaagcccctgaccccagatgtggcaacaggaccctcgctcacatccaccggagtgtatgtgtggggaggggcttcacctgttcccagaggtgtccttggactcaccttggcacatgttctgtgtttcagtaaagagagacctgatcacccatctgtgtgcttccatcctgcattaaaattcactcagtgtggcccaga

SEQ ID NO: 155595 - DNA, 2589 bp, Homo sapiens
  Payload ID: 10593
  Gene Symbol: MUC20
  Gene Name: mucin 20, cell surface associated
  Uniprot ID: Q8N307
  ENST ID: ENST00000447234
  CDS Start-End: 127-2256
acatttgtgatcacctggtcacacacctgggcaggaggctgcccctcctccctggtttgaggaagcaggaaaaggtacccgcgagagacagccagcagttctgtggagcagcggtggccggctaggatgggctgtctctggggtctggctctgccccttttcttcttctgctgggaggttggggtctctgggagctctgcaggccccagcacccgcagagcagacactgcgatgacaacggacgacacagaagtgcccgctatgactctagcaccgggccacgccgctctggaaactcaaacgctgagcgctgagacctcttctagggcctcaaccccagccggccccattccagaagcagagaccaggggagccaagagaatttcccctgcaagagagaccaggagtttcacaaaaacatctcccaacttcatggtgctgatcgccacctccgtggagacatcagccgccagtggcagccccgagggagctggaatgaccacagttcagaccatcacaggcagtgatcccagggaagccatctttgacaccctttgcaccgatgacagctctgaagaggcaaagacactcacaatggacatattgacattggctcacacctccacagaagctaagggcctgtcctcagagagcagcgcctcttccgacagcccccatccagtcatcaccccgtcacgggcctcagagagcagcgcctcttccgacggcccccatccagtcatcaccccgtcacgggcctcagagagcagcgcctcttccgacggcccccatccagtcatcaccccgtcacgggcctcagagagcagcgcctcttccgacggcccccatccagtcatcaccccgtcacgggcctcagagagcagcgcctcttccgacggcccccatccagtcatcaccccgtcacgggcctcagagagcagcgcctcttccgacggcccccatccagtcatcaccccgtcacgggcctcagagagcagcgcctcttccgacggcccccatccagtcatcaccccgtcacgggcctcagagagcagcgcctcttccgacggcccccatccagtcatcaccccgtcacgggcctcagagagcagcgcctcttccgacggcccccatccagtcatcaccccgtcacgggcctcagagagcagcgcctcttccgacggcctccatccagtcatcaccccgtcacgggcctcagagagcagcgcctcttccgacggcccccatccagtcatcaccccgtcacgggcctcagagagcagcgcctcttccgacggcccccatccagtcatcaccccctcatggtccccgggatctgacgtcactctcctcgctgaagccctggtgactgtcacaaacatcgaggttattaattgcagcatcacagaaatagaaacaacgacttccagcatccctggggcctcagacacagatctcatccccacggaaggggtgaaggcctcgtccacctccgatccaccagctctgcctgactccactgaagcaaaaccacacatcactgaggtcacagcctctgccgagaccctgtccacagccggcaccacagagtcagctgcacctgatgccacggttgggaccccactccccactaacagcgccacagaaagagaagtgacagcacccggggccacgaccctcagtggagctctggtcacagttagcaggaatccccttgaagaaacctcagccctctctgttgagacaccaagttacgtcaaagtctcaggagcagctccggtctccatagaggctgggtcagcagtgggcaaaacaacttcctttgctgggagctctgcttcctcctacagcccctcggaagccgccctcaagaacttcaccccttcagagacaccgaccatggacatcgcaaccaaggggcccttccccaccagcagggaccctcttccttctgtccctccgactacaaccaacagcagccgagggacgaacagcaccttagccaagatcacaacctcagcgaagaccacgatgaagcccccaacagccacgcccacgactgcccggacgaggccgaccacagacgtgagtgcaggtgaaaatggaggtttcctcctcctgcggctgagtgtggcttccccggaagacctcactgaccccagagtggcagaaaggctgatgcagcagctccaccgggaactccacgcccacgcgcctcacttccaggtctccttactgcgtgtcaggagaggctaacggacatcagctgcagccaggcatgtcccgtatgccaaaagagggtgctgcccctagcctgggcccccaccgacagactgcagctgcgttactgtgctgagaggtacccagaaggttcccatgaagggcagcatgtccaagcccctgaccccagatgtggcaacaggaccctcgctcacatccaccggagtgtatgtgtggggaggggcttcacctgttcccagaggtgtccttggactcaccttggcacatgttctgtgtttcagtaaagagagacctgatcacccatctgtgtgcttccatcctgcattaaaattcactcagtgtggccca

SEQ ID NO: 155596 - DNA, 2326 bp, Homo sapiens
  Payload ID: 10593
  Gene Symbol: MUC20
  Gene Name: mucin 20, cell surface associated
  ENST ID: ENST00000619358
  CDS Start-End: 483-1994
ggcctttctcgtcttttaagggtttttacttccatggggaactatgtgttggatgagaaaagtatccggggaaggggacagaggttcagaaagctctgcgagtcctggacgctggtctgccttcttggctcaccctggaaggtggacgctggccccacacatcccctcttaaagacgcaggccgatagccagcagatcctggggcttgctggccccaagtgagttgtcagggtttcagaggacaccagtcatggcaaccccagctccatggctgccacacaggcctgggcttcccaggactgcctccttcttgttcgcttatgtagatgaaaaatgaggtaacggcactcccctgccccaccctcctcccagaagtgcccagggtgtaaacgcaatagcttgtgtgaagtccactggaacccaggctcaccaagtcagtcttaaccaacacaggccccagcacccgcagagcagacactgcgatgacaacggacgacacagaagtgcccgctatgactctagcaccgggccacgccgctctggaaactcaaacgctgagcgctgagacctcttctagggcctcaaccccagccggccccattccagaagcagagaccaggggagccaagagaatttcccctgcaagagagaccaggagtttcacaaaaacatctcccaacttcatggtgctgatcgccacctccgtggagacatcagccgccagtggcagccccgagggagctggaatgaccacagttcagaccatcacaggcagtgatcccagggaagccatctttgacaccctttgcaccgatgacagctctgaagaggcaaagacactcacaatggacatattgacattggctcacacctccacagaagctaagggcctgtcctcagagagcagcgcctcttccgacagcccccatccagtcatcaccccgtcacgggcctcagagagcagcgcctcttccgacggcccccatccagtcatcaccccgtcacgggcctcagagagcagcgcctcttccgacggcccccatccagtcatcaccccctcatggtccccgggatctgacgtcactctcctcgctgaagccctggtgactgtcacaaacatcgaggttattaattgcagcatcacagaaatagaaacaacgacttccagcatccctggggcctcagacacagatctcatccccacggaaggggtgaaggcctcgtccacctccgatccaccagctctgcctgactccactgaagcaaaaccacacatcactgaggtcacagcctctgccgagaccctgtccacagccggcaccacagagtcagctgcacctgatgccacggttgggaccccactccccactaacagcgccacagaaagagaagtgacagcacccggggccacgaccctcagtggagctctggtcacagttagcaggaatccccttgaagaaacctcagccctctctgttgagacaccaagttacgtcaaagtctcaggagcagctccggtctccatagaggctgggtcagcagtgggcaaaacaacttcctttgctgggagctctgcttcctcctacagcccctcggaagccgccctcaagaacttcaccccttcagagacaccgaccatggacatcgcaaccaaggggcccttccccaccagcagggaccctcttccttctgtccctccgactacaaccaacagcagccgagggacgaacagcaccttagccaagatcacaacctcagcgaagaccacgatgaagcccccaacagccacgcccacgactgcccggacgaggccgaccacagacgtgagtgcaggtgaaaatggaggtttcctcctcctgcggctgagtgtggcttccccggaagacctcactgaccccagagtggcagaaaggctgatgcagcagctccaccgggaactccacgcccacgcgcctcacttccaggtctccttactgcgtgtcaggagaggctaacggacatcagctgcagccaggcatgtcccgtatgccaaaagagggtgctgcccctagcctgggcccccaccgacagactgcagctgcgttactgtgctgagaggtacccagaaggttcccatgaagggcagcatgtccaagcccctgaccccagatgtggcaacaggaccctcgctcacatccaccggagtgtatgtgtggggaggggcttcacctgttcccagaggtgtccttggactcaccttggcacatgttctgtgtttcagtaaagagagacctgatcacccatctgtgtgcttccatcctgcattaaaattcactcagtgtggccc

SEQ ID NO: 155597 - DNA, 2589 bp, Homo sapiens; identical to SEQ ID NO: 155595
  Payload ID: 10593
  Gene Symbol: MUC20
  Gene Name: mucin 20, cell surface associated
  Uniprot ID: Q8N307
  ENST ID: ENST00000620530
  CDS Start-End: 127-2256

SEQ ID NO: 155598 - DNA, 2329 bp, Homo sapiens
  Payload ID: 10593
  Gene Symbol: MUC20
  Gene Name: mucin 20, cell surface associated
  ENST ID: ENST00000614780
  CDS Start-End: 483-1994
ggcctttctcgtcttttaagggtttttacttccatggggaactatgtgttggatgagaaaagtacccggggaaggcgacagaggttcagaaagctctgcgagtcctggacgctggtctgccttcttggctcaccctggaaggtggacgctggccccacacatcccctcttaaagacgcaggccgatagccagcagatcctggggcttgctggccccaagtgagttgtcagggtttcagaggacgccagtcatggcaaccccagctccatggctgccacacaggcctgggcttcccaggactgcctccttcttgttcgcttatgtagatgaaaaatgaggtaacggcactcccctgccccaccctcctcccagaagtgcccagggtgtaaatgcaatagcttgtgtgaagtccactggaacccaggctcaccaagtcagtcttaaccaacacaggccccagcacccgcagagcagacactgcgatgacaacggacgacacagaagtgcccgctatgactctagcaccgggccacgccgctctggaaactcaaacgctgagcgctgagacctcttctagggcctcaaccccagccggccccattccagaagcagagaccaggggagccaagagaatttcccctgcaagagagaccaggagtttcacaaaaacatctcccaacttcatggtgctgatcgccacctccgtggagacatcagccgccagtggcagccccgagggagctggaatgaccacagttcagaccatcacaggcagtgatcccgaggaagccatctttgacaccctttgcaccgatgacagctctgaagaggcaaagacactcacaatggacatattgacattggctcacacctccacagaagctaagggcctgtcctcagagagcagtgcctcttccgacggcccccatccagtcatcaccccgtcacgggcctcagagagcagcgcctcttccgacggcccccatccagtcatcaccccgtcacgggcctcagagagcagcgcctcttccgacggcccccatccagtcatcaccccgtcatggtccccgggatctgatgtcactctcctcgctgaagccctggtgactgtcacaaacatcgaggttattaattgcagcatcacagaaatagaaacaacaacttccagcatccctggggcctcagacatagatctcatccccacggaaggggtgaaggcctcgtccacctccgatccaccagctctgcctgactccactgaagcaaaaccacacatcactgaggtcacagcctctgccgagaccctgtccacagccggcaccacagagtcagctgcacctcatgccacggttgggaccccactccccactaacagcgccacagaaagagaagtgacagcacccggggccacgaccctcagtggagctctggtcacagttagcaggaatcccctggaagaaacctcagccctctctgttgagacaccaagttacgtcaaagtctcaggagcagctccggtctccatagaggctgggtcagcagtgggcaaaacaacttcctttgctgggagctctgcttcctcctacagcccctcggaagccgccctcaagaacttcaccccttcagagacaccgaccatggacatcgcaaccaaggggcccttccccaccagcagggaccctcttccttctgtccctccgactacaaccaacagcagccgagggacgaacagcaccttagccaagatcacaacctcagcgaagaccacgatgaagcccccaacagccacgcccacgactgcccggacgaggccgaccacagacgtgagtgcaggtgaaaatggaggtttcctcctcctgcggctgagtgtggcttccccggaagacctcactgaccccagagtggcagaaaggctgatgcagcagctccaccgggaactccacgcccacgcgcctcacttccaggtctccttactgcgtgtcaggagaggctaacggacatcagctgcagccaggcatgtcccgtatgccaaaagagggtgctgcccctagcctgggcccccaccgacagactgcagctgcgttactgtgctgagaggtacccagaaggttcccatgaagggcagcatgtccaagcccctaaccccagatgtggcaacaggaccctcgctcacatccaccggagtgtatgtatggggaggggcttcacctgttcccagaggtgtccttggactcaccttggcacatgttctgtgtttcagtaaagagagacctgatcacccatctgtgtgcttccatcctgcattaaaattcactcagtgtggcccaga

SEQ ID NO: 155599 - DNA, 2589 bp, Homo sapiens; identical to SEQ ID NO: 155595
  Payload ID: 10593
  Gene Symbol: MUC20
  Gene Name: mucin 20, cell surface associated
  Uniprot ID: Q8N307
  ENST ID: ENST00000610415
  CDS Start-End: 127-2256

SEQ ID NO: 155600 - DNA, 2124 bp, Homo sapiens
  Payload ID: 10593
  Gene Symbol: MUC20
  Gene Name: mucin 20, cell surface associated
  ENST ID: ENST00000616892
  CDS Start-End: 124-1791
acatttgtgatcacctggtcacacacctgggcaggaggctgcccctccctggtttgaggaagcaggaaaaggtacccgcgagagacagccagcagttctgtggagcagcggtggccggctaggatgggctgtctctggggtctggctctgccccttttcttcttctgctgggaggttggggtctctgggagctctgcaggccccagcacccgcagagcagacactgcgatgacaacggacgacacagaagtgcccgctatgactctagcaccgggccacgccgctctggaaactcaaacactgagcgctgagacctcttctagggcctcaaccccagccggccccgttccagaagcagagaccaggggatccaagagaatttcccctgcaagagagaccaggagtttcacaaaaacatctcccaacttcatggtgctgatcgccacctccgtggagacatcagccgccagtggcagccccgagggagctggaatgaccacagttcagaccatcacaggcagtgatcccgaggaagccatctttgacaccctttgcaccgatgacagctctgaagaggcaaagacactcacaatggacatattgacattggctcacacctccacagaagctaagggcctgtcctcagagagcagtgcctcttccgacggcccccatccagtcatcaccccgtcacgggcctcagagagcagcgcctcttccgacggcccccatccagtcatcaccccgtcacgggcctcagagagcagcgcctcttccgacggcccccatccagtcatcaccccgtcacgggcctcagagagcagcgcctcttccgacggcccccatccagtcatcaccccctcatggtccccgggatctgacgtcactctcctcgctgaagccctggtgactgtcacaaacatcgaggttattaattgcagcatcacagaaatagaaacaacgacttccagcatccctggggcctcagacacagatcccatccccacggaaggggtgaaggcctcgtccacctccgatccaccagctctgcctgactccactgaagcaaaaccacacatcactgaggtcacagcctctgccgagaccctgtccacagccggcaccacagagtcagctgcacctgatgccacgattgggaccccactccccaccaacagcaccatagaaagagaagtgacagcacccggggccacgaccctcagtggagctctggccacagggaatcccctggaagaaacctcagccctctctgttgagacaccaagttacgtcaaagtctcaggagcagctccggtctccatagaggctgggtcagcagtgggcaaaacaacttcctttgctgggagctctgcttcctcctacagcccctcggaagccgccctcaagaacttcaccccttcagagacactgaccacggacatcgcaaccaaggggcccttccccaccagcagggaccctcttccttctgtccctccaactacaaccaacagcagccgagggacgaacagcaccttagccaagatcacaacctcagcgaagaccacgatgaagcccccaacagccacgcccacgactgcccggacgaggccgaccacagacatgagtgcaggtgaaaatggaggtttcctcctcctgcggctgagtgtggcttccccggaagacctcactgaccccagagtggcagaaaggctgatgcagcagctccaccgggaactccacgcccacgcgcctcacttccaggtctccttactgcgtgtcaggagaggctaacggacatcagctgcagccaggcatgtcccgtatgccaaaagagggtgctgcccctagcctgggcccccaccgacagactgcagctgcgttactgtgctgagaggtacccagaaggttcccatgaagggcagcatgtccaagcccctgaccccagatgtggcaacaggaccctcgctcacatccaccggagtgtatgtgtggggaggggcttcacctgttcccagaggtgtccttggactcaccttggcacatgttctgtgtttcagtaaagagagacctgatcacccatctgtgtgcttccatcctgcattaaaattcactcagtgtggccca

SEQ ID NO: 155601 - DNA, 2326 bp, Homo sapiens; identical to SEQ ID NO: 155596
  Payload ID: 10593
  Gene Symbol: MUC20
  Gene Name: mucin 20, cell surface associated
  ENST ID: ENST00000610497
  CDS Start-End: 483-1994

SEQ ID NO: 155602 - DNA, 2329 bp, Homo sapiens
  Payload ID: 10593
  Gene Symbol: MUC20
  Gene Name: mucin 20, cell surface associated
  ENST ID: ENST00000616630
  CDS Start-End: 483-1994
gcctttctcgtcttttaagggttttttacttccatggggaactatgtgttggatgagaaaagtacccggggaaggcgacagaggttcagaaagctctgcgagtcctggacgctggtctgccttcttggctcaccctggaaggtggacgctggccccacacatcccctcttaaagacgcaggccgatagccagcagatcctggggcttgctggccccaagtgagttgtcagggtttcagaggacgccagtcatggcaaccccagctccatggctgccacacaggcctgggcttcccaggactgcctccttcttgttcgcttatgtagatgaaaaatgaggtaacggcactcccctgccccaccctcctcccagaagtgcccagggtgtaaatgcaatagcttgtgtgaagtccactggaacccaggctcaccaagtcagtcttaaccaacacaggccccagcacccgcagagcagacactgcgatgacaacggacgacacagaagtgcccgctatgactctagcaccgggccacgccgctctggaaactcaaacgctgagcgctgagacctcttctagggcctcaaccccagccggccccattccagaagcagagaccaggggagccaagagaatttcccctgcaagagagaccaggagtttcacaaaaacatctcccaacttcatggtgctgatcgccacctccgtggagacatcagccgccagtggcagccccgagggagctggaatgaccacagttcagaccatcacaggcagtgatcccgaggaagccatctttgacaccctttgcaccgatgacagctctgaagaggcaaagacactcacaatggacatattgacattggctcacacctccacagaagctaagggcctgtcctcagagagcagtgcctcttccgacggcccccatccagtcatcaccccgtcacgggcctcagagagcagcgcctcttccgacggcccccatccagtcatcaccccgtcacgggcctcagagagcagcgcctcttccgacggcccccatccagtcatcaccccgtcatggtccccgggatctgatgtcactctcctcgctgaagccctggtgactgtcacaaacatcgaggttattaattgcagcatcacagaaatagaaacaacaacttccagcatccctggggcctcagacatagatctcatccccacggaaggggtgaaggcctcgtccacctccgatccaccagctctgcctgactccactgaagcaaaaccacacatcactgaggtcacagcctctgccgagaccctgtccacagccggcaccacagagtcagctgcacctcatgccacggttgggaccccactccccactaacagcgccacagaaagagaagtgacagcacccggggccacgaccctcagtggagctctggtcacagttagcaggaatcccctggaagaaacctcagccctctctgttgagacaccaagttacgtcaaagtctcaggagcagctccggtctccatagaggctgggtcagcagtgggcaaaacaacttcctttgctgggagctctgcttcctcctacagcccctcggaagccgccctcaagaacttcaccccttcagagacaccgaccatggacatcgcaaccaaggggcccttccccaccagcagggaccctcttccttctgtccctccgactacaaccaacagcagccgagggacgaacagcaccttagccaagatcacaacctcagcgaagaccacgatgaagcccccaacagccacgcccacgactgcccggacgaggccgaccacagacgtgagtgcaggtgaaaatggaggtttcctcctcctgcggctgagtgtggcttccccggaagacctcactgaccccagagtggcagaaaggctgatgcagcagctccaccgggaactccacgcccacgcgcctcacttccaggtctccttactgcgtgtcaggagaggctaacggacatcagctgcagccaggcatgtcccgtatgccaaaagagggtgctgcccctagcctgggcccccaccgacagactgcagctgcgttactgtgctgagaggtacccagaaggttcccatgaagggcagcatgtccaagcccctaaccccagatgtggcaacaggaccctcgctcacatccaccggagtgtatgtatggggaggggcttcacctgttcccagaggtgtccttggactcaccttggcacatgttctgtgtttcagtaaagagagacctgatcacccatctgtgtgcttccatcctgcattaaaattcactcagtgtggcccaga

SEQ ID NO: 155603 - DNA, 2589 bp, Homo sapiens; identical to SEQ ID NO: 155595
  Payload ID: 10593
  Gene Symbol: MUC20
  Gene Name: mucin 20, cell surface associated
  Uniprot ID: Q8N307
  ENST ID: ENST00000615394
  CDS Start-End: 127-2256

SEQ ID NO: 155604 - DNA, 2326 bp, Homo sapiens; identical to SEQ ID NO: 155596
  Payload ID: 10593
  Gene Symbol: MUC20
  Gene Name: mucin 20, cell surface associated
  ENST ID: ENST00000618903
  CDS Start-End: 483-1994

SEQ ID NO: 155605 - DNA, 521 bp, Homo sapiens
  Payload ID: 10593
  Gene Symbol: MUC20
  Gene Name: mucin 20, cell surface associated
  ENST ID: ENST00000625530
  CDS Start-End: 1-385
accgaccatggacatcgcaaccaaggggcccttccccaccagcagggaccctcttccttctgtccctccgactacaaccaacagcagccgagggacgaacagcaccttagccaagatcacaacctcagcgaagaccacgatgaagcccccaacagccacgcccacgactgcccggacgaggccgaccacagacgtgagtgcaggtgaaaatggaggtttcctcctcctgtggctgagtgtggcttccccggaagacctcactgaccccagagtggcagaaaggctgatgcagcagttgatgacacagggcacccacagcgctcacgtgccttccatggtgggggtgaatcctttgccaatagtgcctggtgggtttcagcactgaataatattccatcgtctgaatgcaccataggttatttacccgttcacctgctgaaggacatcttggttgcttccaagttttggcaattatgaataaagctgctataaattatgaataaagctgctataaacctcca

SEQ ID NO: 155606 - DNA, 518 bp, Homo sapiens
  Payload ID: 10593
  Gene Symbol: MUC20
  Gene Name: mucin 20, cell surface associated
  ENST ID: ENST00000627326
  CDS Start-End: 1-382
gaccacggacatcgcaaccaaggggcccttccccaccagcagggaccctcttccttctgtccctccaactacaaccaacagcagccgagggacgaacagcaccttagccaagatcacaacctcagcgaagaccacgatgaagcccccaacagccacgcccacgactgcccggacgaggccgaccacagacatgagtgcaggtgaaaatggaggtttcctcctcctgcggctgagtgtggcttccccggaagacctcactgaccccagagtggcagaaaggctgatgcagcagttgatgacacagggcacccacagcgctcacgtgccttccatggtgggggtgaatcctttgccaatagtgcctggtgggtttcagtactgaataatattccatcgtctgaatgcaccataggttatttacccgttcacctgctgaaggacatcttggttgcttccaagttttggcaattatgaataaagctgctataaattatgaataaagctgctataaacctcca

SEQ ID NO: 155607 - DNA, 2842 bp, Homo sapiens; identical to SEQ ID NO: 155594
  Payload ID: 10593
  Gene Symbol: MUC20
  Gene Name: mucin 20, cell surface associated
  Uniprot ID: Q8N307
  ENST ID: ENST00000625274
  CDS Start-End: 483-2507

SEQ ID NO: 155608 - DNA, 2842 bp, Homo sapiens; identical to SEQ ID NO: 155594
  Payload ID: 10593
  Gene Symbol: MUC20
  Gene Name: mucin 20, cell surface associated
  Uniprot ID: Q8N307
  ENST ID: ENST00000627739
  CDS Start-End: 483-2507

SEQ ID NO: 155609 - DNA, 521 bp, Homo sapiens; identical to SEQ ID NO: 155593
  Payload ID: 10593
  Gene Symbol: MUC20
  Gene Name: mucin 20, cell surface associated
  ENST ID: ENST00000631327
  CDS Start-End: 1-385

SEQ ID NO: 155610 - DNA, 2842 bp, Homo sapiens; identical to SEQ ID NO: 155594
  Payload ID: 10593
  Gene Symbol: MUC20
  Gene Name: mucin 20, cell surface associated
  Uniprot ID: Q8N307
  ENST ID: ENST00000630334
  CDS Start-End: 483-2507

SEQ ID NO: 155611 - DNA, 2463 bp, Homo sapiens; identical to SEQ ID NO: 155592
  Payload ID: 10593
  Gene Symbol: MUC20
  Gene Name: mucin 20, cell surface associated
  ENST ID: ENST00000629777
  CDS Start-End: 125-2296

SEQ ID NO: 155612 - DNA, 2064 bp, Homo sapiens
  Payload ID: 10593
  Gene Symbol: MUC20
  Gene Name: mucin 20, cell surface associated
  ENST ID: ENST00000628575
  CDS Start-End: 124-1731
acatttgtgatcacctggtcacacacctgggcaggaggctgcccctccctggtttgaggaagcaggaaaaggtacccgcgagagacagccagcagttctgtggagcagcggtggccggctaggatgggctgtctctggggtctggctctgccccttttcttctgctgggaggttggggtctctgggagctctgcaggccccagcacccgcagagcagacactgcgatgacaacggacgacacagaagtgcccgctatgactctagcaccgggccacgccgctctggaaactcaaacgctgagcgctgagacctcttctagggcctcaaccccagccggccccattccagaagcagagaccaggggagccaagagaatttcccctgcaagagagaccaggagtttcacaaaaacatctcccaacttcatggtgctgatcgccacctccgtggagacatcagccgccagtggcagccccgagggagctggaatgaccacagttcagaccatcacaggcagtgatcccgaggaagccatctttgacaccctttgcaccgatgacatctctgaagaggcaaagacactcacaatggacatattgacattggctcacacctccacagaagctaagggcctgtcctcagagagcagcgcctcttccgacggcccccatccagtcatcaccccgtcacgggcctcagagagcagcgcctcttccgacggcccccatccagtcatcaccccgtcacgggcctcagagagcagcgcctcttccgacggcccccatccagtcatcaccccctcatggtccccgggatctgacgtcactctcctcgctgaagccctggtgactgtcacaaacatcgaggttattaattgcagcatcacagaaacaacaacttccagcatccctggggcctcagacatagatctcatccccacggaaggggtgaaggcctcgtccacctccgatccaccagctctgcctgactccactgaagcaaaaccacacatcactgaggtcacagcctctgccgagaccctgtccacagccggcaccacagagtcagctgcacctcatgccacggttgggaccccactccccactaacagcgccacagaaagagaagtgacagcacccggggccacgaccctcagtggagctctggtcacagttagcaggaatcccctggaagaaacctcagccctctctgttgagacaccaagttacgtcaaagtctcaggagcagctccggtctccatagaggctgggtcagcagtgggcaaaacaacttcctttgctgggagctctgcttcctcctacagcccctcggaagccgccctcaagaacttcaccccttcagagacaccgaccatggacatcgcaaccaaggggcccttccccaccagcagggaccctcttccttctgtccctccgactacaaccaacagcagccgagggacgaacagcaccttagccaagatcacaacctcagcgaagaccacgatgaagcccccaacagccacgcccacgactgcccggacgaggccgaccacagacgtgagtgcaggtgaaaatggaggtttcctcctcctgtggctgagtgtggcttccccggaagacctcactgaccccagagtggcagaaaggctgatgcagcagctccaccgggaactccacgcccacgcgcctcacttccaggtctccttactgcgtgtcaggagaggctaacggacatcagctgcagccaggcatgtcccgtatgccaaaagagggtgctgcccctagcctgggcccccaccgacagactgcagctgcgttactgtgctgagaggtacccagaaggttcccatgaagggcagcatgtccaagcccctaaccccagatgtggcaacaggaccctcgctcacatccaccggagtgtatgtatggggaggggcttcacctgttcccagaggtgtccttggactcaccttggcacatgttctgtgtttcagtaaagagagacctgatcacccatctgtgtgcttccatcctgcattaaaattcactcagtgtggccca

SEQ ID NO: 155613 - DNA, 2463 bp, Homo sapiens; identical to SEQ ID NO: 155592
  Payload ID: 10593
  Gene Symbol: MUC20
  Gene Name: mucin 20, cell surface associated
  ENST ID: ENST00000627975
  CDS Start-End: 125-2296

SEQ ID NO: 155614 - DNA, 521 bp, Homo sapiens; identical to SEQ ID NO: 155593
  Payload ID: 10593
  Gene Symbol: MUC20
  Gene Name: mucin 20, cell surface associated
  ENST ID: ENST00000626015
  CDS Start-End: 1-385

SEQ ID NO: 155615 - DNA, 2380 bp, Homo sapiens
  Payload ID: 10593
  Gene Symbol: MUC20
  Gene Name: mucin 20, cell surface associated
  ENST ID: ENST00000630313
  CDS Start-End: 483-2045
ggcctttctcgtcttttaagggtttttacttccatggggaactatgtgttggatgagaaaagtacccggggaaggcgacagaggttcagaaagctctgcgagtcctggacgctggtctgccttcttggctcaccctggaaggtggacgctggccccacacatcccctcttaaagacgcaggccgatagccagcagatcctggggcttgctggccccaagtgagttgtcagggtttcagaggacgccagtcatggcaaccccagctccatggctgccacacaggcctgggcttcccaggactgcctccttcttgttcgcttatgtagatgaaaaatgaggtaacggcactcccctgccccaccctcctcccagaagtgcccagggtgtaaatgcaatagcttgtgtgaagtccactggaacccaggctcaccaagtcagtcttaaccaacacaggccccagcacccgcagagcagacactgcgatgacaacggacgacacagaagtgcccgctatgactctagcaccgggccacgccgctctggaaactcaaacactgagcgctgagacctcttctagggcctcaaccccagccggccccgttccagaagcagagaccaggggatccaagagaatttcccctgcaagagagaccaggagtttcacaaaaacatctcccaacttcatggtgctgatcgccacctccgtggagacatcagccgccagtggcagccccgagggagctggaatgaccacagttcagaccatcacaggcagtgatcccgaggaagccatctttgacaccctttgcaccgatgacagctctgaagaggcaaagacactcacaatggacatattgacattggctcacacctccacagaagctaagggcctgtcctcagagagcagtgcctcttccgacggcccccatccagtcatcaccccgtcacgggcctcagagagcagcgcctcttccgacggcccccatccagtcatcaccccgtcacgggcctcagagagcagcgcctcttccgacggcccccatccagtcatcaccccgtcacgggcctcagagagcagcgcctcttccgacggcccccatccagtcatcaccccctcatggtccccgggatctgacgtcactctcctcgctgaagccctggtgactgtcacaaacatcgaggttattaattgcagcatcacagaaatagaaacaacgacttccagcatccctggggcctcagacacagatcccatccccacggaaggggtgaaggcctcgtccacctccgatccaccagctctgcctgactccactgaagcaaaaccacacatcactgaggtcacagcctctgccgagaccctgtccacagccggcaccacagagtcagctgcacctgatgccacgattgggaccccactccccaccaacagcaccatagaaagagaagtgacagcacccggggccacgaccctcagtggagctctggccacagggaatcccctggaagaaacctcagccctctctgttgagacaccaagttacgtcaaagtctcaggagcagctccggtctccatagaggctgggtcagcagtgggcaaaacaacttcctttgctgggagctctgcttcctcctacagcccctcggaagccgccctcaagaacttcaccccttcagagacactgaccacggacatcgcaaccaaggggcccttccccaccagcagggaccctcttccttctgtccctccaactacaaccaacagcagccgagggacgaacagcaccttagccaagatcacaacctcagcgaagaccacgatgaagcccccaacagccacgcccacgactgcccggacgaggccgaccacagacatgagtgcaggtgaaaatggaggtttcctcctcctgcggctgagtgtggcttccccggaagacctcactgaccccagagtggcagaaaggctgatgcagcagctccaccgggaactccacgcccacgcgcctcacttccaggtctccttactgcgtgtcaggagaggctaacggacatcagctgcagccaggcatgtcccgtatgccaaaagagggtgctgcccctagcctgggcccccaccgacagactgcagctgcgttactgtgctgagaggtacccagaaggttcccatgaagggcagcatgtccaagcccctgaccccagatgtggcaacaggaccctcgctcacatccaccggagtgtatgtgtggggaggggcttcacctgttcccagaggtgtccttggactcaccttggcacatgttctgtgtttcagtaaagagagacctgatcacccatctgtgtgcttccatcctgcattaaaattcactcagtgtggcccaga

SEQ ID NO: 155616 - DNA, 521 bp, Homo sapiens; identical to SEQ ID NO: 155593
  Payload ID: 10593
  Gene Symbol: MUC20
  Gene Name: mucin 20, cell surface associated
  ENST ID: ENST00000626524
  CDS Start-End: 1-385

SEQ ID NO: 155617 - DNA, 521 bp, Homo sapiens; identical to SEQ ID NO: 155593
  Payload ID: 10593
  Gene Symbol: MUC20
  Gene Name: mucin 20, cell surface associated
  ENST ID: ENST00000625420
  CDS Start-End: 1-385

SEQ ID NO: 155618 - DNA, 521 bp, Homo sapiens; identical to SEQ ID NO: 155593
  Payload ID: 10593
  Gene Symbol: MUC20
  Gene Name: mucin 20, cell surface associated
  ENST ID: ENST00000628313
  CDS Start-End: 1-385

SEQ ID NO: 155619 - DNA, 1950 bp, Homo sapiens
  Payload ID: 10593
  Gene Symbol: MUC20
  Gene Name: mucin 20, cell surface associated
  ENST ID: ENST00000626170
  CDS Start-End: 125-1783
atttgtgatcacctggtcacacacctgggcaggaggctgcccctcctccctggtttgaggaagcaggaaaaggtacccgcgagagacagccagcagttctgtggagcagcggtggccggctaggatgggctgtctctggggtctggctctgccccttttcttcttctgctgggaggttggggtctctgggagctctgcaggccccagcacccgcagagcagacactgcgatgacaacggacgacacagaagtgcccgctatgactctagcaccgggccacgccgctctggaaactcaaacgctgagcgctgagacctcttctagggcctcaaccccagccggccccattccagaagcagagaccaggggagccaagagaatttcccctgcaagagagaccaggagtttcacaaaaacatctcccaacttcatggtgctgatcgccacctccgtggagacatcagccgccagtggcagccccgagggagctggaatgaccacagttcagaccatcacaggcagtgatcccgaggaagccatctttgacaccctttgcaccgatgacagctctgaagaggcaaagacactcacaatggacatattgacattggctcacacctccacagaagctaagggcctgtcctcagagagcagtgcctcttccgacggcccccatccagtcatcaccccgtcacgggcctcagagagcagcgcctcttccgacggcccccatccagtcatcaccccgtcacgggcctcagagagcagcgcctcttccgacggcccccatccagtcatcaccccgtcatggtccccgggatctgatgtcactctcctcgctgaagccctggtgactgtcacaaacatcgaggttattaattgcagcatcacagaaatagaaacaacaacttccagcatccctggggcctcagacatagatctcatccccacggaaggggtgaaggcctcgtccacctccgatccaccagctctgcctgactccactgaagcaaaaccacacatcactgaggtcacagcctctgccgagaccctgtccacagccggcaccacagagtcagctgcacctcatgccacggttgggaccccactccccactaacagcgccacagaaagagaagtgacagcacccggggccacgaccctcagtggagctctggtcacagttagcaggaatcccctggaagaaacctcagccctctctgttgagacaccaagttacgtcaaagtctcaggagcagctccggtctccatagaggctgggtcagcagtgggcaaaacaacttcctttgctgggagctctgcttcctcctacagcccctcggaagccgccctcaagaacttcaccccttcagagacaccgaccatggacatcgcaaccaaggggcccttccccaccagcagggaccctcttccttctgtccctccgactacaaccaacagcagccgagggacgaacagcaccttagccaagatcacaacctcagcgaagaccacgatgaagcccccaacagccacgcccacgactgcccggacgaggccgaccacagacgtgagtgcaggtgaaaatggaggtttcctcctcctgcggctgagtgtggcttccccggaagacctcactgaccccagagtggcagaaaggctgatgcagcagatggaaaggagcctggctctgtcacccaggctggagtgcagtggcgtgatctcagctcactgcaagctccacctcttgggttcacgtgattctcctgcctcagcctcctgagtatctgggactacaggtgccaccaccatgctcggctaattttttgtatttttagtagagacggagtttcaccgtgtcagccagcctggtctcaaactcctgacctcaagtgatccacccacctcggcctcccaaagtgctgggattccagttaatgagcactgctc

SEQ ID NO: 155620 - DNA, 1938 bp, Homo sapiens
  Payload ID: 10593
  Gene Symbol: MUC20
  Gene Name: mucin 20, cell surface associated
  ENST ID: ENST00000629965
  CDS Start-End: 122-1771
atttgtgatcacctggtcacacacctgggcaggaggctgcccctccctggtttgaggaagcaggaaaaggtacccgcgagagacagccagcagttctgtggagcagcggtggccggctaggatgggctgtctctggggtctggctctgccccttttcttctgctgggaggttggggtctctgggagctctgcaggccccagcacccgcagagcagacactgcgatgacaacggacgacacagaagtgcccgctatgactctagcaccgggccacgccgctctggaaactcaaacgctgagcgctgagacctcttctagggcctcaaccccagccggccccattccagaagcagagaccaggggagccaagagaatttcccctgcaagagagaccaggagtttcacaaaaacatctcccaacttcatggtgctgatcgccacctccgtggagacatcagccgccagtggcagccccgagggagctggaatgaccacagttcagaccatcacaggcagtgatcccgaggaagccatctttgacaccctttgcaccgatgacatctctgaagaggcaaagacactcacaatggacatattgacattggctcacacctccacagaagctaagggcctgtcctcagagagcagcgcctcttccgacggcccccatccagtcatcaccccgtcacgggcctcagagagcagcgcctcttccgacggcccccatccagtcatcaccccgtcacgggcctcagagagcagcgcctcttccgacggcccccatccagtcatcaccccctcatggtccccgggatctgacgtcactctcctcgctgaagccctggtgactgtcacaaacatcgaggttattaattgcagcatcacagaaacaacaacttccagcatccctggggcctcagacatagatctcatccccacggaaggggtgaaggcctcgtccacctccgatccaccagctctgcctgactccactgaagcaaaaccacacatcactgaggtcacagcctctgccgagaccctgtccacagccggcaccacagagtcagctgcacctcatgccacggttgggaccccactccccactaacagcgccacagaaagagaagtgacagcacccggggccacgaccctcagtggagctctggtcacagttagcaggaatcccctggaagaaacctcagccctctctgttgagacaccaagttacgtcaaagtctcaggagcagctccggtctccatagaggctgggtcagcagtgggcaaaacaacttcctttgctgggagctctgcttcctcctacagcccctcggaagccgccctcaagaacttcaccccttcagagacaccgaccatggacatcgcaaccaaggggcccttccccaccagcagggaccctcttccttctgtccctccgactacaaccaacagcagccgagggacgaacagcaccttagccaagatcacaacctcagcgaagaccacgatgaagcccccaacagccacgcccacgactgcccggacgaggccgaccacagacgtgagtgcaggtgaaaatggaggtttcctcctcctgtggctgagtgtggcttccccggaagacctcactgaccccagagtggcagaaaggctgatgcagcagatggaaaggagcctggctctgtcacccaggctggagtgcagtggcgtgatctcagctcactgcaagctccacctcttgggttcacgtgattctcctgcctcagcctcctgagtatctgggactacaggtgccaccaccatgctcggctaattttttgtatttttagtagagacggagtttcaccgtgtcagccagcctggtctcaaactcctgacctcaagtgatccacccacctcggcctcccaaagtgctgggattccagttaatgagcaccgctc

SEQ ID NO: 155621 - DNA, 1950 bp, Homo sapiens; identical to SEQ ID NO: 155619
  Payload ID: 10593
  Gene Symbol: MUC20
  Gene Name: mucin 20, cell surface associated
  ENST ID: ENST00000630818
  CDS Start-End: 125-1783

SEQ ID NO: 155622 - DNA, 1998 bp, Homo sapiens
  Payload ID: 10593
  Gene Symbol: MUC20
  Gene Name: mucin 20, cell surface associated
  ENST ID: ENST00000627868
  CDS Start-End: 122-1831
atttgtgatcacctggtcacacacctgggcaggaggctgcccctccctggtttgaggaagcaggaaaaggtacccgcgagagacagccagcagttctgtggagcagcggtggccggctaggatgggctgtctctggggtctggctctgccccttttcttcttctgctgggaggttggggtctctgggagctctgcaggccccagcacccgcagagcagacactgcgatgacaacggacgacacagaagtgcccgctatgactctagcaccgggccacgccgctctggaaactcaaacactgagcgctgagacctcttctagggcctcaaccccagccggccccgttccagaagcagagaccaggggatccaagagaatttcccctgcaagagagaccaggagtttcacaaaaacatctcccaacttcatggtgctgatcgccacctccgtggagacatcagccgccagtggcagccccgagggagctggaatgaccacagttcagaccatcacaggcagtgatcccgaggaagccatctttgacaccctttgcaccgatgacagctctgaagaggcaaagacactcacaatggacatattgacattggctcacacctccacagaagctaagggcctgtcctcagagagcagtgcctcttccgacggcccccatccagtcatcaccccgtcacgggcctcagagagcagcgcctcttccgacggcccccatccagtcatcaccccgtcacgggcctcagagagcagcgcctcttccgacggcccccatccagtcatcaccccgtcacgggcctcagagagcagcgcctcttccgacggcccccatccagtcatcaccccctcatggtccccgggatctgacgtcactctcctcgctgaagccctggtgactgtcacaaacatcgaggttattaattgcagcatcacagaaatagaaacaacgacttccagcatccctggggcctcagacacagatcccatccccacggaaggggtgaaggcctcgtccacctccgatccaccagctctgcctgactccactgaagcaaaaccacacatcactgaggtcacagcctctgccgagaccctgtccacagccggcaccacagagtcagctgcacctgatgccacgattgggaccccactccccaccaacagcaccatagaaagagaagtgacagcacccggggccacgaccctcagtggagctctggccacagggaatcccctggaagaaacctcagccctctctgttgagacaccaagttacgtcaaagtctcaggagcagctccggtctccatagaggctgggtcagcagtgggcaaaacaacttcctttgctgggagctctgcttcctcctacagcccctcggaagccgccctcaagaacttcaccccttcagagacactgaccacggacatcgcaaccaaggggcccttccccaccagcagggaccctcttccttctgtccctccaactacaaccaacagcagccgagggacgaacagcaccttagccaagatcacaacctcagcgaagaccacgatgaagcccccaacagccacgcccacgactgcccggacgaggccgaccacagacatgagtgcaggtgaaaatggaggtttcctcctcctgcggctgagtgtggcttccccggaagacctcactgaccccagagtggcagaaaggctgatgcagcagatggaaaggagcctggctctgtcacccaggctggagtgcagtggcgtgatctcagctcactgcaagctccacctcttgggttcacgtgattctcctgcctcagcctcctgagtatctgggactacaggtgccaccaccatgctcggctaattttttgaatttttagtagagacggagtttcaccgtgtcagccagcctggtctcaaactcctgacctcaagtgatccacccacctcggcctcccaaagtgctgggattccagttaatgagcactgctc

SEQ ID NO: 155623 - DNA, 2076 bp, Homo sapiens
  Payload ID: 10593
  Gene Symbol: MUC20
  Gene Name: mucin 20, cell surface associated
  ENST ID: ENST00000627719
  CDS Start-End: 127-1743
acatttgtgatcacctggtcacacacctgggcaggaggctgcccctcctccctggtttgaggaagcaggaaaaggtacccgcgagagacagccagcagttctgtggagcagcggtggccggctaggatgggctgtctctggggtctggctctgccccttttcttcttctgctgggaggttggggtctctgggagctctgcaggccccagcacccgcagagcagacactgcgatgacaacggacgacacagaagtgcccgctatgactctagcaccgggccacgccgctctggaaactcaaacgctgagcgctgagacctcttctagggcctcaaccccagccggccccattccagaagcagagaccaggggagccaagagaatttcccctgcaagagagaccaggagtttcacaaaaacatctcccaacttcatggtgctgatcgccacctccgtggagacatcagccgccagtggcagccccgagggagctggaatgaccacagttcagaccatcacaggcagtgatcccgaggaagccatctttgacaccctttgcaccgatgacagctctgaagaggcaaagacactcacaatggacatattgacattggctcacacctccacagaagctaagggcctgtcctcagagagcagtgcctcttccgacggcccccatccagtcatcaccccgtcacgggcctcagagagcagcgcctcttccgacggcccccatccagtcatcaccccgtcacgggcctcagagagcagcgcctcttccgacggcccccatccagtcatcaccccgtcatggtccccgggatctgatgtcactctcctcgctgaagccctggtgactgtcacaaacatcgaggttattaattgcagcatcacagaaatagaaacaacaacttccagcatccctggggcctcagacatagatctcatccccacggaaggggtgaaggcctcgtccacctccgatccaccagctctgcctgactccactgaagcaaaaccacacatcactgaggtcacagcctctgccgagaccctgtccacagccggcaccacagagtcagctgcacctcatgccacggttgggaccccactccccactaacagcgccacagaaagagaagtgacagcacccggggccacgaccctcagtggagctctggtcacagttagcaggaatcccctggaagaaacctcagccctctctgttgagacaccaagttacgtcaaagtctcaggagcagctccggtctccatagaggctgggtcagcagtgggcaaaacaacttcctttgctgggagctctgcttcctcctacagcccctcggaagccgccctcaagaacttcaccccttcagagacaccgaccatggacatcgcaaccaaggggcccttccccaccagcagggaccctcttccttctgtccctccgactacaaccaacagcagccgagggacgaacagcaccttagccaagatcacaacctcagcgaagaccacgatgaagcccccaacagccacgcccacgactgcccggacgaggccgaccacagacgtgagtgcaggtgaaaatggaggtttcctcctcctgcggctgagtgtggcttccccggaagacctcactgaccccagagtggcagaaaggctgatgcagcagctccaccgggaactccacgcccacgcgcctcacttccaggtctccttactgcgtgtcaggagaggctaacggacatcagctgcagccaggcatgtcccgtatgccaaaagagggtgctgcccctagcctgggcccccaccgacagactgcagctgcgttactgtgctgagaggtacccagaaggttcccatgaagggcagcatgtccaagcccctaaccccagatgtggcaacaggaccctcgctcacatccaccggagtgtatgtatggggaggggcttcacctgttcccagaggtgtccttggactcaccttggcacatgttctgtgtttcagtaaagagagacctgatcacccatctgtgtgcttccatcctgcattaaaattcactcagtgtggccca

SEQ ID NO: 155624 - DNA, 2463 bp, Homo sapiens; identical to SEQ ID NO: 155592
  Payload ID: 10593
  Gene Symbol: MUC20
  Gene Name: mucin 20, cell surface associated
  ENST ID: ENST00000629752
  CDS Start-End: 125-2296

SEQ ID NO: 155625 - DNA, 2322 bp, Homo sapiens
  Payload ID: 10593
  Gene Symbol: MUC20
  Gene Name: mucin 20, cell surface associated
  ENST ID: ENST00000626408
  CDS Start-End: 482-1987
gcctttctcgtcttttaagggtttttacttccatggggaactatgtgttggatgagaaaagtacccggggaaggcgacagaggttcagaaagctctgcgagtcctggacgctggtctgccttcttggctcaccctggaaggtggacgctggccccacacatcccctcttaaagacgcaggccgatagccagcagatcctggggcttgctggccccaagtgagttgtcagggtttcagaggacgccagtcatggcaaccccagctccatggctgccacacaggcctgggcttcccaggactgcctccttcttgttcgcttatgtagatgaaaaatgaggtaacggcactcccctgccccaccctcctcccagaagtgcccagggtgtaaatgcaatagcttgtgtgaagtccactggaacccaggctcaccaagtcagtcttaaccaacacaggccccagcacccgcagagcagacactgcgatgacaacggacgacacagaagtgcccgctatgactctagcaccgggccacgccgctctggaaactcaaacgctgagcgctgagacctcttctagggcctcaaccccagccggccccattccagaagcagagaccaggggagccaagagaatttcccctgcaagagagaccaggagtttcacaaaaacatctcccaacttcatggtgctgatcgccacctccgtggagacatcagccgccagtggcagccccgagggagctggaatgaccacagttcagaccatcacaggcagtgatcccgaggaagccatctttgacaccctttgcaccgatgacatctctgaagaggcaaagacactcacaatggacatattgacattggctcacacctccacagaagctaagggcctgtcctcagagagcagcgcctcttccgacggcccccatccagtcatcaccccgtcacgggcctcagagagcagcgcctcttccgacggcccccatccagtcatcaccccgtcacgggcctcagagagcagcgcctcttccgacggcccccatccagtcatcaccccctcatggtccccgggatctgacgtcactctcctcgctgaagccctggtgactgtcacaaacatcgaggttattaattgcagcatcacagaaacaacaacttccagcatccctggggcctcagacatagatctcatccccacggaaggggtgaaggcctcgtccacctccgatccaccagctctgcctgactccactgaagcaaaaccacacatcactgaggtcacagcctctgccgagaccctgtccacagccggcaccacagagtcagctgcacctcatgccacggttgggaccccactccccactaacagcgccacagaaagagaagtgacagcacccggggccacgaccctcagtggagctctggtcacagttagcaggaatcccctggaagaaacctcagccctctctgttgagacaccaagttacgtcaaagtctcaggagcagctccggtctccatagaggctgggtcagcagtgggcaaaacaacttcctttgctgggagctctgcttcctcctacagcccctcggaagccgccctcaagaacttcaccccttcagagacaccgaccatggacatcgcaaccaaggggcccttccccaccagcagggaccctcttccttctgtccctccgactacaaccaacagcagccgagggacgaacagcaccttagccaagatcacaacctcagcgaagaccacgatgaagcccccaacagccacgcccacgactgcccggacgaggccgaccacagacgtgagtgcaggtgaaaatggaggtttcctcctcctgtggctgagtgtggcttccccggaagacctcactgaccccagagtggcagaaaggctgatgcagcagctccaccgggaactccacgcccacgcgcctcacttccaggtctccttactgcgtgtcaggagaggctaacggacatcagctgcagccaggcatgtcccgtatgccaaaagagggtgctgcccctagcctgggcccccaccgacagactgcagctgcgttactgtgctgagaggtacccagaaggttcccatgaagggcagcatgtccaagcccctaaccccagatgtggcaacaggaccctcgctcacatccaccggagtgtatgtatggggaggggcttcacctgttcccagaggtgtccttggactcaccttggcacatgttctgtgtttcagtaaagagagacctgatcacccatctgtgtgcttccatcctgcattaaaattcactcagtgtggcccaga

SEQ ID NO: 155626 - DNA, 2076 bp, Homo sapiens; identical to SEQ ID NO: 155623
  Payload ID: 10593
  Gene Symbol: MUC20
  Gene Name: mucin 20, cell surface associated
  ENST ID: ENST00000629220
  CDS Start-End: 127-1743

SEQ ID NO: 155627 - DNA, 3651 bp, Homo sapiens
  Payload ID: 10594
  Gene Symbol: MUC21
  Gene Name: mucin 21, cell surface associated
  Uniprot ID: Q5SSG8
  ENST ID: ENST00000376296
  CDS Start-End: 242-1942
agagaaagaggcaactacattgcctggaggaagcctaaggaacccaggcatccagctgcccacgcctgagtccaagattcttcccaggaacacaaacgtaggagacccacgctcctggaagcaccagcctttatctcttcaccttcaagtcccctttctcaagaatcctctgttctttgccctctaaagtcttggtacatctaggacccaggcatcttgctttccagccacaaagagacagatgaagatgcagaaaggaaatgttctccttatgtttggtctactattgcatttagaagctgcaacaaattccaatgagactagcacctctgccaacactggatccagtgtgatctccagtggagccagcacagccaccaactctgggtccagtgtgacctccagtggggtcagcacagccaccatctcagggtccagcgtgacctccaatggggtcagcatagtcaccaactctgagttccatacaacctccagtgggatcagcacagccaccaactctgagttcagcacagtgtccagtgggatcagcatagccaccaactctgagtccagcacaacctccagtggggccagcacagccaccaactctgagtccagcacaccctccagtggggccagcacagccaccaactctgactccagcacaacctccagtggggctagcacagccaccaactctgactccagcacaacctccagtgaggccagcacagccaccaactctgagtccagcacaacctccagtggggccagcacagccaccaactctgagtccagcacagtgtccagtagggccagcactgccaccaactctgagtccagcacaacctccagtggggccagcacagccaccaactctgagtccagaacgacctccaatggggctggcacagccaccaactctgagtccagcacgacctccagtggggccagcacagccaccaactctgagtccagcacaccctccagtggggccggcacagccaccaactctgagtccagcacgacctccagtggggccggcacagccaccaactctgagtccagcacagtgtccagtgggatcagcacagtcaccaattctgagtccagcacaccctccagtggggccaacacagccaccaactctgagtccagtacgacctccagtggggccaacacagccaccaactctgactccagcacaacctccagtggggccagcacagccaccaactctgagtccagcacgacctccagtggggccagcacagccaccaactctgagtccagcacaacctccagtggggccagcacagccaccaactctgggtccagcacgacctccagtgggaccagcacagccaccaactctgagtccagcacagtgtccagtggggccagcacagccaccacctctgagtccagcacgacctccagtggggccagcacagccaccaactctgagtccagcacagtgtccagtggggccagcactgccaccaattctgagtccagcacaacctccagtggggccaacacagccaccaactctgggtccagtgtgacctctgcaggctctggaacagcagctctgactggaatgcacacaacttcccatagtgcatctactgcagtgagtgaggcgaagcctggtgggtccctggtgccgtgggaaatcttcctcatcaccctggtctcggttgtggcggccgtggggctctttgctgggctcttcttctgtgtgagaaacagcctgtccctgagaaacacctttaacacagctgtctaccaccctcatggcctcaaccatggccttggtccaggccctggagggaatcatggagccccccacaggcccaggtggagtcctaactggttctggaggagaccagtatcctcgatagccatggagatgagcgggaggaacagcgggccctgagcagccccggaagcaagtgccgcattcttcaggaaggaagagacctgggcacccaagacctggtttcctttcattcatcccaggagacccctcccagctttgtttgagatcctgaaaatcttgaagaaggtattcctcacctttcttgcctttaccagacactggaaagagaatactatattgctcatttagctaagaaataaatacatctcatctaacacacacgacaaagagaagctgtgcgtgccccggggtgggtatctagctctgagatgaactcagttataggagaaaacctccatgctggactccatctggcattcaaaatctccacagtaaaatccaaagacctcattcttatctgtgtgtctgcattttctaatcctttttgccccaggcaaggtccctgtatctctgagacaccccgattggctggagaattgacttgggagagataaggagggagggcgggtgccagcatgctatgggctcctgcgtgaggcctgtggtacacagagattaggttgtgatacatgaagagccaagagcaggatgaggtggaggcgttacaactacctgctctgtgtgtggggggggaggggggaggggggtacgcatattcacttgaagtcgaggttcccagggcatttccatgtgctccaggcctgactacccatcagggtggaggagctggtgacactcatctccctgagtgctccctggtttcccaagggaaagactttctggcctgctgaggtcgaatcttccaagaggctcttgcaaagacccgagattctcataaatccccgcccagaagagctgcacgtatccctttcatgagtccagggaagagggtcctccaggtcttggaagacagaggggagctgctttagaggctaagttgctttgagcccacaaggtaatggagggctcctacttgggacagagccctcagcagagaattagcagtctgttggtgggttcaccccaactcacagcagtagaaactgctccatcttccaccacttattgggtttctccagtgtcagcaaaccaaagaattggatcttaccaatgcggctataggaaaacagcctgttgcatggtaagagtgataccatcttgaagtgaaaccaccacaatggccattttttttttagatggagttttgcagtggtgcaatcatagctcattgcagccttcaattcctgggctcaggcaatcctcctgcctcagcctcctgagtagctgggactacagtttcgtgtgccaccatgcctggctaatttttagaattttttgtagggacagggcctcactctgttgcacaagctggtcttgaactcctggcctccttgaactcctcctgccttggcctcccaaaatgctgagattacaggtgtgagccactgcacctcgccagatgtccaatgtctgactcctgcataccaaggtgttctgtatcaagggctttaaaacaatgcctgtagcgtaattaacctctcacaaagatgcttatctaacctccccagcagtcatgggtttcagcaagaaagtctgtgatgtgaccagttgcacatgttttcccctaaaagcttactctagaaaggatattttttggagagggagtgtgggaatccaccatcttgtggccacctcagacatcacttctctttggaagactccattaaatatttctctgtgagaaa

SEQ ID NO: 155628 - DNA, 3831 bp, Homo sapiens
  Payload ID: 10594
  Gene Symbol: MUC21
  Gene Name: mucin 21, cell surface associated
  ENST ID: ENST00000383535
  CDS Start-End: 242-2122
agagaaagaggcaactacattgcctggaggaagcctaaggaacccaggcatccagctgcccacgcctgagtccaagattcttcccaggaacacaaacgtaggagacccacgctcctggaagcaccagcctttatctcttcaccttcaagtcccctttctcaagaatcctctgttctttgccctctaaagtcttggtacatctaggacccaggcatcttgctttccagccacaaagagacagatgaagatgcagaaaggaaatgttctccttatgtttggtctactattgcatttagaagctgcaacaaattccaatgagactagcacctctgccaacactggatccagtgtgatctccagtggagccagcacagccaccaactctgggtccagtgtgacctccagtggggtcagcacagccaccatctcagggtccagcgtgacctccaatggggtcagcatagtcaccaactctgagttccatacaacctccagtgggatcagcacagccaccaactctgagttcagcacagcgtccagtgggatcagcatagccaccaactctgagtccagcacaacctccagtggggccagcacagccaccaactctgagtccagcacaccctccagtggggccagcacagtcaccaactctgggtccagtgtgacctccagtggagccagcactgccaccaactctgagtccagcacagtgtccagtagggccagcactgccaccaactctgagtctagcacactctccagtggggccagcacagccaccaactctgactccagcacaacctccagtggggctagcacagccaccaactctgagtccagcacaacctccagtggggccagcacagccaccaactctgagtccagcacagtgtccagtagggccagcactgccaccaactctgagtccagcacaacctccagtggggccagcacagccaccaactctgagtccagaacgacctccaatggggctggcacagccaccaactctgagtccagcacgacctccagtggggccagcacagccaccaactctgactccagcacagtgtccagtggggccagcactgccaccaactctgagtccagcacgacctccagtggggctagcacagccaccaactctgactccagcacaacctccagtggggccggcacagccaccaactctgagtccagcacgacctccagtggggccagcacagccaccaactctgagtccagcacgacctccagtggggctagcacagccaccaactctgactccagcacaacctccagtggggccggcacagccaccaactctgagtccagcacagtgtccagtgggatcagcacagtcaccaattctgagtccagcacaccctccagtggggccaacacagccaccaactctgagtccagtacgacctccagtggggccaacacagccaccaactctgagtccagcacagtgtccagtggggccagcactgccaccaactctgagtccagcacaacctccagtggggtcagcacagccaccaactctgagtccagcacaacctccagtggggctagcacagccaccaactctgactccagcacaacctccagtgaggccagcacagccaccaactctgagtctagcacagtgtccagtgggatcagcacagtcaccaattctgagtccagcacaacctccagtggggccaacacagccaccaactctgggtccagtgtgacctctgcaggctctggaacagcagctctgactggaatgcacacaacttcccatagtgcatctactgcagtgagtgaggcaaagcctggtgggtccctggtgccgtgggaaatcttcctcatcaccctggtctcggttgtggcggccgtggggctctttgctgggctcttcttctgtgtgagaaacagcctgtccctgagaaacacctttaacacagctgtctaccaccctcatggcctcaaccatggccttggtccaggccctggagggaatcatggagccccccacaggcccaggtggagtcctaactggttctggaggagaccagtatcatcgatagccatggagatgagcgggaggaacagcgggccctgagcagccccggaagcaagtgccgcattcttcaggaaggaagagacctgggcacccaagacctggtttcctttcattcatcccaggagacccctcccagctttgtttgagatcctgaaaatcttgaagaaggtattcctcacctttcttgcctttaccagacactggaaagagaatactatattgctcatttagctaagaaataaatacatctcatctaacacacacgacaaagagaagctgtgcttgccccggggtgggtatctagctctgagatgaactcagttataggagaaaacctccatgctggactccatctggcattcaaaatctccacagtaaaatccaaagacctcattcttatctgtgtgtctgcattttctaatcctttttgccccaggcaaggtccctgtatctctgagacaccccgattggctggagaattgacttgggagagataaggagggagggcgggtgccagcatgctatgggctcctgcgtgaggcctgtggtacacagagattaggttgtgatacatgaagagccaagagcaggatgaggtggaggcgttacaactacctgctctgtgtgtggggggggagtggggaggggggtacgcatattcacttgaagtcgaggttcccagggcatttccatgtgctccaggcctgactacccatcagggtggaggagctggtgacactcatctccctgagtgctccctggtttcccaagggaaagactttctggcctgctgaggtcgaatcttccaagaggctcttgcaaagacccgagattctcataaatccctgcccagaagagctgcacgtatccctttcatgagtccagggaagagggtcctccaggtcttggaagacagaggggagctgctttagaggctaagttgctttgagcccacaaggtaatggagggctcctacttgggacagagccctcagcagagaattagcagtctgttggtgggttcaccccaactcacagcagtagaaactgctccatcttccaccacttattgggtttctccagtgtcagcaaaccaaagaattggatcttaccaatgcggctataggaaaacagcctgttgcatggtaagagtgataccatcttgaagtgaaaccaccacaatggccattttttttttagatggagttttgcagtggtgcaatcatagctcattgcagccttcaattcctgggctcaggcaatcctcctgcctcagcctcctgagtagctgggactacagtttcgtgtgccaccatgcctggctaatttttagaattttttgtagggacagggcctcactctgttgcacaagctggtcttgaactcctggcctccttgaactcctcctgccttcgcctcccaaagtgctgagattacaggtgtgagccactgcacctcgccagatgtccaatgtctgactcctgcataccaaggtgttctgtatcaagggctttaaaacaatgcctgtagcgtaattaacctctcacaaagatgcttatctaacctccccagcagtcatgggtttcagcaagaaagtctgtgatgtgaccagttgcacatgttttcccctaaaagcttactctagaaaggatattttttggagagggagtgtgggaatccaccatcttgtggccacctcagacatcacttctctttggaagactccattaaatatttctctgtgagaaa

SEQ ID NO: 155629 - DNA, 3651 bp, Homo sapiens
  Payload ID: 10594
  Gene Symbol: MUC21
  Gene Name: mucin 21, cell surface associated
  ENST ID: ENST00000451480
  CDS Start-End: 242-1942
agagaaagaggcaactacattgcctggaggaagcctaaggaacccaggcatccagctgcccacgcccgagtccaagattcttcccaggaacacaaacgtaggagacccacgctcctggaagcaccagcctttatctcttcaccttcaagtcccctttctcaagaatcctctgttctttgccctctaaagtcttggtacatctaggacccaggcatcttgctttccagccacaaagagacagatgaagatgcagaaaggaaatgttctccttatgtttggtctactattgcatttagaagctgcaacaaattccaatgagactagcacctctgccaacactggatccagtgtgatctccagtggagccagcacagccaccaactctgggtccagtgtgacctccagtggggtcagcacagccaccatctcagggtccagcgtgacctccaatggggtcagcatagtcaccaactctgagttccatacaacctccagtgggatcagcacagccaccaactctgagttcagcacagcgtccagtgggatcagcatagccaccaactctgagtccagcacaacctccagtggggccagcacagccaccaactctgagtccagcacaccctccagtggggccagcacagccaccaactctgactccagcacaacctccagtggggctagcacagccaccaactctgactccagcacaacctccagtgaggccagcacagccaccaactctgagtccagcacaacctccagtggggccagcacagccaccaactctgagtccagcacagtgtccagtagggccagcactgccaccaactctgagtccagcacaacctccagtggggccagcacagccaccaactctgagtccagaacgacctccaatggggctggcacagccaccaactctgagtccagcacgacctccagtggggccagcacagccaccaactctgagtccagcacaccctccagtggggccggcacagccaccaactctgagtccagcacgacctccagtggggccggcacagccaccaactctgagtccagcacagtgtccagtgggatcagcacagtcaccaattctgagtccagcacaccctccagtggggccaacacagccaccaactctgagtccagtacaacctccagtggggccaacacagccaccaactctgactccagcacaacctccagtggggccagcacagccaccaactctgagtccagcacgacctccagtggggccagcacagccaccaactctgagtccagcacaacctccagtggggccagcacagccaccaactctgggtccagcacgacctccagtgggaccagcacagccaccaactctgagtccagcacagtgtccagtggggccagcacagccaccacctctgagtccagcacgacctccagtggggccagcacagccaccaactctgagtccagcacagtgtccagtggggccagcactgccaccaattctgagtccagcacaacctccagtggggccaacacagccaccaactctgggtccagtgtgacctctgcaggctctggaacagcagctctgactggaatgcacacaacttcccatagtgcatctactgcagtgagtgaggcgaagcctggtgggtccctggtgccgtgggaaatcttcctcatcaccctggtctcggttgtggcggccgtggggctctttgctgggctcttcttctgtgtgagaaacagcctgtccctgagaaacacctttaacacagctgtctaccaccctcatggcctcaaccatggccttggtccaggccctggagggaatcatggagccccccacaggcccaggtggagtcctaactggttctggaggagaccagtatcctcgatagccatggagatgagcgggaggaacagcgggccctgagcagccccggaagcaagtgccgcattcttcaggaaggaagagacctgggcacccaagacctggtttcctttcattcatcccaggagacccctcccagctttgtttgagatcctgaaaatcttgaagaaggtattcctcacctttcttgcctttaccagacactggaaagagaatactatattgctcatttagctaagaaataaatacatctcatctaacacacacgacaaagagaagctgtgcgtgccccggggtgggtatctagctctgagatgaactcagttataggagaaaacctccatgctggactccatctggcattcaaaatctccacagtaaaatccaaagacctcattcttatctgtgtgtctgcattttctaatcctttttgccccaggcaaggtccctgtatctctgagacaccccgattggctggagaattgacttgggagagataaggagggagggcgggtgccagcatgctatgggctcctgcgtgaggcctgtggtacacagagattaggttgtgatacatgaagagccaagagcaggatgaggtggaggcgttacaactacctgctctgtgtgtggggggggaggggggaggggggtacgcatattcacttgaagtcgaggttcccagggcatttccatgtgctccaggcctgactacccatcagggtggaggagctggtgacactcatctccctgagtgctccctggtttcccaagggaaagactttctggcctgctgaggtcgaatcttccaagaggctcttgcaaagacccgagattctcataaatccccgcccagaagagctgcacgtatccctttcatgagtccagggaagagggtcctccaggtcttggaagacagaggggagctgctttagaggctaagttgctttgagcccacaaggtaatggagggctcctacttgggacagagccctcagcagagaattagcagtctgttggtgggttcaccccaactcacagcagtagaaactgctccatcttccaccacttattgggtttctccagtgtcagcaaaccaaagaattggatcttaccaatgcggctataggaaaacagcctgttgcatggtaagagtgataccatcttgaagtgaaaccaccacaatggccattttttttttagatggagttttgcagtggtgcaatcatagctcattgcagccttcaattcctgggctcaggcaatcctcctgcctcagcctcctgagtagctgggactacagtttcgtgtgccaccatgcctggctaatttttagaattttttgtagggacagggcctcactctgttgcacaagctggtcttgaactcctggcctccttgaactcctcctgccttggcctcccaaaatgctgagattacaggtgtgagccactgcacctcgccagatgtccaatgtctgactcctgcataccaaggtgttctgtatcaagggctttaaaacaatgcctgtagcgtaattaacctctcacaaagatgcttatctaacctccccagcagtcatgggtttcagcaagaaagtctgtgatgtgaccagttgcacatgttttcccctaaaagcttactctagaaaggatattttttggagagggagtgtgggaatccaccatcctgtggccacctcagacatcacttctctttggaagactccattaaatatttctctgtgagaaa

SEQ ID NO: 155630 - DNA, 3651 bp, Homo sapiens
  Payload ID: 10594
  Gene Symbol: MUC21
  Gene Name: mucin 21, cell surface associated
  ENST ID: ENST00000440457
  CDS Start-End: 242-1942
agagaaagaggcaactacattgcctggaggaagcctaaggaacccaggcatccagctgcccacgcctgagtccaagattcttcccaggaacacaaacgtaggagacccacgctcctggaagcaccagcctttatctcttcaccttcaagtcccctttctcaagaatcctctgttctttgccctctaaagtcttggtacatctaggacccaggcatcttgctttccagccacaaagagacagatgaagatgcagaaaggaaatgttctccttatgtttggtctactattgcatttagaagctgcaacaaattccaatgagactagcacctctgccaacactggatccagtgtgatctccagtggagccagcacagccaccaactctgggtccagtgtgacctccagtggggtcagcacagccaccatctcagggtccagcgtgacctccaatggggtcagcatagtcaccaactctgagttccatacaacctccagtgggatcagcacagccaccaactctgagttcagcacagcgtccagtgggatcagcatagccaccaactctgagtccagcacaacctccagtggggccagcacagccaccaactctgagtccagcacaccctccagtggggccagcacagccaccaactctgactccagcacaacctccagtggggctagcacagccaccaactctgactccagcacaacctccagtgaggccagcacagccaccaactctgagtccagcacaacctccagtggggccagcacagccaccaactctgagtccagcacagtgtccagtagggccagcactgccaccaactctgagtccagcacaacctccagtggggccagcacagccaccaactctgagtccagaacgacctccaatggggctggcacagccaccaactctgagtccagcacgacctccagtggggccagcacagccaccaactctgagtccagcacaccctccagtggggccggcacagccaccaactctgagtccagcacgacctccagtggggccggcacagccaccaactctgagtccagcacagtgtccagtgggatcagcacagtcaccaattctgagtccagcacaccctccagtggggccaacacagccaccaactctgagtccagtacgacctccagtggggccaacacagccaccaactctgactccagcacaacctccagtggggccagcacagccaccaactctgagtccagcacgacctccagtggggccagcacagccaccaactctgagtccagcacaacctccagtggggccagcacagccaccaactctgggtccagcacgacctccagtgggaccagcacagccaccaactctgagtccagcacagtgtccagtggggccagcacagccaccacctctgagtccagcacgacctccagtggggccagcacagccaccaactctgagtccagcacagtgtccagtggggccagcactgccaccaattctgagtccagcacaacctccagtggggccaacacagccaccaactctgggtccagtgtgacctctgcaggctctggaacagcagctctgactggaatgcacacaacttcccatagtgcatctactgcagtgagtgaggcgaagcctggtgggtccctggtgccgtgggaaatcttcctcatcaccctggtctcggttgtggcggccgtggggctctttgctgggctcttcttctgtgtgagaaacagcctgtccctgagaaacacctttaacacagctgtctaccaccctcatggcctcaaccatggccttggtccaggccctggagggaatcatggagccccccacaggcccaggtggagtcctaactggttctggaggagaccagtatcctcgatagccatggagatgagcgggaggaacagcgggccctgagcagccccggaagcaagtgccgcattcttcaggaaggaagagacctgggcacccaagacctggtttcctttcattcatcccaggagacccctcccagctttgtttgagatcctgaaaatcttgaagaaggtattcctcacctttcttgcctttaccagacactggaaagagaatactatattgctcatttagctaagaaataaatacatctcatctaacacacacgacaaagagaagctgtgcgtgccccggggtgggtatctagctctgagatgaactcagttataggagaaaacctccatgctggactccatctggcattcaaaatctccacagtaaaatccaaagacctcattcttatctgtgtgtctgcattttctaatcctttttgccccaggcaaggtccctgtatctctgagacaccccgattggctggagaattgacttgggagagataaggagggagggcgggtgccagcatgctatgggctcctgcgtgaggcctgtggtacacagagattaggttgtgatacatgaagagccaagagcaggatgaggtggaggcgttacaactacctgctctgtgtgtggggggggaggggggaggggggtacgcatattcacttgaagtcgaggttcccagggcatttccatgtgctccaggcctgactacccatcagggtggaggagctggtgacactcatctccctgagtgctccctggtttcccaagggaaagactttctggcctgctgaggtcgaatcttccaagaggctcttgcaaagacccgagattctcataaatccccgcccagaagagctgcacgtatccctttcatgagtccagggaagagggtcctccaggtcttggaagacagaggggagctgctttagaggctaagttgctttgagcccacaaggtaatggagggctcctacttgggacagagccctcagcagagaattagcagtctgttggtgggttcaccccaactcacagcagtagaaactgctccatcttccaccacttattgggtttctccagtgtcagcaaaccaaagaattggatcttaccaatgcggctataggaaaacagcctgttgcatggtaagagtgataccatcttgaagtgaaaccaccacaatggccattttttttttagatggagttttgcagtggtgcaatcatagctcattgcagccttcaattcctgggctcaggcaatcctcctgcctcagcctcctgagtagctgggactacagtttcgtgtgccaccatgcctggctaatttttagaattttttgtagggacagggcctcactctgttgcacaagctggtcttgaactcctggcctccttgaactcctcctgccttggcctcccaaaatgctgagattacaggtgtgagccactgcacctcgccagatgtccaatgtctgactcctgcataccaaggtgttctgtatcaagggctttaaaacaatgcctgtagcgtaattaacctctcacaaagatgcttatctaacctccccagcagtcatgggtttcagcaagaaagtctgtgatgtgaccagttgcacatgttttcccctaaaagcttactctagaaaggatattttttggagagggagtgtgggaatccaccatcttgtggccacctcagacatcacttctctttggaagactccattaaatatttctctgtgagaaa

SEQ ID NO: 155631 - DNA, 3651 bp, Homo sapiens
  Payload ID: 10594
  Gene Symbol: MUC21
  Gene Name: mucin 21, cell surface associated
  ENST ID: ENST00000420532
  CDS Start-End: 242-1942
agagaaagaggcaactacattgcctggaggaagcctaaggaacccaggcatccagctgcccacgcctgagtccaagattcttcccaggaacacaaacgtaggagacccacgctcctggaagcaccagcctttatctcttcaccttcaagtcccctttctcaagaatcctctgttctttgccctctaaagtcttggtacatctaggacccaggcatcttgctttccagccacaaagagacagatgaagatgcagaaaggaaatgttctccttatgtttggtctactattgcatttagaagctgcaacaaattccaatgagactagcacctctgccaacactggatccagtgtgatctccagtggagccagcacagccaccaactctgggtccagtgtgacctccagtggggtcagcacagccaccatctcagggtccagcgtgacctccaatggggtcagcatagtcaccaactctgagttccatacaacctccagtgggatcagcacagccaccaactctgagttcagcacagtgtccagtgggatcagcatagccaccaactctgagtccagcacaacctccagtggggccagcacagccaccaactctgagtccagcacaccctccagtggggccagcacagccaccaactctgactccagcacaacctccagtggggctagcacagccaccaactctgactccagcacaacctccagtgaggccagcacagccaccaactctgagtccagcacaacctccagtggggccagcacagtcaccaactctgagtccagcacagtgtccagtagggccagcactgccaccaactctgagtccagcacaacctccagtggggccagcacagccaccaactctgagtccagaacgacctccaatggggctggcacagccaccaactctgagtccagcacgacctccagtggggccagcacagccaccaactctgagtccagcacaccctccagtggggccggcacagccaccaactctgagtccagcacgacctccagtggggccggcacagccaccaactctgagtccagcacagtgtccagtgggatcagcacagtcaccaattctgagtccagcacaccctccagtggggccaacacagccaccaactctgagtccagtacgacctccagtggggccaacacagccaccaactctgactccagcacaacctccagtggggccagcacagccaccaactctgagtccagcacgacctccagtggggccagcacagccaccaactctgagtccagcacaacctccagtggggccagcacagccaccaactctgggtccagcacgacctccagtgggaccagcacagccaccaactctgagtccagcacagtgtccagtggggccagcacagccaccacctctgagtccagcacgacctccagtggggccagcacagccaccaactctgagtccagcacagtgtccagtggggccagcactgccaccaattctgagtccagcacaacctccagtggggccaacacagccaccaactctgggtccagtgtgacctctgcaggctctggaacagcagctctgactggaatgcacacaacttcccatagtgcatctactgcagtgagtgaggcgaagcctggtgggtccctggtgccgtgggaaatcttcctcatcaccctggtctcggttgtggcggccgtggggctctttgctgggctcttcttctgtgtgagaaacagcctgtccctgagaaacacctttaacacagctgtctaccaccctcatggcctcaaccatggccttggtccaggccctggagggaatcatggagccccccacaggcccaggtggagtcctaactggttctggaggagaccagtatcctcgatagccatggagatgagcgggaggaacagcgggccctgagcagccccggaagcaagtgccgcattcttcaggaaggaagagacctgggcacccaagacctggtttcctttcattcatcccaggagacccctcccagctttgtttgagatcctgaaaatcttgaagaaggtattcctcacctttcttgcctttaccagacactggaaagagaatactatattgctcatttagctaagaaataaatacatctcatctaacacacacgacaaagagaagctgtgcgtgccccggggtgggtatctagctctgagatgaactcagttataggagaaaacctccatgctggactccatctggcattcaaaatctccacagtaaaatccaaagacctcattcttatctgtgtgtctgcattttctaatcctttttgccccaggcaaggtccctgtatctctgagacaccccgattggctggagaattgacttgggagagataaggagggagggcgggtgccagcatgctatgggctcctgcgtgaggcctgtggtacacagagattaggttgtgatacatgaagagccaagagcaggatgaggtggaggcgttacaactacctgctctgtgtgtggggggggaggggggaggggggtacgcatattcacttgaagtcgaggttcccagggcatttccatgtgctccaggcctgactacccatcagggtggaggagctggtgacactcatctccctgagtgctccctggtttcccaagggaaagactttctggcctgctgaggtcgaatcttccaagaggctcttgcaaagacccgagattctcataaatccccgcccagaagagctgcacgtatccctttcatgagtccagggaagagggtcctccaggtcttggaagacagaggggagctgctttagaggctaagttgctttgagcccacaaggtaatggagggctcctacttgggacagagccctcagcagagaattagcagtctgttggtgggttcaccccaactcacagcagtagaaactgctccatcttccaccacttattgggtttctccagtgtcagcaaaccaaagaattggatcttaccaatgcggctataggaaaacagcctgttgcatggtaagagtgataccatcttgaagtgaaaccaccacaatggccattttttttttagatggagttttgcagtggtgcaatcatagctcattgcagccttcaattcctgggctcaggcaatcctcctgcctcagcctcctgagtagctgggactacagtttcgtgtgccaccatgcctggctaatttttagaattttttgtagggacagggcctcactctgttgcacaagctggtcttgaactcctggcctccttgaactcctcctgccttggcctcccaaaatgctgagattacaggtgtgagccactgcacctcgccagatgtccaatgtctgactcctgcataccaaggtgttctgtatcaagggctttaaaacaatgcctgtagcgtaattaacctctcacaaagatgcttatctaacctccccagcagtcatgggtttcagcaagaaagtctgtgatgtgaccagttgcacatgttttcccctaaaagcttactctagaaaggatattttttggagagggagtgtgggaatccaccatcttgtggccacctcagacatcacttctctttggaagactccattaaatatttctctgtgagaaa

SEQ ID NO: 155632 - DNA, 3651 bp, Homo sapiens; identical to SEQ ID NO: 155630
  Payload ID: 10594
  Gene Symbol: MUC21
  Gene Name: mucin 21, cell surface associated
  ENST ID: ENST00000430305
  CDS Start-End: 242-1942

SEQ ID NO: 155633 - DNA, 3741 bp, Homo sapiens
  Payload ID: 10594
  Gene Symbol: MUC21
  Gene Name: mucin 21, cell surface associated
  ENST ID: ENST00000457728
  CDS Start-End: 242-2032
agagaaagaggcaactacattgcctggaggaagcctaaggaacccaggcatccagctgcccacgcctgagtccaagattcttcccaggaacacaaacgtaggagacccacgctcctggaagcaccagcctttatctcttcaccttcaagtcccctttctcaagaatcctctgttctttgccctctaaagtcttggtacatctaggacccaggcatcttgctttccagccacaaagagacagatgaagatgcagaaaggaaatgttctccttatgtttggtctactattgcatttagaagctgcaacaaattccaatgagactagcacctctgccaacactggatccagtgtgatctccagtggagccagcacagccaccaactctgggtccagtgtgacctccagtggggtcagcacagccaccatctcagggtccagcgtgacctccaatggggtcagcatagtcaccaactctgagttccatacaacctccagtgggatcagcacagccaccaactctgagttcagcacagcgtccagtgggatcagcatagccaccaactctgagtccagcacaacctccagtggggccagcacagccaccaactctgagtccagcacaccctccagtggggccagcacagtcaccaactctgggtccagtgtgacctccagtggagccagcactgccaccaactctgagtccagcacagtgtccagtagggccagcactgccaccaactctgagtctagcacactctccagtggggccagcacagccaccaactctgactccagcacaacctccagtggggctagcacagccaccaactctgagtccagcacaacctccagtggggccagcacagccaccaactctgagtccagcacagtgtccagtagggccagcactgccaccaactctgagtccagcacaacctccagtggggccagcacagccaccaactctgagtccagaacgacctccaatggggctggcacagccaccaactctgagtccagcacgacctccagtggggccagcacagccaccaactctgactccagcacagtgtccagtggggccagcactgccaccaactctgagtccagcacgacctccagtggggccagcacagccaccaactctgagtccagcacgacctccagtggggctagcacagccaccaactctgactccagcacaacctccagtggggccggcacagccaccaactctgagtccagcacagtgtccagtgggatcagcacagtcaccaattctgagtccagcacaccctccagtggggccaacacagccaccaactctgagtccagtacgacctccagtggggccaacacagccaccaactctgagtccagcacagtgtccagtggggccagcactgccaccaactctgagtccagcacaacctccagtggggtcagcacagccaccaactctgagtccagcacaacctccagtggggctagcacagccaccaactctgactccagcacaacctccagtgaggccagcacagccaccaactctgagtctagcacagtgtccagtgggatcagcacagtcaccaattctgagtccagcacaacctccagtggggccaacacagccaccaactctgggtccagtgtgacctctgcaggctctggaacagcagctctgactggaatgcacacaacttcccatagtgcatctactgcagtgagtgaggcaaagcctggtgggtccctggtgccgtgggaaatcttcctcatcaccctggtctcggttgtggcggccgtggggctctttgctgggctcttcttctgtgtgagaaacagcctgtccctgagaaacacctttaacacagctgtctaccaccctcatggcctcaaccatggccttggtccaggccctggagggaatcatggagccccccacaggcccaggtggagtcctaactggttctggaggagaccagtatcatcgatagccatggagatgagcgggaggaacagcgggccctgagcagccccggaagcaagtgccgcattcttcaggaaggaagagacctgggcacccaagacctggtttcctttcattcatcccaggagacccctcccagctttgtttgagatcctgaaaatcttgaagaaggtattcctcacctttcttgcctttaccagacactggaaagagaatactatattgctcatttagctaagaaataaatacatctcatctaacacacacgacaaagagaagctgtgcttgccccggggtgggtatctagctctgagatgaactcagttataggagaaaacctccatgctggactccatctggcattcaaaatctccacagtaaaatccaaagacctcattcttatctgtgtgtctgcattttctaatcctttttgccccaggcaaggtccctgtatctctgagacaccccgattggctggagaattgacttgggagagataaggagggagggcgggtgccagcatgctatgggctcctgcgtgaggcctgtggtacacagagattaggttgtgatacatgaagagccaagagcaggatgaggtggaggcgttacaactacctgctctgtgtgtggggggggaggggggaggggggtacgcatattcacttgaagtcgaggttcccagggcatttccatgtgctccaggcctgactacccatcagggtggaggagctggtgacactcatctccctgagtgctccctggtttcccaagggaaagactttctggcctgctgaggtcgaatcttccaagaggctcttgcaaagacccgagattctcataaatccctgcccagaagagctgcacgtatccctttcatgagtccagggaagagggtcctccaggtcttggaagacagaggggagctgctttagaggctaagttgctttgagcccacaaggtaatggagggctcctacttgggacagagccctcagcagagaattagcagtctgttggtgggttcaccccaactcacagcagtagaaactgctccatcttccaccacttattgggtttctccagtgtcagcaaaccaaagaattggatcttaccaatgcggctataggaaaacagcctgttgcatggtaagagtgataccatcttgaagtgaaaccaccacaatggccattttttttttagatggagttttgcagtggtgcaatcatagctcattgcagccttcaattcctgggctcaggcaatcctcctgcctcagcctcctgagtagctgggactacagtttcgtgtgccaccatgcctggctaatttttagaattttttgtagggacagggcctcactctgttgcacaagctggtcttgaactcctggcctccttgaactcctcctgccttcgcctcccaaagtgctgagattacaggtgtgagccactgcacctcgccagatgtccaatgtctgactcctgcataccaaggtgttctgtatcaagggctttaaaacaatgcctgtagcgtaattaacctctcacaaagatgcttatctaacctccccagcagtcatgggtttcagcaagaaagtctgtgatgtgaccagttgcacatgttttcccctaaaagcttactctagaaaggatattttttggagagggagtgtgggaatccaccatcttgtggccacctcagacatcacttctctttggaagactccattaaatatttctctgtgagaaa

SEQ ID NO: 155634 - DNA, 3656 bp, Homo sapiens
  Payload ID: 10594
  Gene Symbol: MUC21
  Gene Name: mucin 21, cell surface associated
  ENST ID: ENST00000551904
  CDS Start-End: 252-1952
ctttcacaacagagaaagaggcaactacattgcctggaggaagcctaaggaacccaggcatccagctgcccacgcctgagtccaagattcttcccaggaacacaaacgtaggagacccacgctcctggaagcaccagcctttatctcttcaccttcaagtcccctttctcaagaatcctctgttctttgccctctaaagtcttggtacatctaggacccaggcatcttgctttccagccacaaagagacagatgaagatgcagaaaggaaatgttctccttatgtttggtctactattgcatttagaagctgcaacaaattccaatgagactagcacctctgccaacactggatccagtgtgatctccagtggagccagcacagccaccaactctgggtccagtgtgacctccagtggggtcagcacagccaccatctcagggtccagcgtgacctccaatggggtcagcatagtcaccaactctgagttccatacaacctccagtgggatcagcacagccaccaactctgagttcagcacagcgtccagtgggatcagcatagccaccaactctgagtccagcacaacctccagtggggccagcacagccaccaactctgagtccagcacaccctccagtggggccagcactgccaccaactctgagtctagcacactctccagtggggccagcacagccaccaactctgactccagcacaacctccagtggggctagcacagccaccaactctgagtccagcacaacctccagtggggccagcacagccaccaactctgagtccagcacagtgtccagtagggccagcactgccaccaactctgagtccagcacaacctccagtggggccagcacagccaccaactctgagtccagaacgacctccaatggggctggcacagccaccaactctgagtccagcacgacctccagtggggccagcacagccaccaactctgactccagcacaacctccagtggggccggcacagccaccaactctgagtccagcacgacctccagtggggccagcacagccaccaactctgagtccagcacgacctccagtggggctagcacagccaccaactctgactccagcacaacctccagtggggccggcacagccaccaactctgagtccagcacagtgtccagtgggatcagcacagtcaccaattctgagtccagcacaccctccagtggggccaacacagccaccaactctgagtccagtacgacctccagtggggccaacacagccaccaactctgagtccagcacagtgtccagtggggccagcactgccaccaactctgagtccagcacaacctccagtggggtcagcacagccaccaactctgagtccagcacaacctccagtggggctagcacagccaccaactctgactccagcacaacctccagtgaggccagcacagccaccaactctgagtctagcacagtgtccagtgggatcagcacagtcaccaattctgagtccagcacaacctccagtggggccaacacagccaccaactctgggtccagtgtgacctctgcaggctctggaacagcagctctgactggaatgcacacaacttcccatagtgcatctactgcagtgagtgaggcaaagcctggtgggtccctggtgccgtgggaaatcttcctcatcaccctggtctcggttgtggcggccgtggggctctttgctgggctcttcttctgtgtgagaaacagcctgtccctgagaaacacctttaacacagctgtctaccaccctcatggcctcaaccatggccttggtccaggccctggagggaatcatggagccccccacaggcccaggtggagtcctaactggttctggaggagaccagtatcatcgatagccatggagatgagcgggaggaacagcgggccctgagcagccccggaagcaagtgccgcattcttcaggaaggaagagacctgggcacccaagacctggtttcctttcattcatcccaggagacccctcccagctttgtttgagatcctgaaaatcttgaagaaggtattcctcacctttcttgcctttaccagacactggaaagagaatactatattgctcatttagctaagaaataaatacatctcatctaacacacacgacaaagagaagctgtgcttgccccggggtgggtatctagctctgagatgaactcagttataggagaaaacctccatgctggactccatctggcattcaaaatctccacagtaaaatccaaagacctcattcttatctgtgtgtctgcattttctaatcctttttgccccaggcaaggtccctgtatctctgagacaccccgattggctggagaattgacttgggagagataaggagggagggcgggtgccagcatgctatgggctcctgcgtgaggcctgtggtacacagagattaggttgtgatacatgaagagccaagagcaggatgaggtggaggcgttacaactacctgctctgtgtgtggggggggagtggggaggggggtacgcatattcacttgaagtcgaggttcccagggcatttccatgtgctccaggcctgactacccatcagggtggaggagctggtgacactcatctccctgagtgctccctggtttcccaagggaaagactttctggcctgctgaggtcgaatcttccaagaggctcttgcaaagacccgagattctcataaatccctgcccagaagagctgcacgtatccctttcatgagtccagggaagagggtcctccaggtcttggaagacagaggggagctgctttagaggctaagttgctttgagcccacaaggtaatggagggctcctacttgggacagagccctcagcagagaattagcagtctgttggtgggttcaccccaactcacagcagtagaaactgctccatcttccaccacttattgggtttctccagtgtcagcaaaccaaagaattggatcttaccaatgcggctataggaaaacagcctgttgcatggtaagagtgataccatcttgaagtgaaaccaccacaatggccattttttttttagatggagttttgcagtggtgcaatcatagctcattgcagccttcaattcctgggctcaggcaatcctcctgcctcagcctcctgagtagctgggactacagtttcgtgtgccaccatgcctggctaatttttagaattttttgtagggacagggcctcactctgttgcacaagctggtcttgaactcctggcctccttgaactcctcctgccttcgcctcccaaagtgctgagattacaggtgtgagccactgcacctcgccagatgtccaatgtctgactcctgcataccaaggtgttctgtatcaagggctttaaaacaatgcctgtagcgtaattaacctctcacaaagatgcttatctaacctccccagcagtcatgggtttcagcaagaaagtctgtgatgtgaccagttgcacatgttttcccctaaaagcttactctagaaaggatattttttggagagggagtgtgggaatccaccatcttgtggccacctcagacatcacttctctttggaagactccattaaatatttctctgtg

SEQ ID NO: 155635 - DNA, 1880 bp, Homo sapiens
  Payload ID: 10594
  Gene Symbol: MUC21
  Gene Name: mucin 21, cell surface associated
  ENST ID: ENST00000549059
  CDS Start-End: 187-1437
ctgcccacgcctgagtccaagattcttcccaggaacacaaacgtaggagacccacgctcctggaagcaccagcctttatctcttcaccttcaagtcccctttctcaagaatcctctgttctttgccctctaaagtcttggtacatctaggacccaggcatcttgctttccagccacaaagagacagatgaagatgcagaaaggaaatgttctccttatgtttggtctactattgcatttagaagctgcaacaaattccaatgagactagcacctctgccaacactggatccagtgtgatctccagtggagccagcacagccaccaactctgggtccagtgtgacctccagtggggtcagcacagccaccatctcagggtccagcgtgacctccaatggggtcagcatagtcaccaactctgagttccatacaacctccagtgggatcagcacagccaccaactctgagttcagcacagtgtccagtgggatcagcatagccaccaactctgagtccagcacaacctccagtggggccagcacagccaccaactctgagtccagcacaccctccagtggggccagcacagccaccaactctgactccagcacaacctccagtggggctagcacagccaccaactctgactccagcacaacctccagtgaggccagcacagccaccaactctgagtccagcacaacctccagtggggccagcacagccaccaactctgagtccagcacgacctccagtggggccagcacagccaccaactctgagtccagcacaacctccagtggggccagcacagccaccaactctgggtccagcacgacctccagtgggaccagcacagccaccaactctgagtccagcacagtgtccagtggggccagcacagccaccacctctgagtccagcacgacctccagtggggccagcacagccaccaactctgagtccagcacagtgtccagtggggccagcactgccaccaattctgagtccagcacaacctccagtggggccaacacagccaccaactctgggtccagtgtgacctctgcaggctctggaacagcagctctgactggaatgcacacaacttcccatagtgcatctactgcagtgagtgaggcgaagcctggtgggtccctggtgccgtgggaaatcttcctcatcaccctggtctcggttgtggcggccgtggggctctttgctgggctcttcttctgtgtgagaaacagcctgtccctgagaaacacctttaacacagctgtctaccaccctcatggcctcaaccatggccttggtccaggccctggagggaatcatggagccccccacaggcccaggtggagtcctaactggttctggaggagaccagtatcctcgatagccatggagatgagcgggaggaacagcgggccctgagcagccccggaagcaagtgccgcattcttcaggaaggaagagacctgggcacccaagacctggtttcctttcattcatcccaggagacccctcccagctttgtttgagatcctgaaaatcttgaagaaggtattcctcacctttcttgcctttaccagacactggaaagagaatactatattgctcatttagctaagaaataaatacatctcatctaacacacacgacaaagagaagctgtgcgtgccccggggtgggtatctagctctgagatgaactcagttataggagaaaacctccatgctggactccatctggcattcaaaatctccacagtaaaatccaaagacctcattcttatctgtgtgtctgcattttctaatcctttttgccccaggcaaggtccctgtatctctgagacaccccgattggctggagaattg

SEQ ID NO: 155636 - DNA, 1880 bp, Homo sapiens
  Payload ID: 10594
  Gene Symbol: MUC21
  Gene Name: mucin 21, cell surface associated
  ENST ID: ENST00000547599
  CDS Start-End: 187-1437
ctgcccacgcctgagtccaagattcttcccaggaacacaaacgtaggagacccacgctcctggaagcaccagcctttatctcttcaccttcaagtcccctttctcaagaatcctctgttctttgccctctaaagtcttggtacatctaggacccaggcatcttgctttccagccacaaagagacagatgaagatgcagaaaggaaatgttctccttatgtttggtctactattgcatttagaagctgcaacaaattccaatgagactagcacctctgccaacactggatccagtgtgatctccagtggagccagcacagccaccaactctgggtccagtgtgacctccagtggggtcagcacagccaccatctcagggtccagcgtgacctccaatggggtcagcatagtcaccaactctgagttccatacaacctccagtgggatcagcacagccaccaactctgagttcagcacagcgtccagtgggatcagcatagccaccaactctgagtccagcacaacctccagtggggccagcacagccaccaactctgagtccagcacaccctccagtggggccagcacagccaccaactctgactccagcacaacctccagtggggctagcacagccaccaactctgagtccagcacaacctccagtggggccagcacagccaccaactctgagtccagcacaacctccagtggggccagcacagccaccaactctgagtccagcacgacctccagtggggccaacacagccaccaactctgagtccagcacagtgtccagtggggccagcactgccaccaactctgagtccagcacaacctccagtggggtcagcacagccaccaactctgagtccagcacaacctccagtggggctagcacagccaccaactctgactccagcacaacctccagtgaggccagcacagccaccaactctgagtctagcacagtgtccagtgggatcagcacagtcaccaattctgagtccagcacaacctccagtggggccaacacagccaccaactctgggtccagtgtgacctctgcaggctctggaacagcagctctgactggaatgcacacaacttcccatagtgcatctactgcagtgagtgaggcaaagcctggtgggtccctggtgccgtgggaaatcttcctcatcaccctggtctcggttgtggcggccgtggggctctttgctgggctcttcttctgtgtgagaaacagcctgtccctgagaaacacctttaacacagctgtctaccaccctcatggcctcaaccatggccttggtccaggccctggagggaatcatggagccccccacaggcccaggtggagtcctaactggttctggaggagaccagtatcatcgatagccatggagatgagcgggaggaacagcgggccctgagcagccccggaagcaagtgccgcattcttcaggaaggaagagacctgggcacccaagacctggtttcctttcattcatcccaggagacccctcccagctttgtttgagatcctgaaaatcttgaagaaggtattcctcacctttcttgcctttaccagacactggaaagagaatactatattgctcatttagctaagaaataaatacatctcatctaacacacacgacaaagagaagctgtgcttgccccggggtgggtatctagctctgagatgaactcagttataggagaaaacctccatgctggactccatctggcattcaaaatctccacagtaaaatccaaagacctcattcttatctgtgtgtctgcattttctaatcctttttgccccaggcaaggtccctgtatctctgagacaccccgattggctggagaattg

SEQ ID NO: 155637 - DNA, 2527 bp, Homo sapiens
  Payload ID: 10594
  Gene Symbol: MUC21
  Gene Name: mucin 21, cell surface associated
  ENST ID: ENST00000486149
  CDS Start-End: 1746-2084
agagaaagaggcaactacattgcctggaggaagcctaaggaacccaggcatccagctgcccacgcctgagtccaagattcttcccaggaacacaaacgtaggagacccacgctcctggaagcaccagcctttatctcttcaccttcaagtcccctttctcaagaatcctctgttctttgccctctaaagtcttggtacatctaggacccaggcatcttgctttccagccacaaagagacagatgaagatgcagaaaggaaatgttctccttatgtttggtctactattgcatttagaagctggtgagtgattttatttaaaatcgggtggtctgagaacctttgaggagttgggagagaaatgtgaccactactggggccagctctgcttctcttccatagagtgaggatcatcattttactcgaatcacttcagcctaacaagcaacaaattccaatgagactagcacctctgccaacactggatccagtgtgatctccagtggagccagcacagccaccaactctgggtccagtgtgacctccagtggggtcagcacagccaccatctcagggtccagcgtgacctccaatggggtcagcatagtcaccaactctgagttccatacaacctccagtgggatcagcacagccaccaactctgagttcagcacagtgtccagtgggatcagcatagccaccaactctgagtccagcacaacctccagtggggccagcacagccaccaactctgagtccagcacaccctccagtggggccagcacagccaccaactctgactccagcacaacctccagtggggctagcacagccaccaactctgactccagcacaacctccagtgaggccagcacagccaccaactctgagtccagcacaacctccagtggggccagcacagccaccaactctgagtccagcacagtgtccagtagggccagcactgccaccaactctgagtccagcacaacctccagtggggccagcacagccaccaactctgagtccagaacgacctccaatggggctggcacagccaccaactctgagtccagcacgacctccagtggggccagcacagccaccaactctgagtccagcacaccctccagtggggccggcacagccaccaactctgagtccagcacgacctccagtggggccggcacagccaccaactctgagtccagcacagtgtccagtgggatcagcacagtcaccaattctgagtccagcacaccctccagtggggccaacacagccaccaactctgagtccagtacgacctccagtggggccaacacagccaccaactctgactccagcacaacctccagtggggccagcacagccaccaactctgagtccagcacgacctccagtggggccagcacagccaccaactctgagtccagcacaacctccagtggggccagcacagccaccaactctgggtccagcacgacctccagtgggaccagcacagccaccaactctgagtccagcacagtgtccagtggggccagcacagccaccacctctgagtccagcacgacctccagtggggccagcacagccaccaactctgagtccagcacagtgtccagtggggccagcactgccaccaattctgagtccagcacaacctccagtggggccaacacagccaccaactctgggtccagtgtgacctctgcaggctctggaacagcagctctgactggaatgcacacaacttcccatagtgcatctactgcagtgagtgaggcgaagcctggtgggtccctggtgccgtgggaaatcttcctcatcaccctggtctcggttgtggcggccgtggggctctttgctgggctcttcttctgtgtgagaaacagcctgtccctgagaaacacctttaacacagctgtctaccaccctcatggcctcaaccatggccttggtccaggccctggagggaatcatggagccccccacaggcccaggtggagtcctaactggttctggaggagaccagtatcctcgatagccatggagatgagcgggaggaacagcgggccctgagcagccccggaagcaagtgccgcattcttcaggaaggaagagacctgggcacccaagacctggtttcctttcattcatcccaggagacccctcccagctttgtttgagatcctgaaaatcttgaagaaggtattcctcacctttcttgcctttaccagacactggaaagagaatactatattgctcatttagctaagaaataaatacatctcatctaacacacacgacaaagagaagctgtgcgtgccccggggtgggtatctagctctgagatgaactcagttataggagaaaacctccatgctggactccatctggcattcaaaatctccacagtaaaatccaaagacctcattcttatctgtgtgtctgcattttctaatcctttttgccccaggcaaggtccctgtatctctgagacaccccgattggctggagaattg

SEQ ID NO: 155638 - DNA, 1886 bp, Homo sapiens
  Payload ID: 10594
  Gene Symbol: MUC21
  Gene Name: mucin 21, cell surface associated
  ENST ID: ENST00000621782
  CDS Start-End: 187-1443
ctgcccacgcctgagtccaagattcttcccaggaacacaaacgtaggagacccacgctcctggaagcaccagcctttatctcttcaccttcaagtcccctttctcaagaatcctctgttctttgccctctaaagtcttggtacatctaggacccaggcatcttgctttccagccacaaagagacagatgaagatgcagaaaggaaatgttctccttatgtttggtctactattgcatttagaagctgcaacaaattccaatgagactagcacctctgccaacactggatccagtgtgatctccagtggagccagcacagccaccaactctgggtccagtgtgacctccagtggggtcagcacagccaccatctcagggtccagcgtgacctccaatggggtcagcatagtcaccaactctgagttccatacaacctccagtgggatcagcacagccaccaactctgagttcagcacagcgtccagtgggatcagcatagccaccaactctgagtccagcacaacctccagtggggccagcacagccaccaactctgagtccagcacaccctccagtggggccagcacagccaccaactctgactccagcacaacctccagtggggctagcacagccaccaactctgagtccagcacaacctccagtggggccagcacagccaccaactctgagtccagcacaacctccagtggggccggcacagccaccaactctgagtccagcacgacctccagtggggccagcacagccaccaactctgagtccagcacgaccacagtgtccagtggggccagcactgccaccaactctgagtccagcacaacctccagtggggtcagcacagccaccaactctgagtccagcacaacctccagtggggctagcacagccaccaactctgactccagcacaacctccagtgaggccagcacagccaccaactctgagtctagcacagtgtccagtgggatcagcacagtcaccaattctgagtccagcacaacctccagtggggccaacacagccaccaactctgggtccagtgtgacctctgcaggctctggaacagcagctctgactggaatgcacacaacttcccatagtgcatctactgcagtgagtgaggcaaagcctggtgggtccctggtgccgtgggaaatcttcctcatcaccctggtctcggttgtggcggccgtggggctctttgctgggctcttcttctgtgtgagaaacagcctgtccctgagaaacacctttaacacagctgtctaccaccctcatggcctcaaccatggccttggtccaggccctggagggaatcatggagccccccacaggcccaggtggagtcctaactggttctggaggagaccagtatcatcgatagccatggagatgagcgggaggaacagcgggccctgagcagccccggaagcaagtgccgcattcttcaggaaggaagagacctgggcacccaagacctggtttcctttcattcatcccaggagacccctcccagctttgtttgagatcctgaaaatcttgaagaaggtattcctcacctttcttgcctttaccagacactggaaagagaatactatattgctcatttagctaagaaataaatacatctcatctaacacacacgacaaagagaagctgtgcttgccccggggtgggtatctagctctgagatgaactcagttataggagaaaacctccatgctggactccatctggcattcaaaatctccacagtaaaatccaaagacctcattcttatctgtgtgtctgcattttctaatcctttttgccccaggcaaggtccctgtatctctgagacaccccgattggctggagaattg

SEQ ID NO: 155639 - DNA, 6019 bp, Homo sapiens
  Payload ID: 10595
  Gene Symbol: MUC22
  Gene Name: mucin 22
  Uniprot ID: E2RYF6
  ENST ID: ENST00000561890
  CDS Start-End: 234-5555
aaaaaagaagaaaaataagaagccaaactgtggagcaatttgggggctccccccaaccatgccatctgcctacaaggcttaccctggcactggctggcctttgggtctttttgtgcaactttattttctatcaaggcccagggggtttgccccttgtctctctgcctctttgacctatccttcctttggaacccaggcatctaaatgacaacttctatgtgcatcatttagagatgagaagaggaaatatctctcctgctttctggttcctgtggctgcttctctttggacttctgggacccagctctgagaataccacagccttcacaaaaggctccgacaccaccacagcctccatcacaggctctgagaccaccatggcctccaccatggcctctacttcggccttaactacaggctctaagatcaccacagactctaccacaggctctgagacaacctcagcctccaccatggcttctactgcagccttcaccacaggctctgagaccaacacggcctccaccacagactcagggactactatagcctccactaggaccttcaccacaggctctgacacaaccacaggctccactgcaggctctgaaactatcgtggcctccaccacagtctctgggaccacaacaacctttactatagcctccactacagtccctgagactaccatggcctccagcacaacctccactgcaggctctgagaaaacgatggcctcctccataatttctgagaccaccatggcctccaccacaggctctgagactgccacagtctctaccacaggctctgagaccaccaccacctccactgcaagctctgaggccactaaagtctctaccacaggctctgaaaccaccacagcatctactgcaggttctgagaccaccactacctccacctccatggcaggctctgaggccaccacaacctcaactgcagactccaaggtgatcacggcatccagcatgagctctgagaccactgtggcccccgctgcaggctctaacaccaccacagcctctaccacaggctctgagaccactacaatcctgattaaagcctctgagaccaccacagcctctacagcaggttctgagaccaccaccccctcccccacaggctctcagaccaccatagtctctatttcaggttctgagatcaccaccacctctacggcaggatccgagaacaccacagtctctagtgcaggctctgggaccaccacagcttctatggcaggctctgagaccaccgtctccactgcaggctctgagaccactacagtctctatcacaggcactgagaccaccatggtctctgccatgggctcagagaccaccacaaactctactacaagctctgagaccaccgtcacctctactgcaggctctgagaccaccacagtctccaccgtgggctctgagaccaccacagcctatactgcagattctgagaccactgcagcctctaccacaggctctgagatgaccacagtcttcactgcaggctcggaaaccatcacaccctctactgcaggctcagagaccaccacagtctctactgcaggctctgagaccactacagtctccaccacaggctctgagaccacaacagcctctactgcacattctgagacgactgcagcctccaccatgggctctgagaccaccaaagtctcaactgcaggctctgagaccacagtctccactgcaggctctgagaccactgcagcctctactgaagattctgaaaccaacacagcatttactgaagattctaagactaccacagcctctactacagggtttgagacaaccgcagcctctactacaggctctgagcctaccatggcatccaccatgggctctgagaccactatggcctctaccataggccctgagaccaccaaggtctccactgcaagctctgaggtgaccacagtctttgctgcaggctctgagacaatcagagcctctaccgtaggctctgagaccaccacagtctctaccacaggctctgagaccaccacagcctccatcatgggctctgagaccagcacagattctaccacaggctctgagaccaccacagcctctactgaaggctctgagaccaccacagcttccactgaaggctctgaggccactacagtctccaccacaggctctgagaccactacagtttctatcacagactcagagaccaccaccacctgtactgaaggctctgagatgactgcagtctccaccacagtctttgagaccactacagcctctactgaaggctctgagatcacaatagcctctacttcagactctgagaccaccacagcttctactgaaggttctgagaccactacagtcactaccgcaggctctgagaccaaaacagcctatactacaggctctgagaccaccacagcctctaatacaggcttggagaccaccacagtctttaccataggctctgacaccaccacagcctctactgaaggctctgagaccactgcagtctctgccacaggctctgagatgaccacagtctctactgaaggctctgagaacactacagtctccaccacaggctctgagaccactacagtttccaccacaggcttggagaccaccaccacttccactgaaggctctgagatgactacagtctccaccacaggtgctgagaccaccacagactctactgaaggctctgggaccactgcagcctccactgcaggctctgagaccaccacagtctctactgcagattctgagaacaccacagcatctactgcagattctgagaccacctcagcctctactacaggctctgagaccaccacagcctctactacaagctctgagaccaccacagcctctactgaaggctctgagaccactacagtctccaccacagactctgagaccaccatggtctctaccacaggctctgagaggaccatcacctctactgaaggctctgagaccactacagtatctgccacaggctctgagaccacagtctctactgaaggctctgggaccactacagtctccatcacaggctctgagaccactaaagtttctaccacaggttcagagaccaccaccacttctactgaaggctctgagattactacagcctccatcacaggctctgagaccaccacagcctctactgaaggctccgagaccaccacagcctctactgaaggctccgagaccacctcagcctctactacaggctctgagaccaccacagcctctactacaagctctgagaccaccatggcatccatcatgggctctgagaccactatggcctctaccataggctctgagaccaccaaggtctccactgcaagctctaaaatgaccacagtcttcactgaaaactctgagaccaccatagcctctaccacagcctctgagaccaccacagtctccactgcaggctctgagaccatcccagcctctacagcaggctctgagaccaccaccaccacctctactgaaggctctgagaccactacagcctctactgaaggctctgagaccaccacagcctctactgaaagctctgagaccactacagccactaccataggctctgagaccaccacagcctctactgaaggctctgagactaccaccacctctactgaaggctctgagaccaccacagcctctactgaaggctctgagatcactacagtttctaccacaggctctgagaccaccacagcctctactgaaggctctgagaccaccacagcctctactgaaggctctgagctcactacagtttctaccacaggctctgagaccatcacagtctctgctgaaggctctgagaccactacagtcactactatgggctctgagaccaccacggcctctactgcaggctcagagaccaccacagtctctactgcaggctctgagaccaccacagcctctattgaaggctctgagaccactacagtctcctccacaggctctgagaccaccacagtctctaccacaggcactgagactaccatcacctctactgaaggttcagagaccactacagtcactactgcaggttctgagaccacagcagtctataccacaggctctgagactaccaccacctctactgaaggctctgagacaaccacagtctctaccacgggctctgagaccaccacagcctctaccgcagatttggagaccaccacagtctccacctcaggctctgggaccaccacagcctctaccgcaggctctgagaccacaacagtctatatcacaggctctaagactaccaccgcctctactgaaggctctgaggccactacagtttctaccactagctctgagaccaccacagcctctaccacaggctctgagatgactacagtctttaccacagtctctgagaccaccacagtctctaccataggctctgaggccaccacatcctctgctgcaggctctgaggccaccaccacctctactgaaggctctgagaccaccacagcctccactgcaggctctgagaccaccacagcctccactgcaggctctgagaccaccacagcctccacttcaggctctgagaccaacacagcctgtaccacaggttctgagacctccacaccctccagtgcaggctctgagaccaacactgccttcatcataggctctgagagcaccatagcttccactgcaagcttggagcccactgcaacttccctcacaggctctgagaccaccacagtctctatcacagcttctggggccactgcagcctccaccactgtctcttccaccacgtttgtactcaccaaggccactgacgtttctatccagcccatcaccaacacacctatgtcaggcaccagaaccactggaaccagactcactgcctccagctctgtcaccatggcccctggaatggacttcacggcctctgctgccagccatactgtgccaggaatagtcttaaacacctctggcctgggtacatccactatgggagcatcatctaccacctcagcccacggcgtcaggaccaccacaggatccacccgtgagccaaccagcagcaccttccaggaaacaggcccggtgtccatgggcacaaacacagttagcatgagccacacacccacaaacgtgatcaaaccaagtggatatttacagccctgggctatcatcctcatttccctggctgcagttgtggctgctgttggattgtcagtaggactgagtttttgtctgagaaaccttttcttccccctgagatattgtggtatttattacccccatggccacagccacagccttggtctggacctgaacttgggcctgggctctgggacattccacagcctgggaaatgcactggttcatggaggagaacttgaaatgggacatggaggaacacacggctttggatatggagtgggccatggactgagccacatccatggagatggctacggagtgaatcatggcgggcattatggacatggaggaggccactgaggacaccatggagtggatcacagagggagccaccaaggaggccacggcaggacaagatggctgtggccatagattgggtatcaaaacatattatgggtgggagggggtcatggaggagaaaaaaataatgatcatgaaataattaaaatggagcataggaagcttcccaggatgtgatccatggagatggacatggactaggtcaagaaaagaaccagcaaaaggacctcagagactttgactggcttggaggggacttcaagtcaaagcttctgtgagtttttcctgagtctcagcctctgttgtggggagtcacgacaaccaccctcaggacatcttctctcccatttcccgccacatcagggtcaacgtttctcatccctgtgtttcctcatggtgctataaatattaccaagacatgtctaagaaacaaaagcacataatgaatgtattatcagggccac

SEQ ID NO: 155640 - DNA, 11226 bp, Homo sapiens
  Payload ID: 10596
  Gene Symbol: MUC3A
  Gene Name: mucin 3A, cell surface associated
  ENST ID: ENST00000379458
  CDS Start-End: 71-10042
cagggccacgtccctgccgctgtcttggtcctgaagcctgttctgccccagccccctgcccgctgggcccatgcagctgttggggctcctcggcctcctctggatgctcaaggcctccccgtgggccacaggaactttatccacggccacatccatctctcaagtgcctttccccagagcagaagcagccagcgctgtgctcagcaattctccacactccagagacctggctgggtggccacttggtgtcccccagctcgcctctcctgctcctggccacagggaaaatgcacctatgacactcactacctccccccatgacacactcatctctgaaacattgctcaactctccagtcagttccaacacctcaaccaccccgacgtccaagtttgccttcaaggttgaaaccactccacccaccgtgttggtctattcagccaccactgagtgcgtgtatccaacgagctttataatcaccatctcccaccccacctccatctgtgtgaccacgacgcaggtggccttcaccagctcttacacctcgactcccgtgacacagaagccagtgaccaccgtcaccagtacttactctatgaccactactgagaaaggaacgtcagccatgacatcttctccctctaccaccactgcaagggaaactcccatagtgacagtgacaccctcctctgtgtcagccacagacacaaccttccacactacaatctcgtctacaactagaaccacagaaaggactcccctgcccactggaagcatccatacaaccacgtccccaaccccagtatttactactctcaaaacagcagtgacttccacttcccccatcacttcttcaatcacttccacaaatacagtgacttctatgacaacgaccgcctcccagcccacagccactaatacattgtcatcacccactaggaccattttatcttccacacctgtcctgagcacagaaacaatcaccagtggtatcacaaacaccacccccctatccaccttggtgaccacactccccactaccatcagcaggtctacacctacatctgagaccacctacactacttctcccaccagcactgtcacagactccactaccaaaatcgcctactccacaagtatgacaggtacattgtccacagagacttctctcccacccacctcttcctctctcccaaccacagaaacagccacgactcctatgacaaacttggtaaccaccaccactgagatctcctcccacagtactcccagcttctcttcatcaaccatctactccacagtcagcacatccacaactgccatctcctcacttccccctacctcaggtactatggtgacttccacaaccatgaccccatcttctctgagtacagacatccctttcacaacaccaacaactatcacccaccattctgtgggctctaccggtttcctgactacagcaacagacctcacatcaacattcacggtttccagttcctcagcaatgtccacgagtgtcattccatcttcccccagcattcagaatacagaaacctcatcccttgtcagcatgacctctgccactactcccaatgtgagaccaacttttgtaagtacactcagcactcctacaagttccctcctgacgaccttcccagcaacatattcattttcatcttccatgtctgccagcagtgctgggaccactcacacagagagtatctcctcacctccagccagcaccagtacactccacacaacagctgaatccaccctggcacccactaccaccacctcattcacaacttccacaactatggaaccaccttcaaccactgcagcaactacaggaacaggtcagaccaccttcaccagctctacagccacatttcctgagaccaccacaccgactcctacaactgacatgtccacagaatctctcacaacagccatgacttctcctcccatcacttcatcagtcacttccacaaatacagtgacttctatgacaactacgacctctcctcccacaaccaccaattcttttacatcactgaccagtatgcctctgtcttctacacctgtcccaagcacagaagtagtcaccagtggcaccataaacacaatccctccatctatcttggtgaccacactccccactccaaatgcttcatctatgactacatctgagaccacctatcctaattctccgactggtcctggtacaaactccacgacggaaatcacctatcccaccactatgacagagacatcatccactgccacctctcttccacccacctctcccttggtctcaactgcaaaaacagccaaaactcctaccacaaacttggtaaccaccaccaccaagaccacctcacatagtaccaccagcttcacttcttcaaccgtctactccacagccagcacatacacaactgccatcacctcagttcccactacgttgggtaccatggtaacttctacatccatgatctcatctactgtgagtacaggtatccctacctcacaaccaacaaccatcactccctcatccgtgggcatcagtggttcattacctatgatgacagacctcacctcagtgtacacagtctctaacatgtctgcaaggccaacaactgtcattccctcatctcccactgtccagaatacagaaatctcaatctctgttagcatgacgtctgctaccactcccagtggaggaccaactttcacaagtactgagaacactccaacaaggtccctcctgacaagctttccaatgacacattcattctcttcttctatgtctgaaagtagtgctgggaccactcacacagagagtatctcctcacctcgaggcaccaccagtacactccacacaacagttgaatccaccccatcacccactaccaccacctcatttaccacatccacaatgatggaaccaccttcatccactgtatcaactacaggcagaggtcagaccacctttcccagctctacagccacattccctgagaccactacactgactcctacaactgacatttctacagtatctctcacaacagccatgacttctcctccccccgtcagttcttcaatcactcccaccaatacaatgacttctatgagaactacaacctattggcccacagccactaatacattatcaccactcaccagtagcattttatcttctacacctgtcccaagcacagaaatgatcaccagtcataccacaaacaccacccctctatccaccttggtgactacactcctcactaccatcaccagatctacacctacatctgagaccacctaccctacttctcccaccagcattgtctcagactccacgactgaaatcacctattccacaagtataacaggtacattgtccactgccactactctcccacccacctcttcctctctcccaaccacagaaacagccacgatgactcctaccacaaccttgataaccaccacccctaataccacctcccttagtacccccagcttcacttcttcaaccatctactccacagtcagcacatccacaactgccatctcctcagcttcccctacctcaggtaccatggtaacttccacaaccatgaccccatcttctctgagtacagacaccccttccacaacaccaacaactatcacctacccttctgtgggctctaccggtttcctgactacagcaacagacctcacatcaacattcactgtttccagttcctcagcaatgtccacaagtgtcattccatcttcccccagcatccagaatacagaaacctcatcccttgtcagcatgacctctgccaccactcccagtttgagaccaactatcacaagtactgacagcactctaacaagttccctcctgacgaccttcccaagtacatattcattttcatcttccatgtctgccagcagtgcagggaccactcacacagagactatttcctcacttccagccagcaccaatacaatccacacaacagctgaatccgccctggcacccactaccaccacctcattcaccacatccccaacgatggaaccaccttcaaccactgtagcgactacaggcacaggtcagaccaccttccccagctctacagccacattccttgagaccaccacactgactcctacaactgacttttctacagaatctctcacaacagccatgacttctactccccccatcacttcttcaatcactcccaccgatacaatgacttctatgagaactacgacctcttggcccacagccactaatacgttatcaccactcaccagtagcattttatcttctacacctgtcccaagcacagaggtgaccaccagtcataccacaaacaccaatcctgtatccacgttggtgactacactccccattaccatcaccaggtctacacttacatctgagaccgcctaccctagttctcccacaagcactgtcacagagtccacaactgaaatcacctatcccaccactatgacagagacatcatctactgccacctctcttccacccacctcttccttggtctcaaccgcagaaacagccaaaactcctaccacaaacttggtaaccaccaccaccaagaccacctcacatagtaccaccagcttcacttcttcaaccatctactccacagccagcacacccaccactgccatcacctcagttcccactaccttgggtaccatggtgacttctacatccatgatcccatctactgtgagtacaggtatccctacctcacaaccaacaactattactccctcatccgtgggcatcagtggttcattacctatgatgacagacctcacctcagtgtacacagtctccagcatgtctgcaaggccaacaagtgtcattccttcatctcccactgtccagaatacagaaacctcaatctttgttagcatgatgtctgctaccactcccagtggaggaccaactttcacaagtactgagaacactccaacaaggtccctcctgacaagctttccagtgacacattcattttcctcttccatgtctgccagcagtgtagggaccactcacacccagagtatctcctcacccccagccatcaccagtacactccacacaacagctgaatccaccccatcacctacaaccaccatgtcattcacaacatttacaaagatggaaacaccttcatccactgtagcaactacaggcacaggtcagactacattcaccagttcaacagccacatcccctaagaccaccacactgactcctacctctgacatttccacaggatctttcaaaacagccgtgagttctactccccccatcacttcttcaatcacctccacatatacggtgacttcgatgacaactaccacccctctagggcccacagccactaatacgttaccatcatttaccagtagcgtttcatcttctacgcctgtcccaagtacagaagcgatcaccagtggtaccacaaacaccacccctctatctacattggtgaccacattctccaattccgacaccagttctacacctacatctgagaccacctaccctacttctcttactagtgctctcacagattccacgaccagaaccacctattccaccaatatgacaggtacattgtccactgtgacctctcttcgacccacctcttcctctctcctcaccacagtaacagccacagttccaacaacaaacttggtaaccacgaccaccaagatcacctcacacagtactcctagcttcacttcttcaatcgcaaccaccgagaccccctcacacagtactcccagattcacttcttcaatcaccactaccgagaccccctcacacagtactcccagattcacttcttcaatcaccaataccaagaccacctcacacagctctcccagcttcacttcttcgatcaccaccaccgagaccacatcccacaatactcccagcctcacttcttcaatcaccaccaccaagaccacctcacacagtactcccagctacacttctttgatcaccacaaccaccaccacctcacacagtactcccagcttcacttcttccatcaccaccactgagaccacatcccacaatactcccagcttgacttcttcgatcacaaccaccgagaccacatcccatagtactcccagcttcacttcttcgatcaccaccgagaccacatcccacagtactcccagcttcacttcattgatcaccatcaccgagatcacctcacacagtactctcagctacactacctcaatcaccaccaccgagaccccctcacacagtactctcagcttcacttcttcaatcaccaccactgagaccacctcacacagtactcccagcttcacttcctcaatcaccacctctgagatgccctcacacagtactcccagcttcacttcttcgatcaccaccactgagaacgccacacacagtactcccaacttcacttcttcaatcaccaccaccgagaccacatcccacagtactcccagcttcacttctttgatcaccaccacggagaccacctcacacaggtgggggaccaccgagaccacatcctacagtactcccagcttcacttcttcaaataccatcactgagaccacctcacacagtactcccagctacattacctcaatcaccaccaccgagaccccctcaagcagtactcccagcttcagttcttcgatcaccaccactgagaccacatcccacagtactcccggcttcacttcttcaatcaccaccactgagactacatcccacagtactcccagcttcacttcttcgatcaccaccactgagaccacctcacatgatactcccagcttcacttcttcaatcaccaccagtgagaccccctcacacagtactcccagctccacttctttaatcaccaccaccaagaccacctcacacagtactcccagcttcacttcttcgatcaccaccacggagaccacctcacacagtgctcacagcttcacttcttcgatcaccaccaccgagaccacctcacacaatactcgcagcttcacttcttcgatcaccaccaccgagaccaactctcacagtactaccagcttcacttcttcgatcaccaccaccgagaccacctcacacagtactcccagcttcagttcttcaatcaccaccactgagacccccttacacagtactcctggcctcacttcgtgggtcaccaccaccaagaccacctcacacattactcctggcctcacttcttcaatcaccaccactgagactacctcacacagtactcctggcttcacttcttcaatcaccaccactgagaccacctcagagagtactcccagcctcagttcttcaaccatctactccacagtcagcacatccacaactgccatcacctcacattttactacctcagagactgcggtgactcccacacctgtaaccccatcttctctgagtacagacatcccgaccacaagcctacgaactctcaccccttcgtctgtgggcaccagcacttcattgactacaaccacagactttccctctatacccactgatatcagtaccttaccaactcgaacacacatcatttcatcttctccctccatccaaagtacagaaacctcatcccttgtgggcaccacctctcccaccatgtccactgtgagaatgaccctcagaattactgagaacaccccaatcagttcctttagcacaagtattgttgttatacctgaaaccccaacacagacccctcctgtactgacgtcagccactgggacccaaacatctcctgcacctactactgtcacctttggaagtacggattcctccacgtccactcttcatactcttactccatcaacagccttgagcacgatcgtgtcaacatcacaggttcctattcctagcacacattcctccacccttcaaacaactccttctactccctcattgcaaacttcactcacatctacaagtgagttcactacagaatctttcactaggggaagtacgtctacaaatgcaatcttgacttcttttagtaccatcatctggtcctcaacacccactattatcatgtcctcttctccatcttctgccagcataactccagtgttttccactaccattcattctgttccttcttcaccatacattttcagtacagaaaatgtgggctccgcttctatcacaggctttcctagtctctcttcctctgcaactaccagcacttcttcaaccagctcctctctgaccacagctctcactgaaataacccccttttcttatatttcccttccctccaccacaccctgtccaggaactataacaattaccatagtccctgcctcccccactgatccatgtgttgaaatggatcccagcactgaagctacttctcctcccaccaccccattaacagtctttccctttactaccgaaatggtcacctgtcctacctccatcagtatccaaactactcttactacatatatggacacttcttccatgatgccagaaagtgagtccagcatctcacccaatgcttccagttccactggcactgggactgtacccacaaacacagttttcacaagtactcgactgcccaccagtgagacctggctgagcaacagttctgtgatccccctacctcttcctggcgtctctaccatcccgctcaccatgaaaccaagcagtagcctcccgaccatcctgaggacttcaagcaagtcaacacacccctccccacccaccactaggacttcagagacaccagtggccactacccagactcctaccacccttacatcacgcaggacaactcgcatcacttctcagatgaccacacagtccacgttgaccaccactgcaggcacctgtgacaatggtggcacctgggaacagggccagtgtgcttgccttccggggttttctggggaccgctgtcagctccagaccagatgccagaatgggggtcagtgggatggcctcaaatgccagtgccccagcaccttctatggttccagttgtgagtttgctgtggaacaggtggatctagatgtagtggagaccgaggtgggcatggaagtgtctgtggatcagcagttctcgccggacctcaatgacaacacttcccaggcctacagggatttcaacaagaccttctggaatcagatgcagaagatttttgcagacatgcagggcttcaccttcaagggtgtggagatcctgtccctgaggaatggcagcatcgtggtggactacctggtcctgctggagatgcccttcagcccccagctggagagcgagtatgagcaggtgaagaccacgctgaaggaggggctgcagaacgccagccaggatgtgaacagctgccaggactcccagaccctgtgttttaagcctgactccatcaaggtgaacaacaacagcaagacagagctgaccccggcagccatctgccgccgcgccgctcccacgggctatgaagagttctacttccccttggtggaggccacccggctccgctgtgtcaccaaatgcacgtcgggggtggacaacgccatcgactgtcaccagggccagtgcgttctggagacgagcggtcccacgtgtcgctgctactccaccgacacgcactggttctctggcccgcgctgcgaggtggccgtccactggagggcgctggtcgggggcctgacggccggcgccgcgctgctggtgctgctgctgctggcgctgggcgtccgggcggtgcgctccggatggtggggcggccagcgccgaggccggtcctgggaccaggacaggaaatggttcgagacctgggatgaggaagtcgtgggcactttttcaaactggggtttcgaggacgacggaacagacaaggatacaaatttctatgtggccttggagaacgtggacaccactatgaaggtgcacatcaagagacccgagatgacctcgtcctcagtgtgagccctgcggggccccttcaccaccccctccgccctgccccggacacaagggtctgcattgcgtccatttcaagaggtggccccaggacgcgggcagcccaggctcctgctgttcttgggcaagatgagactgttcccccaaatcccatccttctccttccaacttggctgaaacccacctggagacgcagttcacgtccaggctcttccactgtggaatcttgggcaagtcagtaacgagcctcagtttcctcacctgcaaaacgggtacagcattcctgtatgatagctcacgccgttgttgtgaaaaccacatagacttggtcaattctcggtcctactctgccctcccgtctcagccctcgtgttgccattgcctctctcggatcctccaatcctcacgtccttcacctggtctctggccctggttcttattttctctcaattccctactgcctgtttcttactttgaacctggaggcagcctgcagccccatcccatctcctgccctctcctgatctaactccctgctgcatctcttgctctcattccttagacgtcctccccttttgaccccgttccttcatccatcctgcaccccagtcccccagccctaaatcctccctcctctcctcacatcctggtccctagcaaggtatagatagcctctgtgtcttaggatacccaggtgctgttctccccgtcaccccgttgcccagttccccgtttctcttgctctcattccttgtatcttctcccttctgagcccgtccattcatcggttctgcccccgactccccctgacctaaataccccagctgctgttccccccatcaccctgctgcccaattctttattctccacccctttctctcacccctggagccctgcgggtgggggcagggcatgagttccccagtccccaaggaaaggcagccccctcagtctccctcctcctcatttccttcgatccccctcccttcttgcctcccctctgccttttaaacccatcccctccgattcccctcctcccccttctcttcctggtgtcacctggattcctgcagtaactctgagcccttgaaatcctcagtcgccttggcggggaagattggctttggggacaggaagtcggcacatctccaggtcttcatgtgcacaatacagagtttattgtaaaaagc

SEQ ID NO: 155641 - DNA, 4399 bp, Homo sapiens
  Payload ID: 10596
  Gene Symbol: MUC3A
  Gene Name: mucin 3A, cell surface associated
  Uniprot ID: Q02505
  ENST ID: ENST00000414964
  CDS Start-End: 1-3007
gatcaccatcaccgagatcacctcacacagtactctcagctacactacctcaatcaccaccaccgagaccccctcacacagtactctcagcttcacttcttcaatcaccaccactgagaccacctcacacagtactcccagcttcacttcctcaatcaccacctctgagatgccctcacacagtactcccagcttcacttcttcgatcaccaccactgagaacgccacacacagtactcccaacttcacttcttcaatcaccaccaccgagaccacatcccacagtactcccagcttcacttctttgatcaccaccacggagaccacctcacacaggtgggggaccaccgagaccacatcctacagtactcccagcttcacttcttcaaataccatcactgagaccacctcacacagtactcccagctacattacctcaatcaccaccaccgagaccccctcaagcagtactcccagcttcagttcttcgatcaccaccactgagaccacatcccacagtactcccggcttcacttcttcaatcaccaccactgagactacatcccacagtactcccagcttcacttcttcgatcaccaccactgagaccacctcacatgatactcccagcttcacttcttcaatcaccaccagtgagaccccctcacacagtactcccagctccacttctttaatcaccaccaccaagaccacctcacacagtactcccagcttcacttcttcgatcaccaccacggagaccacctcacacagtgctcacagcttcacttcttcgatcaccaccaccgagaccacctcacacaatactcgcagcttcacttcttcgatcaccaccaccgagaccaactctcacagtactaccagcttcacttcttcgatcaccaccaccgagaccacctcacacagtactcccagcttcagttcttcaatcaccaccactgagacccccttacacagtactcctggcctcacttcgtgggtcaccaccaccaagaccacctcacacattactcctggcctcacttcttcaatcaccaccactgagactacctcacacagtactcctggcttcacttcttcaatcaccaccactgagaccacctcagagagtactcccagcctcagttcttcaaccatctactccacagtcagcacatccacaactgccatcacctcacattttactacctcagagactgcggtgactcccacacctgtaaccccatcttctctgagtacagacatcccgaccacaagcctacgaactctcaccccttcgtctgtgggcaccagcacttcattgactacaaccacagactttccctctatacccactgatatcagtaccttaccaactcgaacacacatcatttcatcttctccctccatccaaagtacagaaacctcatcccttgtgggcaccacctctcccaccatgtccactgtgagaatgaccctcagaattactgagaacaccccaatcagttcctttagcacaagtattgttgttatacctgaaaccccaacacagacccctcctgtactgacgtcagccactgggacccaaacatctcctgcacctactactgtcacctttggaagtacggattcctccacgtccactcttcatactcttactccatcaacagccttgagcacgatcgtgtcaacatcacaggttcctattcctagcacacattcctccacccttcaaacaactccttctactccctcattgcaaacttcactcacatctacaagtgagttcactacagaatctttcactaggggaagtacgtctacaaatgcaatcttgacttcttttagtaccatcatctggtcctcaacacccactattatcatgtcctcttctccatcttctgccagcataactccagtgttttccactaccattcattctgttccttcttcaccatacattttcagtacagaaaatgtgggctccgcttctatcacaggctttcctagtctctcttcctctgcaactaccagcacttcttcaaccagctcctctctgaccacagctctcactgaaataacccccttttcttatatttcccttccctccaccacaccctgtccaggaactataacaattaccatagtccctgcctcccccactgatccatgtgttgaaatggatcccagcactgaagctacttctcctcccaccaccccattaacagtctttccctttactaccgaaatggtcacctgtcctacctccatcagtatccaaactactcttactacatatatggacacttcttccatgatgccagaaagtgagtccagcatctcacccaatgcttccagttccactggcactgggactgtacccacaaacacagttttcacaagtactcgactgcccaccagtgagacctggctgagcaacagttctgtgatccccctacctcttcctggcgtctctaccatcccgctcaccatgaaaccaagcagtagcctcccgaccatcctgaggacttcaagcaagtcaacacacccctccccacccaccactaggacttcagagacaccagtggccactacccagactcctaccacccttacatcacgcaggacaactcgcatcacttctcagatgaccacacagtccacgttgaccaccactgcaggcacctgtgacaatggtggcacctgggaacagggccagtgtgcttgccttccggggttttctggggaccgctgtcagctccagaccagatgccagaatgggggtcagtgggatggcctcaaatgccagtgccccagcaccttctatggttccagttgtgagtttgctgtggaacaggtggatctagatgcagaagatttttgcagacatgcagggcttcaccttcaagggtgtggagatcctgtccctgaggaatggcagcatcgtggtggactacctggtcctgctggagatgcccttcagcccccagctggagagcgagtatgagcaggtgaagaccacgctgaaggaggggctgcagaacgccagccaggatgtgaacagctgccaggactcccagaccctgtgttttaagcctgactccatcaaggtgaacaacaacagcaagacagagctgaccccggcagccatctgccgccgcgccgctcccacgggctatgaagagttctacttccccttggtggaggccacccggctccgctgtgtcaccaaatgcacgtcgggggtggacaacgccatcgactgtcaccagggccagtgcgttctggagacgagcggtcccacgtgtcgctgctactccaccgacacgcactggttctctggcccgcgctgcgaggtggccgtccactggagggcgctggtcgggggcctgacggccggcgccgcgctgctggtgctgctgctgctggcgctgggcgtccgggcggtgcgctccggatggtggggcggccagcgccgaggccggtcctgggaccaggacaggaaatggttcgagacctgggatgaggaagtcgtgggcactttttcaaactggggtttcgaggacgacggaacagacaaggatacaaatttctatgtggccttggagaacgtggacaccactatgaaggtgcacatcaagagacccgagatgacctcgtcctcagtgtgagccctgcggggccccttcaccaccccctccgccctgccccggacacaagggtctgcattgcgtccatttcaagaggtggccccaggacgcgggcagcccaggctcctgctgttcttgggcaagatgagactgttcccccaaatcccatccttctccttccaacttggctgaaacccacctggagacgcagttcacgtccaggctcttccactgtggaatcttgggcaagtcagtaacgagcctcagtttcctcacctgcaaaacgggtacagcattcctgtatgatagctcacgccgttgttgtgaaaaccacatagacttggtcaattctcggtcctactctgccctcccgtctcagccctcgtgttgccattgcctctctcggatcctccaatcctcacgtccttcacctggtctctggccctggttcttattttctctcaattccctactgcctgtttcttactttgaacctggaggcagcctgcagccccatcccatctcctgccctctcctgatctaactccctgctgcatctcttgctctcattccttagacgtcctccccttttgaccccgttccttcatccatcctgcaccccagtcccccagccctaaatcctccctcctctcctcacatcctggtccctagcaaggtatagatagcctctgtgtcttaggatacccaggtgctgttctccccgtcaccccgttgcccagttccccgtt

SEQ ID NO: 155642 - DNA, 9944 bp, Homo sapiens
  Payload ID: 10596
  Gene Symbol: MUC3A
  Gene Name: mucin 3A, cell surface associated
  ENST ID: ENST00000483366
  CDS Start-End: 1-9798
atgcagctgttggggctcctcggcctcctctggatgctcaaggcctccccgtgggccacaggaactttatccacggccacatccatctctcaagtgcctttccccagagcagaagcagccagcgctgtgctcagcaattctccacactccagagacctggctgggtggccacttggtgtcccccagctcgcctctcctgctcctggccacagggaaaatgcacctatgacactcactacctccccccatgacacactcatctctgaaacattgctcaactctccagtcagttccaacacctcaaccaccccgacgtccaagtttgccttcaaggttgaaaccactccacccaccgtgttggtctattcagccaccactgagtgcgtgtatccaacgagctttataatcaccatctcccaccccacctccatctgtgtgaccacgacgcaggtggccttcaccagctcttacacctcgactcccgtgacacagaagccagtgaccaccgtcaccagtacttactctatgaccactactgagaaaggaacgtcagccatgacatcttctccctctaccaccactgcaagggaaactcccatagtgacagtgacaccctcctctgtgtcagccacagacacaaccttccacactacaatctcgtctacaactagaaccacagaaaggactcccctgcccactggaagcatccatacaaccacgtccccaaccccagtatttactactctcaaaacagcagtgacttccacttcccccatcacttcttcaatcacttccacaaatacagtgacttctatgacaacgaccgcctcccagcccacagccactaatacattgtcatcacccactaggaccattttatcttccacacctgtcctgagcacagaaacaatcaccagtggtatcacaaacaccacccccctatccaccttggtgaccacactccccactaccatcagcaggtctacacctacatctgagaccacctacactacttctcccaccagcactgtcacagactccactaccaaaatcgcctactccacaagtatgacaggtacattgtccacagagacttctctcccacccacctcttcctctctcccaaccacagaaacagccacgactcctatgacaaacttggtaaccaccaccactgagatctcctcccacagtactcccagcttctcttcatcaaccatctactccacagtcagcacatccacaactgccatctcctcacttccccctacctcaggtactatggtgacttccacaaccatgaccccatcttctctgagtacagacatccctttcacaacaccaacaactatcacccaccattctgtgggctctaccggtttcctgactacagcaacagacctcacatcaacattcacggtttccagttcctcagcaatgtccacgagtgtcattccatcttcccccagcattcagaatacagaaacctcatcccttgtcagcatgacctctgccactactcccaatgtgagaccaacttttgtaagtacactcagcactcctacaagttccctcctgacgaccttcccagcaacatattcattttcatcttccatgtctgccagcagtgctgggaccactcacacagagagtatctcctcacctccagccagcaccagtacactccacacaacagctgaatccaccctggcacccactaccaccacctcattcacaacttccacaactatggaaccaccttcaaccactgcagcaactacaggaacaggtcagaccaccttcaccagctctacagccacatttcctgagaccaccacaccgactcctacaactgacatgtccacagaatctctcacaacagccatgacttctcctcccatcacttcatcagtcacttccacaaatacagtgacttctatgacaactacgacctctcctcccacaaccaccaattcttttacatcactgaccagtatgcctctgtcttctacacctgtcccaagcacagaagtagtcaccagtggcaccataaacacaatccctccatctatcttggtgaccacactccccactccaaatgcttcatctatgactacatctgagaccacctatcctaattctccgactggtcctggtacaaactccacgacggaaatcacctatcccaccactatgacagagacatcatccactgccacctctcttccacccacctctcccttggtctcaactgcaaaaacagccaaaactcctaccacaaacttggtaaccaccaccaccaagaccacctcacatagtaccaccagcttcacttcttcaaccgtctactccacagccagcacatacacaactgccatcacctcagttcccactacgttgggtaccatggtaacttctacatccatgatctcatctactgtgagtacaggtatccctacctcacaaccaacaaccatcactccctcatccgtgggcatcagtggttcattacctatgatgacagacctcacctcagtgtacacagtctctaacatgtctgcaaggccaacaactgtcattccctcatctcccactgtccagaatacagaaatctcaatctctgttagcatgacgtctgctaccactcccagtggaggaccaactttcacaagtactgagaacactccaacaaggtccctcctgacaagctttccaatgacacattcattctcttcttctatgtctgaaagtagtgctgggaccactcacacagagagtatctcctcacctcgaggcaccaccagtacactccacacaacagttgaatccaccccatcacccactaccaccacctcatttaccacatccacaatgatggaaccaccttcatccactgtatcaactacaggcagaggtcagaccacctttcccagctctacagccacattccctgagaccactacactgactcctacaactgacatttctacagtatctctcacaacagccatgacttctcctccccccgtcagttcttcaatcactcccaccaatacaatgacttctatgagaactacaacctattggcccacagccactaatacattatcaccactcaccagtagcattttatcttctacacctgtcccaagcacagaaatgatcaccagtcataccacaaacaccacccctctatccaccttggtgactacactcctcactaccatcaccagatctacacctacatctgagaccacctaccctacttctcccaccagcattgtctcagactccacgactgaaatcacctattccacaagtataacaggtacattgtccactgccactactctcccacccacctcttcctctctcccaaccacagaaacagccacgatgactcctaccacaaccttgataaccaccacccctaataccacctcccttagtacccccagcttcacttcttcaaccatctactccacagtcagcacatccacaactgccatctcctcagcttcccctacctcaggtaccatggtaacttccacaaccatgaccccatcttctctgagtacagacaccccttccacaacaccaacaactatcacctacccttctgtgggctctaccggtttcctgactacagcaacagacctcacatcaacattcactgtttccagttcctcagcaatgtccacaagtgtcattccatcttcccccagcatccagaatacagaaacctcatcccttgtcagcatgacctctgccaccactcccagtttgagaccaactatcacaagtactgacagcactctaacaagttccctcctgacgaccttcccaagtacatattcattttcatcttccatgtctgccagcagtgcagggaccactcacacagagactatttcctcacttccagccagcaccaatacaatccacacaacagctgaatccgccctggcacccactaccaccacctcattcaccacatccccaacgatggaaccaccttcaaccactgtagcgactacaggcacaggtcagaccaccttccccagctctacagccacattccttgagaccaccacactgactcctacaactgacttttctacagaatctctcacaacagccatgacttctactccccccatcacttcttcaatcactcccaccgatacaatgacttctatgagaactacgacctcttggcccacagccactaatacgttatcaccactcaccagtagcattttatcttctacacctgtcccaagcacagaggtgaccaccagtcataccacaaacaccaatcctgtatccacgttggtgactacactccccattaccatcaccaggtctacacttacatctgagaccgcctaccctagttctcccacaagcactgtcacagagtccacaactgaaatcacctatcccaccactatgacagagacatcatctactgccacctctcttccacccacctcttccttggtctcaaccgcagaaacagccaaaactcctaccacaaacttggtaaccaccaccaccaagaccacctcacatagtaccaccagcttcacttcttcaaccatctactccacagccagcacacccaccactgccatcacctcagttcccactaccttgggtaccatggtgacttctacatccatgatcccatctactgtgagtacaggtatccctacctcacaaccaacaactattactccctcatccgtgggcatcagtggttcattacctatgatgacagacctcacctcagtgtacacagtctccagcatgtctgcaaggccaacaagtgtcattccttcatctcccactgtccagaatacagaaacctcaatctttgttagcatgatgtctgctaccactcccagtggaggaccaactttcacaagtactgagaacactccaacaaggtccctcctgacaagctttccagtgacacattcattttcctcttccatgtctgccagcagtgtagggaccactcacacccagagtatctcctcacccccagccatcaccagtacactccacacaacagctgaatccaccccatcacctacaaccaccatgtcattcacaacatttacaaagatggaaacaccttcatccactgtagcaactacaggcacaggtcagactacattcaccagttcaacagccacatcccctaagaccaccacactgactcctacctctgacatttccacaggatctttcaaaacagccgtgagttctactccccccatcacttcttcaatcacctccacatatacggtgacttcgatgacaactaccacccctctagggcccacagccactaatacgttaccatcatttaccagtagcgtttcatcttctacgcctgtcccaagtacagaagcgatcaccagtggtaccacaaacaccacccctctatctacattggtgaccacattctccaattccgacaccagttctacacctacatctgagaccacctaccctacttctcttactagtgctctcacagattccacgaccagaaccacctattccaccaatatgacaggtacattgtccactgtgacctctcttcgacccacctcttcctctctcctcaccacagtaacagccacagttccaacaacaaacttggtaaccacgaccaccaagatcacctcacacagtactcctagcttcacttcttcaatcgcaaccaccgagaccccctcacacagtactcccagattcacttcttcaatcaccactaccgagaccccctcacacagtactcccagattcacttcttcaatcaccaataccaagaccacctcacacagctctcccagcttcacttcttcgatcaccaccaccgagaccacatcccacaatactcccagcctcacttcttcaatcaccaccaccaagaccacctcacacagtactcccagctacacttctttgatcaccacaaccaccaccacctcacacagtactcccagcttcacttcttccatcaccaccactgagaccacatcccacaatactcccagcttgacttcttcgatcacaaccaccgagaccacatcccatagtactcccagcttcacttcttcgatcaccaccgagaccacatcccacagtactcccagcttcacttcattgatcaccatcaccgagatcacctcacacagtactctcagctacactacctcaatcaccaccaccgagaccccctcacacagtactctcagcttcacttcttcaatcaccaccactgagaccacctcacacagtactcccagcttcacttcctcaatcaccacctctgagatgccctcacacagtactcccagcttcacttcttcgatcaccaccactgagaacgccacacacagtactcccaacttcacttcttcaatcaccaccaccgagaccacatcccacagtactcccagcttcacttctttgatcaccaccacggagaccacctcacacaggtgggggaccaccgagaccacatcctacagtactcccagcttcacttcttcaaataccatcactgagaccacctcacacagtactcccagctacattacctcaatcaccaccaccgagaccccctcaagcagtactcccagcttcagttcttcgatcaccaccactgagaccacatcccacagtactcccggcttcacttcttcaatcaccaccactgagactacatcccacagtactcccagcttcacttcttcgatcaccaccactgagaccacctcacatgatactcccagcttcacttcttcaatcaccaccagtgagaccccctcacacagtactcccagctccacttctttaatcaccaccaccaagaccacctcacacagtactcccagcttcacttcttcgatcaccaccacggagaccacctcacacagtgctcacagcttcacttcttcgatcaccaccaccgagaccacctcacacaatactcgcagcttcacttcttcgatcaccaccaccgagaccaactctcacagtactaccagcttcacttcttcgatcaccaccaccgagaccacctcacacagtactcccagcttcagttcttcaatcaccaccactgagacccccttacacagtactcctggcctcacttcgtgggtcaccaccaccaagaccacctcacacattactcctggcctcacttcttcaatcaccaccactgagactacctcacacagtactcctggcttcacttcttcaatcaccaccactgagaccacctcagagagtactcccagcctcagttcttcaaccatctactccacagtcagcacatccacaactgccatcacctcacattttactacctcagagactgcggtgactcccacacctgtaaccccatcttctctgagtacagacatcccgaccacaagcctacgaactctcaccccttcgtctgtgggcaccagcacttcattgactacaaccacagactttccctctatacccactgatatcagtaccttaccaactcgaacacacatcatttcatcttctccctccatccaaagtacagaaacctcatcccttgtgggcaccacctctcccaccatgtccactgtgagaatgaccctcagaattactgagaacaccccaatcagttcctttagcacaagtattgttgttatacctgaaaccccaacacagacccctcctgtactgacgtcagccactgggacccaaacatctcctgcacctactactgtcacctttggaagtacggattcctccacgtccactcttcatactcttactccatcaacagccttgagcacgatcgtgtcaacatcacaggttcctattcctagcacacattcctccacccttcaaacaactccttctactccctcattgcaaacttcactcacatctacaagtgagttcactacagaatctttcactaggggaagtacgtctacaaatgcaatcttgacttcttttagtaccatcatctggtcctcaacacccactattatcatgtcctcttctccatcttctgccagcataactccagtgttttccactaccattcattctgttccttcttcaccatacattttcagtacagaaaatgtgggctccgcttctatcacaggctttcctagtctctcttcctctgcaactaccagcacttcttcaaccagctcctctctgaccacagctctcactgaaataacccccttttcttatatttcccttccctccaccacaccctgtccaggaactataacaattaccatagtccctgcctcccccactgatccatgtgttgaaatggatcccagcactgaagctacttctcctcccaccaccccattaacagtctttccctttactaccgaaatggtcacctgtcctacctccatcagtatccaaactactcttactacatatatggacacttcttccatgatgccagaaagtgagtccagcatctcacccaatgcttccagttccactggcactgggactgtacccacaaacacagttttcacaagtactcgactgcccaccagtgagacctggctgagcaacagttctgtgatccccctacctcttcctggcgtctctaccatcccgctcaccatgaaaccaagcagtagcctcccgaccatcctgaggacttcaagcaagtcaacacacccctccccacccaccactaggacttcagagacaccagtggccactacccagactcctaccacccttacatcacgcaggacaactcgcatcacttctcagatgaccacacagtccacgttgaccaccactgcaggcacctgtgacaatggtggcacctgggaacagggccagtgtgcttgccttccggggttttctggggaccgctgtcagctccagaccagatgccagaatgggggtcagtgggatggcctcaaatgccagtgccccagcaccttctatggttccagttgtgagtttgctgtggaacaggtggatctagatgtagtggagaccgaggtgggcatggaagtgtctgtggatcagcagttctcgccggacctcaatgacaacacttcccaggcctacagggatttcaacaagaccttctggaatcagatgcagaagatttttgcagacatgcagggcttcaccttcaagggtgtggagatcctgtccctgaggaatggcagcatcgtggtggactacctggtcctgctggagatgcccttcagcccccagctggagagcgagtatgagcaggtgaagaccacgctgaaggaggggctgcagaacgccagccaggatgtgaacagctgccaggactcccagaccctgtgttttaagcctgactccatcaaggtgaacaacaacagcaagacagagctgaccccggcagccatctgccgccgcgccgctcccacgggctatgaagagttctacttccccttggtggaggccacccggctccgctgtgtcaccaaatgcacgtcgggggtggacaacgccatcgactgtcaccagggccagtgcgttctggagacgagcggtcccacgtgtcggtcctgggaccaggacaggaaatggttcgagacctgggatgaggaagtcgtgggcactttttcaaactggggtttcgaggacgacggaacagacaaggatacaaatttctatgtggccttggagaacgtggacaccactatgaaggtgcacatcaagagacccgagatgacctcgtcctcagtgtgagccctgcggggccccttcaccaccccctccgccctgccccggacacaagggtctgcattgcgtccatttcaagaggtggccccaggacgcgggcagcccaggctcctgctgttcttgggcaagatgagactgttcccccaaatccc

SEQ ID NO: 155643 - DNA, 3982 bp, Homo sapiens
  Payload ID: 10597
  Gene Symbol: MUC4
  Gene Name: mucin 4, cell surface associated
  Uniprot ID: Q99102
  ENST ID: ENST00000346145
  CDS Start-End: 41-3571
ggagcttccccagggagccagggggacttttgccgcagccatgaagggggcacgctggaggagggtcccctgggtgtccctgagctgcctgtgtctctgcctccttccgcatgtggtcccaggaatgacaacaccgtcactgaagacagacggtgggagacgcacagccacatcaccaccccccacaacctcccagaccatcatttccaccattcccagcactgccatgcacacccgctccacagctgcccccatccccatcctgcctgagagaggagtttccctcttcccctatggggcaggcgccggggacctggagttcgtcaggaggaccgtggacttcacctccccactcttcaagccggcgactggcttcccccttggctcctctctccgtgattccctctacttcacagacaatggccagatcatcttcccagagtcagactaccagattttctcctaccccaacccactcccaacaggcttcacaggccgggaccctgtggccctggtggctccgttctgggacgatgctgacttctccactggtcgggggaccacattttatcaggaatacgagacgttctatggtgaacacagcctgctagtccagcaggccgagtcttggattagaaagatgacaaacaacgggggctacaaggccaggtgggccctaaaggtcacgtgggtcaatgcccacgcctatcctgcccagtggaccctcgggagcaacacctaccaagccatcctctccacggacgggagcaggtcctatgccctgtttctctaccagagcggtgggatgcagtgggacgtggcccagcgctcaggcaacccggtgctcatgggcttctctagtggagatggctatttcgaaaacagcccactgatgtcccagccagtgtgggagaggtatcgccctgatagattcctgaattccaactcaggcctccaagggctgcagttctacaggctacaccgggaagaaaggcccaactaccgtctcgagtgcctgcagtggctgaagagccagcctcggtggcccagctggggctggaaccaggtctcctgcccttgttcctggcagcagggacgacgggacttacgattccaacccgtcagcataggtcgctggggcctcggcagtaggcagctgtgcagcttcacctcttggcgaggaggcgtgtgctgcagctacgggccctggggagagtttcgtgaaggctggcacgtgcagcgtccttggcagttggcccaggaactggagccacagagctggtgctgccgctggaatgacaagccctacctctgtgccctgtaccagcagaggcggccccacgtgggctgtgctacatacaggcccccacagcccgcctggatgttcggggacccccacatcaccaccttggatggtgtcagttacaccttcaatgggctgggggacttcctgctggtcggggcccaagacgggaactcctccttcctgcttcagggccgcaccgcccagactggctcagcccaggccaccaacttcatcgcctttgcggctcagtaccgctccagcagcctgggccccgtcacggtccaatggctccttgagcctcacgacgcaatccgtgtcctgctggataaccagactgtgacatttcagcctgaccatgaagacggcggaggccaggagacgttcaacgccaccggagtcctcctgagccgcaacggctctgaggtctcggccagcttcgacggctgggccaccgtctcggtgatcgcgctctccaacatcctccacgcctccgccagcctcccgcccgagtaccagaaccgcacggaggggctcctgggggtctggaataacaatccagaggacgacttcaggatgcccaatggctccaccattcccccagggagccctgaggagatgcttttccactttggaatgacctggcagatcaacgggacaggcctccttggcaagaggaatgaccagctgccttccaacttcacccctgttttctactcacaactgcaaaaaaacagctcctgggctgaacatttgatctccaactgtgacggagatagctcatgcatctatgacaccctggccctgcgcaacgcaagcatcggacttcacacgagggaagtcagtaaaaactacgagcaggcgaacgccaccctcaatcagtacccgccctccatcaatggtggtcgtgtgattgaagcctacaaggggcagaccacgctgattcagtacaccagcaatgctgaggatgccaacttcacgctcagagacagctgcaccgacttggagctctttgagaatgggacgttgctgtggacacccaagtcgctggagccattcactctggagattctagcaagaagtgccaagattggcttggcatctgcactccagcccaggactgtggtctgccattgcaatgcagagagccagtgtttgtacaatcagaccagcagggtgggcaactcctccctggaggtggctggctgcaagtgtgacgggggcaccttcggccgctactgcgagggctccgaggatgcctgtgaggagccgtgcttcccgagtgtccactgcgttcctgggaagggctgcgaggcctgccctccaaacctgactggggatgggcggcactgtgcggctctggggagctctttcctgtgtcagaaccagtcctgccctgtgaattactgctacaatcaaggccactgctacatctcccagactctgggctgtcagcccatgtgcacctgccccccagccttcactgacagccgctgcttcctggctgggaacaacttcagtccaactgtcaacctagaacttcccttaagagtcatccagctcttgctcagtgaagaggaaaatgcctccatggcagaagtcaacgcctcggtggcatacagactggggaccctggacatgcgggcctttctccgcaacagccaagtggaacgaatcgattctgcagcaccggcctcgggaagccccatccaacactggatggtcatctcggagttccagtaccgccctcggggcccggtcattgacttcctgaacaaccagctgctggccgcggtggtggaggcgttcttataccacgttccacggaggagtgaggagcccaggaacgacgtggtcttccagcccatctccggggaagacgtgcgcgatgtgacagccctgaacgtgagcacgctgaaggcttacttcagatgcgatggctacaagggctacgacctggtctacagcccccagagcggcttcacctgcgtgtccccgtgcagtaggggctactgtgaccatggaggccagtgccagcacctgcccagtgggccccgctgcagctgtgtgtccttctccatctacacggcctggggcgagcactgtgagcacctgagcatgaaactcgacgcgttcttcggcatcttctttggggccctgggcggcctcttgctgctgggggtcgggacgttcgtggtcctgcgcttctggggttgctccggggccaggttctcctatttcctgaactcagctgaggccttgccttgaaggggcagctgtggcctaggctacctcaagactcacctcatccttaccgcacatttaaggcgccattgcttttgggagactggaaaagggaaggtgactgaaggctgtcaggattcttcaaggagaatgaatactgggaatcaagacaagactataccttatccataggcgcaggtgcacagggggaggccataaagatcaaacatgcatggatgggtcctcacgcagacacacccacagaaggacactagcctgtgcacgcgcgcgtgcacacacacacacacacacacgagttcataatgtggtgatggccctaagttaagcaaaatgcttctgcacacaaaactctctggtttacttcaaattaactctatttaaataaagtctctctgactttttgtgtctccaaaa

SEQ ID NO: 155644 - DNA, 3806 bp, Homo sapiens
  Payload ID: 10597
  Gene Symbol: MUC4
  Gene Name: mucin 4, cell surface associated
  ENST ID: ENST00000308466
  CDS Start-End: 1-524
ctctgaagatggaaacaccaggaatgacaacaccgtcactgaagacagacggtgggagacgcacagccacatcaccaccccccacaacctcccagaccatcatttccaccattcccagcactgccatgcacacccgctccacagctgcccccatccccatcctgcctgagagaggtgaggccatacaggagtttccctcttcccctatggggcaggcgccggggacctggagttcgtcaggaggaccgtggacttcacctccccactcttcaagccggcgactggcttcccccttggctcctctctccgtgattccctctacttcacagacaatggccagatcatcttcccagagtcagactaccagattttctcctaccccaacccactcccaacaggcttcacaggccgggaccctgtggccctggtggctccgttctgggacgatgctgacttctccactggtcgggggaccacattttatcaggaatacgagacgttctatggtgaacacagcctgctagtccagcaggccgagtcttggattagaaagatgacaaacaacgggggctacaaggccaggtgggccctaaaggtcacgtgggtcaatgcccacgcctatcctgcccagtggaccctcgggagcaacacctaccaagccatcctctccacggacgggagcaggtcctatgccctgtttctctaccagagcggtgggatgcagtgggacgtggcccagcgctcaggcaacccggtgctcatgggcttctctaggcctccaagggctgcagttctacaggctacaccgggaagaaaggcccaactaccgtctcgagtgcctgcagtggctgaagagccagcctcggtggcccagctggggctggaaccaggtctcctgcccttgttcctggcagcagggacgacgggacttacgattccaacccgtcagcataggtcgctggggcctcggcagtaggcagctgtgcagcttcacctcttggcgaggaggcgtgtgctgcagctacgggccctggggagagtttcgtgaaggctggcacgtgcagcgtccttggcagttggcccaggaactggagccacagagctggtgctgccgctggaatgacaagccctacctctgtgccctgtaccagcagaggcggccccacgtgggctgtgctacatacaggcccccacagcccgcctggatgttcggggacccccacatcaccaccttggatggtgtcagttacaccttcaatgggctgggggacttcctgctggtcggggcccaagacgggaactcctccttcctgcttcagggccgcaccgcccagactggctcagcccaggccaccaacttcatcgcctttgcggctcagtaccgctccagcagcctgggccccgtcacggtccaatggctccttgagcctcacgacgcaatccgtgtcctgctggataaccagactgtgacatttcagcctgaccatgaagacggcggaggccaggagacgttcaacgccaccggagtcctcctgagccgcaacggctctgaggtctcggccagcttcgacggctgggccaccgtctcggtgatcgcgctctccaacatcctccacgcctccgccagcctcccgcccgagtaccagaaccgcacggaggggctcctgggggtctggaataacaatccagaggacgacttcaggatgcccaatggctccaccattcccccagggagccctgaggagatgcttttccactttggaatgacctggcagatcaacgggacaggcctccttggcaagaggaatgaccagctgccttccaacttcacccctgttttctactcacaactgcaaaaaaacagctcctgggctgaacatttgatctccaactgtgacggagatagctcatgcatctatgacaccctggccctgcgcaacgcaagcatcggacttcacacgagggaagtcagtaaaaactacgagcaggcgaacgccaccctcaatcagtacccgccctccatcaatggtggtcgtgtgattgaagcctacaaggggcagaccacgctgattcagtacaccagcaatgctgaggatgccaacttcacgctcagagacagctgcaccgacttggagctctttgagaatgggacgttgctgtggacacccaagtcgctggagccattcactctggagattctagcaagaagtgccaagattggcttggcatctgcactccagcccaggactgtggtctgccattgcaatgcagagagccagtgtttgtacaatcagaccagcagggtgggcaactcctccctggaggtggctggctgcaagtgtgacgggggcaccttcggccgctactgcgagggctccgaggatgcctgtgaggagccgtgcttcccgagtgtccactgcgttcctgggaagggctgcgaggcctgccctccaaacctgactggggatgggcggcactgtgcggctctggggagctctttcctgtgtcagaaccagtcctgccctgtgaattactgctacaatcaaggccactgctacatctcccagactctgggctgtcagcccatgtgcacctgccccccagccttcactgacagccgctgcttcctggctgggaacaacttcagtccaactgtcaacctagaacttcccttaagagtcatccagctcttgctcagtgaagaggaaaatgcctccatggcagaagtcaacgcctcggtggcatacagactggggaccctggacatgcgggcctttctccgcaacagccaagtggaacgaatcgattctgcagcaccggcctcgggaagccccatccaacactggatggtcatctcggagttccagtaccgccctcggggcccggtcattgacttcctgaacaaccagctgctggccgcggtggtggaggcgttcttataccacgttccacggaggagtgaggagcccaggaacgacgtggtcttccagcccatctccggggaagacgtgcgcgatgtgacagccctgaacgtgagcacgctgaaggcttacttcagatgcgatggctacaagggctacgacctggtctacagcccccagagcggcttcacctgcgtgtccccgtgcagtaggggctactgtgaccatggaggccagtgccagcacctgcccagtgggccccgctgcagctgtgtgtccttctccatctacacggcctggggcgagcactgtgagcacctgagcatgaaactcgacgcgttcttcggcatcttctttggggccctgggcggcctcttgctgctgggggtcgggacgttcgtggtcctgcgcttctggggttgctccggggccaggttctcctatttcctgaactcagctgaggccttgccttgaaggggcagctgtggcctaggctacctcaagactcacctcatccttaccgcacatttaaggcgccattgcttttgggagactggaaaagggaaggtgactgaaggctgtcaggattcttcaaggagaatgaatactgggaatcaagacaagactataccttatccataggcgcaggtgcacagggggaggccataaagatcaaacatgcatggatgggtcctcacgcagacacacccacagaaggacactagcctgtgcacgcgcgcgtgcacacacacacacacacacacgagttcataatgtggtgatggccctaagttaagcaaaatgcttctgcacacaaaactctctggtttacttcaaattaactctatttaaataaagtctctctgactttttgtgtctccaaaa

SEQ ID NO: 155645 - DNA, 3829 bp, Homo sapiens
  Payload ID: 10597
  Gene Symbol: MUC4
  Gene Name: mucin 4, cell surface associated
  Uniprot ID: Q99102
  ENST ID: ENST00000349607
  CDS Start-End: 41-3418
ggagcttccccagggagccagggggacttttgccgcagccatgaagggggcacgctggaggagggtcccctgggtgtccctgagctgcctgtgtctctgcctccttccgcatgtggtcccaggagtttccctcttcccctatggggcaggcgccggggacctggagttcgtcaggaggaccgtggacttcacctccccactcttcaagccggcgactggcttcccccttggctcctctctccgtgattccctctacttcacagacaatggccagatcatcttcccagagtcagactaccagattttctcctaccccaacccactcccaacaggcttcacaggccgggaccctgtggccctggtggctccgttctgggacgatgctgacttctccactggtcgggggaccacattttatcaggaatacgagacgttctatggtgaacacagcctgctagtccagcaggccgagtcttggattagaaagatgacaaacaacgggggctacaaggccaggtgggccctaaaggtcacgtgggtcaatgcccacgcctatcctgcccagtggaccctcgggagcaacacctaccaagccatcctctccacggacgggagcaggtcctatgccctgtttctctaccagagcggtgggatgcagtgggacgtggcccagcgctcaggcaacccggtgctcatgggcttctctagtggagatggctatttcgaaaacagcccactgatgtcccagccagtgtgggagaggtatcgccctgatagattcctgaattccaactcaggcctccaagggctgcagttctacaggctacaccgggaagaaaggcccaactaccgtctcgagtgcctgcagtggctgaagagccagcctcggtggcccagctggggctggaaccaggtctcctgcccttgttcctggcagcagggacgacgggacttacgattccaacccgtcagcataggtcgctggggcctcggcagtaggcagctgtgcagcttcacctcttggcgaggaggcgtgtgctgcagctacgggccctggggagagtttcgtgaaggctggcacgtgcagcgtccttggcagttggcccaggaactggagccacagagctggtgctgccgctggaatgacaagccctacctctgtgccctgtaccagcagaggcggccccacgtgggctgtgctacatacaggcccccacagcccgcctggatgttcggggacccccacatcaccaccttggatggtgtcagttacaccttcaatgggctgggggacttcctgctggtcggggcccaagacgggaactcctccttcctgcttcagggccgcaccgcccagactggctcagcccaggccaccaacttcatcgcctttgcggctcagtaccgctccagcagcctgggccccgtcacggtccaatggctccttgagcctcacgacgcaatccgtgtcctgctggataaccagactgtgacatttcagcctgaccatgaagacggcggaggccaggagacgttcaacgccaccggagtcctcctgagccgcaacggctctgaggtctcggccagcttcgacggctgggccaccgtctcggtgatcgcgctctccaacatcctccacgcctccgccagcctcccgcccgagtaccagaaccgcacggaggggctcctgggggtctggaataacaatccagaggacgacttcaggatgcccaatggctccaccattcccccagggagccctgaggagatgcttttccactttggaatgacctggcagatcaacgggacaggcctccttggcaagaggaatgaccagctgccttccaacttcacccctgttttctactcacaactgcaaaaaaacagctcctgggctgaacatttgatctccaactgtgacggagatagctcatgcatctatgacaccctggccctgcgcaacgcaagcatcggacttcacacgagggaagtcagtaaaaactacgagcaggcgaacgccaccctcaatcagtacccgccctccatcaatggtggtcgtgtgattgaagcctacaaggggcagaccacgctgattcagtacaccagcaatgctgaggatgccaacttcacgctcagagacagctgcaccgacttggagctctttgagaatgggacgttgctgtggacacccaagtcgctggagccattcactctggagattctagcaagaagtgccaagattggcttggcatctgcactccagcccaggactgtggtctgccattgcaatgcagagagccagtgtttgtacaatcagaccagcagggtgggcaactcctccctggaggtggctggctgcaagtgtgacgggggcaccttcggccgctactgcgagggctccgaggatgcctgtgaggagccgtgcttcccgagtgtccactgcgttcctgggaagggctgcgaggcctgccctccaaacctgactggggatgggcggcactgtgcggctctggggagctctttcctgtgtcagaaccagtcctgccctgtgaattactgctacaatcaaggccactgctacatctcccagactctgggctgtcagcccatgtgcacctgccccccagccttcactgacagccgctgcttcctggctgggaacaacttcagtccaactgtcaacctagaacttcccttaagagtcatccagctcttgctcagtgaagaggaaaatgcctccatggcagaagtcaacgcctcggtggcatacagactggggaccctggacatgcgggcctttctccgcaacagccaagtggaacgaatcgattctgcagcaccggcctcgggaagccccatccaacactggatggtcatctcggagttccagtaccgccctcggggcccggtcattgacttcctgaacaaccagctgctggccgcggtggtggaggcgttcttataccacgttccacggaggagtgaggagcccaggaacgacgtggtcttccagcccatctccggggaagacgtgcgcgatgtgacagccctgaacgtgagcacgctgaaggcttacttcagatgcgatggctacaagggctacgacctggtctacagcccccagagcggcttcacctgcgtgtccccgtgcagtaggggctactgtgaccatggaggccagtgccagcacctgcccagtgggccccgctgcagctgtgtgtccttctccatctacacggcctggggcgagcactgtgagcacctgagcatgaaactcgacgcgttcttcggcatcttctttggggccctgggcggcctcttgctgctgggggtcgggacgttcgtggtcctgcgcttctggggttgctccggggccaggttctcctatttcctgaactcagctgaggccttgccttgaaggggcagctgtggcctaggctacctcaagactcacctcatccttaccgcacatttaaggcgccattgcttttgggagactggaaaagggaaggtgactgaaggctgtcaggattcttcaaggagaatgaatactgggaatcaagacaagactataccttatccataggcgcaggtgcacagggggaggccataaagatcaaacatgcatggatgggtcctcacgcagacacacccacagaaggacactagcctgtgcacgcgcgcgtgcacacacacacacacacacacgagttcataatgtggtgatggccctaagttaagcaaaatgcttctgcacacaaaactctctggtttacttcaaattaactctatttaaataaagtctctctgactttttgtgtctccaaaa

SEQ ID NO: 155646 - DNA, 3777 bp, Homo sapiens
  Payload ID: 10597
  Gene Symbol: MUC4
  Gene Name: mucin 4, cell surface associated
  ENST ID: ENST00000339251
  CDS Start-End: 1-434
ctctgaagatggaaacaccaggaatgacaacaccgtcactgaagacagacggtgggagacgcacagccacatcaccaccccccacaacctcccagaccatcatttccaccattcccagcactgccatgcacacccgctccacagctgcccccatccccatcctgcctgagagaggagtttccctcttcccctatggggcaggcgccggggacctggagttcgtcaggaggaccgtggacttcacctccccactcttcaagccggcgactggcttcccccttggctcctctctccgtgattccctctacgcttcacaggccgggaccctgtggccctggtggctccgttctgggacgatgctgacttctccactggtcgggggaccacattttatcaggaatacgagacgttctatggtgaacacagcctgctagtccagcaggccgagtcttggattagaaagatgacaaacaacgggggctacaaggccaggtgggccctaaaggtcacgtgggtcaatgcccacgcctatcctgcccagtggaccctcgggagcaacacctaccaagccatcctctccacggacgggagcaggtcctatgccctgtttctctaccagagcggtgggatgcagtgggacgtggcccagcgctcagtggagatggctatttcgaaaacagcccactgatgtcccagccagtgtgggagaggtatcgccctgatagattcctgaattccaactcaggcctccaagggctgcagttctacaggctacaccgggaagaaaggcccaactaccgtctcgagtgcctgcagtggctgaagagccagcctcggtggcccagctggggctggaaccaggtctcctgcccttgttcctggcagcagggacgacgggacttacgattccaacccgtcagcataggtcgctggggcctcggcagtaggcagctgtgcagcttcacctcttggcgaggaggcgtgtgctgcagctacgggccctggggagagtttcgtgaaggctggcacgtgcagcgtccttggcagttggcccaggaactggagccacagagctggtgctgccgctggaatgacaagccctacctctgtgccctgtaccagcagaggcggccccacgtgggctgtgctacatacaggcccccacagcccgcctggatgttcggggacccccacatcaccaccttggatggtgtcagttacaccttcaatgggctgggggacttcctgctggtcggggcccaagacgggaactcctccttcctgcttcagggccgcaccgcccagactggctcagcccaggccaccaacttcatcgcctttgcggctcagtaccgctccagcagcctgggccccgtcacggtccaatggctccttgagcctcacgacgcaatccgtgtcctgctggataaccagactgtgacatttcagcctgaccatgaagacggcggaggccaggagacgttcaacgccaccggagtcctcctgagccgcaacggctctgaggtctcggccagcttcgacggctgggccaccgtctcggtgatcgcgctctccaacatcctccacgcctccgccagcctcccgcccgagtaccagaaccgcacggaggggctcctgggggtctggaataacaatccagaggacgacttcaggatgcccaatggctccaccattcccccagggagccctgaggagatgcttttccactttggaatgacctggcagatcaacgggacaggcctccttggcaagaggaatgaccagctgccttccaacttcacccctgttttctactcacaactgcaaaaaaacagctcctgggctgaacatttgatctccaactgtgacggagatagctcatgcatctatgacaccctggccctgcgcaacgcaagcatcggacttcacacgagggaagtcagtaaaaactacgagcaggcgaacgccaccctcaatcagtacccgccctccatcaatggtggtcgtgtgattgaagcctacaaggggcagaccacgctgattcagtacaccagcaatgctgaggatgccaacttcacgctcagagacagctgcaccgacttggagctctttgagaatgggacgttgctgtggacacccaagtcgctggagccattcactctggagattctagcaagaagtgccaagattggcttggcatctgcactccagcccaggactgtggtctgccattgcaatgcagagagccagtgtttgtacaatcagaccagcagggtgggcaactcctccctggaggtggctggctgcaagtgtgacgggggcaccttcggccgctactgcgagggctccgaggatgcctgtgaggagccgtgcttcccgagtgtccactgcgttcctgggaagggctgcgaggcctgccctccaaacctgactggggatgggcggcactgtgcggctctggggagctctttcctgtgtcagaaccagtcctgccctgtgaattactgctacaatcaaggccactgctacatctcccagactctgggctgtcagcccatgtgcacctgccccccagccttcactgacagccgctgcttcctggctgggaacaacttcagtccaactgtcaacctagaacttcccttaagagtcatccagctcttgctcagtgaagaggaaaatgcctccatggcagaagtcaacgcctcggtggcatacagactggggaccctggacatgcgggcctttctccgcaacagccaagtggaacgaatcgattctgcagcaccggcctcgggaagccccatccaacactggatggtcatctcggagttccagtaccgccctcggggcccggtcattgacttcctgaacaaccagctgctggccgcggtggtggaggcgttcttataccacgttccacggaggagtgaggagcccaggaacgacgtggtcttccagcccatctccggggaagacgtgcgcgatgtgacagccctgaacgtgagcacgctgaaggcttacttcagatgcgatggctacaagggctacgacctggtctacagcccccagagcggcttcacctgcgtgtccccgtgcagtaggggctactgtgaccatggaggccagtgccagcacctgcccagtgggccccgctgcagctgtgtgtccttctccatctacacggcctggggcgagcactgtgagcacctgagcatgaaactcgacgcgttcttcggcatcttctttggggccctgggcggcctcttgctgctgggggtcgggacgttcgtggtcctgcgcttctggggttgctccggggccaggttctcctatttcctgaactcagctgaggccttgccttgaaggggcagctgtggcctaggctacctcaagactcacctcatccttaccgcacatttaaggcgccattgcttttgggagactggaaaagggaaggtgactgaaggctgtcaggattcttcaaggagaatgaatactgggaatcaagacaagactataccttatccataggcgcaggtgcacagggggaggccataaagatcaaacatgcatggatgggtcctcacgcagacacacccacagaaggacactagcctgtgcacgcgcgcgtgcacacacacacacacacacacgagttcataatgtggtgatggccctaagttaagcaaaatgcttctgcacacaaaactctctggtttacttcaaattaactctatttaaataaagtctctctgactttttgtgtctccaaaa

SEQ ID NO: 155647 - DNA, 3645 bp, Homo sapiens
  Payload ID: 10597
  Gene Symbol: MUC4
  Gene Name: mucin 4, cell surface associated
  ENST ID: ENST00000392407
  CDS Start-End: 1-434
ctctgaagatggaaacaccaggaatgacaacaccgtcactgaagacagacggtgggagacgcacagccacatcaccaccccccacaacctcccagaccatcatttccaccattcccagcactgccatgcacacccgctccacagctgcccccatccccatcctgcctgagagaggagtttccctcttcccctatggggcaggcgccggggacctggagttcgtcaggaggaccgtggacttcacctccccactcttcaagccggcgactggcttcccccttggctcctctctccgtgattccctctacgcttcacaggccgggaccctgtggccctggtggctccgttctgggacgatgctgacttctccactggtcgggggaccacattttatcaggaatacgagacgttctatggtgaacacagcctgctagtccagcaggccgagtcttggattagaaagatgacaaacaacgggggctacaaggccaggtgggccctaaaggtcacgtgggtcaatgcccacgcctatcctgcccagtggaccctcgggagcaacacctaccaagccatcctctccacggacgggagcaggtcctatgccctgtttctctaccagagcggtgggatgcagtgggacgtggcccagcgctcaggcaacccggtgctcatgggcttctctagtggagatggctatttcgaaaacagcccactgatgtcccagccagtgtgggagaggtatcgccctgatagattcctgaattccaactcaggcctccaagggctgcagttctacaggctacaccgggaagaaaggcccaactaccgtctcgagtgcctgcagtggctgaagagccagcctcggtggcccagctggggctggaaccaggtctcctgcccttgttcctggcagcagggacgacgggacttacgattccaacccgtcagcataggtcgctggggcctcggcagtaggcagctgtgcagcttcacctcttggcgaggaggcgtgtgctgcagctacgggccctggggagagtttcgtgaaggctggcacgtgcagcgtccttggcagttggcccaggaactggagccacagagctggtgctgccgctggaatgacaagccctacctctgtgccctgtaccagcagaggcggccccacgtgggctgtgctacatacaggcccccacagcccgcctggatgttcggggacccccacatcaccaccttggatggtgtcagttacaccttcaatgggctgggggacttcctgctggtcggggcccaagacgggaactcctccttcctgcttcagggccgcaccgcccagactggctcagcccaggccaccaacttcatcgcctttgcggctcagtaccgctccagcagcctgggccccgtcacggtccaatggctccttgagcctcacgacgcaatccgtgtcctgctggataaccagactgtgacatttcagcctgaccatgaagacggcggaggccaggagacgttcaacgccaccggagtcctcctgagccgcaacggctctgaggtctcggccagcttcgacggctgggccaccgtctcggtgatcgcgctctccaacatcctccacgcctccgccagcctcccgcccgagtaccagaaccgcacggaggggctcctgggggtctggaataacaatccagaggacgacttcaggatgcccaatggctccaccattcccccagggagccctgaggagatgcttttccactttggaatgacctggcagatcaacgggacaggcctccttggcaagaggaatgaccagctgccttccaacttcacccctgttttctactcacaactgcaaaaaaacagctcctgggctgaacatttgatctccaactgtgacggagatagctcatgcatctatgacaccctggccctgcgcaacgcaagcatcggacttcacacgagggaagtcagtaaaaactacgagcaggcgaacgccaccctcaatcagtacccgccctccatcaatggtggtcgtgtgattgaagcctacaaggggcagaccacgctgattcagtacaccagcaatgctgaggatgccaacttcacgctcagagacagctgcaccgacttggagctctttgagaatgggacgttgctgtggacacccaagtcgctggagccattcactctggagattctagcaagaagtgccaagattggcttggcatctgcactccagcccaggactgtggtctgccattgcaatgcagagagccagtgtttgtacaatcagaccagcagggtgggcaactcctccctggagctctggggagctctttcctgtgtcagaaccagtcctgccctgtgaattactgctacaatcaaggccactgctacatctcccagactctgggctgtcagcccatgtgcacctgccccccagccttcactgacagccgctgcttcctggctgggaacaacttcagtccaactgtcaacctagaacttcccttaagagtcatccagctcttgctcagtgaagaggaaaatgcctccatggcagaagtcaacgcctcggtggcatacagactggggaccctggacatgcgggcctttctccgcaacagccaagtggaacgaatcgattctgcagcaccggcctcgggaagccccatccaacactggatggtcatctcggagttccagtaccgccctcggggcccggtcattgacttcctgaacaaccagctgctggccgcggtggtggaggcgttcttataccacgttccacggaggagtgaggagcccaggaacgacgtggtcttccagcccatctccggggaagacgtgcgcgatgtgacagccctgaacgtgagcacgctgaaggcttacttcagatgcgatggctacaagggctacgacctggtctacagcccccagagcggcttcacctgcgtgtccccgtgcagtaggggctactgtgaccatggaggccagtgccagcacctgcccagtgggccccgctgcagctgtgtgtccttctccatctacacggcctggggcgagcactgtgagcacctgagcatgaaactcgacgcgttcttcggcatcttctttggggccctgggcggcctcttgctgctgggggtcgggacgttcgtggtcctgcgcttctggggttgctccggggccaggttctcctatttcctgaactcagctgaggccttgccttgaaggggcagctgtggcctaggctacctcaagactcacctcatccttaccgcacatttaaggcgccattgcttttgggagactggaaaagggaaggtgactgaaggctgtcaggattcttcaaggagaatgaatactgggaatcaagacaagactataccttatccataggcgcaggtgcacagggggaggccataaagatcaaacatgcatggatgggtcctcacgcagacacacccacagaaggacactagcctgtgcacgcgcgcgtgcacacacacacacacacacacgagttcataatgtggtgatggccctaagttaagcaaaatgcttctgcacacaaaactctctggtttacttcaaattaactctatttaaataaagtctctctgactttttgtgtctccaaaa

SEQ ID NO: 155648 - DNA, 3944 bp, Homo sapiens
  Payload ID: 10597
  Gene Symbol: MUC4
  Gene Name: mucin 4, cell surface associated
  ENST ID: ENST00000448861
  CDS Start-End: 1-494
ctctgaagatggaaacaccaggaatgacaacaccgtcactgaagacagacggtgggagacgcacagccacatcaccaccccccacaacctcccagaccatcatttccaccattcccagcactgccatgcacacccgctccacagctgcccccatccccatcctgcctgagagaggtgaggccatacaggagtttccctcttcccctatggggcaggcgccggggacctggagttcgtcaggaggaccgtggacttcacctccccactcttcaagccggcgactggcttcccccttggctcctctctccgtgattccctctacttcacagacaatggccagatcatcttcccagagtcagactaccagattttctcctaccccaacccactcccaacaggcttcacaggccgggaccctgtggccctggtggctccgttctgggacgatgctgacttctccactggtcgggggaccacattttatcaggctgtagggggtctatcctaacaagagtgagtcaagagggcccgtcctgtgctcctggactgggtgaataactccaatcagaggaaatgtgatgaaagctactgcaggaagtgtggaccgtgcccctgccacggacagggcagtgtggaggctccaagaggaagagactcacgcctgttctcaagaagctgcagattaggcatggggaggaatacgagacgttctatggtgaacacagcctgctagtccagcaggccgagtcttggattagaaagatgacaaacaacgggggctacaaggccaggtgggccctaaaggtcacgtgggtcaatgcccacgcctatcctgcccagtggaccctcgggagcaacacctaccaagccatcctctccacggacgggagcaggtcctatgccctgtttctctaccagagcggtgggatgcagtgggacgtggcccagcgctcaggcaacccggtgctcatgggcttctctagtggagatggctatttcgaaaacagcccactgatgtcccagccagtgtgggagaggtatcgccctgatagattcctgaattccaactcaggcctccaagggctgcagttctacaggctacaccgggaagaaaggcccaactaccgtctcgagtgcctgcagtggctgaagagccagcctcggtggcccagctggggctggaaccaggtctcctgcccttgttcctggcagcagggacgacgggacttacgattccaacccgtcagcataggtcgctggggcctcggcagtaggcagctgtgcagcttcacctcttggcgaggaggcgtgtgctgcagctacgggccctggggagagtttcgtgaaggctggcacgtgcagcgtccttggcagttggcccaggaactggagccacagagctggtgctgccgctggaatgacaagccctacctctgtgccctgtaccagcagaggcggccccacgtgggctgtgctacatacaggcccccacagcccgcctggatgttcggggacccccacatcaccaccttggatggtgtcagttacaccttcaatgggctgggggacttcctgctggtcggggcccaagacgggaactcctccttcctgcttcagggccgcaccgcccagactggctcagcccaggccaccaacttcatcgcctttgcggctcagtaccgctccagcagcctgggccccgtcacggtccaatggctccttgagcctcacgacgcaatccgtgtcctgctggataaccagactgtgacatttcagcctgaccatgaagacggcggaggccaggagacgttcaacgccaccggagtcctcctgagccgcaacggctctgaggtctcggccagcttcgacggctgggccaccgtctcggtgatcgcgctctccaacatcctccacgcctccgccagcctcccgcccgagtaccagaaccgcacggaggggctcctgggggtctggaataacaatccagaggacgacttcaggatgcccaatggctccaccattcccccagggagccctgaggagatgcttttccactttggaatgacctggcagatcaacgggacaggcctccttggcaagaggaatgaccagctgccttccaacttcacccctgttttctactcacaactgcaaaaaaacagctcctgggctgaacatttgatctccaactgtgacggagatagctcatgcatctatgacaccctggccctgcgcaacgcaagcatcggacttcacacgagggaagtcagtaaaaactacgagcaggcgaacgccaccctcaatcagtacccgccctccatcaatggtggtcgtgtgattgaagcctacaaggggcagaccacgctgattcagtacaccagcaatgctgaggatgccaacttcacgctcagagacagctgcaccgacttggagctctttgagaatgggacgttgctgtggacacccaagtcgctggagccattcactctggagattctagcaagaagtgccaagattggcttggcatctgcactccagcccaggactgtggtctgccattgcaatgcagagagccagtgtttgtacaatcagaccagcagggtgggcaactcctccctggagctctggggagctctttcctgtgtcagaaccagtcctgccctgtgaattactgctacaatcaaggccactgctacatctcccagactctgggctgtcagcccatgtgcacctgccccccagccttcactgacagccgctgcttcctggctgggaacaacttcagtccaactgtcaacctagaacttcccttaagagtcatccagctcttgctcagtgaagaggaaaatgcctccatggcagaagtcaacgcctcggtggcatacagactggggaccctggacatgcgggcctttctccgcaacagccaagtggaacgaatcgattctgcagcaccggcctcgggaagccccatccaacactggatggtcatctcggagttccagtaccgccctcggggcccggtcattgacttcctgaacaaccagctgctggccgcggtggtggaggcgttcttataccacgttccacggaggagtgaggagcccaggaacgacgtggtcttccagcccatctccggggaagacgtgcgcgatgtgacagccctgaacgtgagcacgctgaaggcttacttcagatgcgatggctacaagggctacgacctggtctacagcccccagagcggcttcacctgcgtgtccccgtgcagtaggggctactgtgaccatggaggccagtgccagcacctgcccagtgggccccgctgcagctgtgtgtccttctccatctacacggcctggggcgagcactgtgagcacctgagcatgaaactcgacgcgttcttcggcatcttctttggggccctgggcggcctcttgctgctgggggtcgggacgttcgtggtcctgcgcttctggggttgctccggggccaggttctcctatttcctgaactcagctgaggccttgccttgaaggggcagctgtggcctaggctacctcaagactcacctcatccttaccgcacatttaaggcgccattgcttttgggagactggaaaagggaaggtgactgaaggctgtcaggattcttcaaggagaatgaatactgggaatcaagacaagactataccttatccataggcgcaggtgcacagggggaggccataaagatcaaacatgcatggatgggtcctcacgcagacacacccacagaaggacactagcctgtgcacgcgcgcgtgcacacacacacacacacacacgagttcataatgtggtgatggccctaagttaagcaaaatgcttctgcacacaaaactctctggtttacttcaaattaactctatttaaataaagtctctctgactttttgtgtctccaaaa

SEQ ID NO: 155649 - DNA, 3716 bp, Homo sapiens
  Payload ID: 10597
  Gene Symbol: MUC4
  Gene Name: mucin 4, cell surface associated
  ENST ID: ENST00000415455
  CDS Start-End: 1-434
ctctgaagatggaaacaccaggaatgacaacaccgtcactgaagacagacggtgggagacgcacagccacatcaccaccccccacaacctcccagaccatcatttccaccattcccagcactgccatgcacacccgctccacagctgcccccatccccatcctgcctgagagaggagtttccctcttcccctatggggcaggcgccggggacctggagttcgtcaggaggaccgtggacttcacctccccactcttcaagccggcgactggcttcccccttggctcctctctccgtgattccctctacgcttcacaggccgggaccctgtggccctggtggctccgttctgggacgatgctgacttctccactggtcgggggaccacattttatcaggaatacgagacgttctatggtgaacacagcctgctagtccagcaggccgagtcttggattagaaagatgacaaacaacgggggctacaaggccaggtgggccctaaaggtcacgtgggtcaatgcccacgcctatcctgcccagtggaccctcgggagcaacacctaccaagccatcctctccacggacgggagcaggtcctatgccctgtttctctaccagagcggtgggatgcagtgggacgtggcccagcgctcaggcaacccggtgctcatgggcttctctaggcctccaagggctgcagttctacaggctacaccgggaagaaaggcccaactaccgtctcgagtgcctgcagtggctgaagagccagcctcggtggcccagctggggctggaaccaggtctcctgcccttgttcctggcagcagggacgacgggacttacgattccaacccgtcagcataggtcgctggggcctcggcagtaggcagctgtgcagcttcacctcttggcgaggaggcgtgtgctgcagctacgggccctggggagagtttcgtgaaggctggcacgtgcagcgtccttggcagttggcccaggaactggagccacagagctggtgctgccgctggaatgacaagccctacctctgtgccctgtaccagcagaggcggccccacgtgggctgtgctacatacaggcccccacagcccgcctggatgttcggggacccccacatcaccaccttggatggtgtcagttacaccttcaatgggctgggggacttcctgctggtcggggcccaagacgggaactcctccttcctgcttcagggccgcaccgcccagactggctcagcccaggccaccaacttcatcgcctttgcggctcagtaccgctccagcagcctgggccccgtcacggtccaatggctccttgagcctcacgacgcaatccgtgtcctgctggataaccagactgtgacatttcagcctgaccatgaagacggcggaggccaggagacgttcaacgccaccggagtcctcctgagccgcaacggctctgaggtctcggccagcttcgacggctgggccaccgtctcggtgatcgcgctctccaacatcctccacgcctccgccagcctcccgcccgagtaccagaaccgcacggaggggctcctgggggtctggaataacaatccagaggacgacttcaggatgcccaatggctccaccattcccccagggagccctgaggagatgcttttccactttggaatgacctggcagatcaacgggacaggcctccttggcaagaggaatgaccagctgccttccaacttcacccctgttttctactcacaactgcaaaaaaacagctcctgggctgaacatttgatctccaactgtgacggagatagctcatgcatctatgacaccctggccctgcgcaacgcaagcatcggacttcacacgagggaagtcagtaaaaactacgagcaggcgaacgccaccctcaatcagtacccgccctccatcaatggtggtcgtgtgattgaagcctacaaggggcagaccacgctgattcagtacaccagcaatgctgaggatgccaacttcacgctcagagacagctgcaccgacttggagctctttgagaatgggacgttgctgtggacacccaagtcgctggagccattcactctggagattctagcaagaagtgccaagattggcttggcatctgcactccagcccaggactgtggtctgccattgcaatgcagagagccagtgtttgtacaatcagaccagcagggtgggcaactcctccctggaggtggctggctgcaagtgtgacgggggcaccttcggccgctactgcgagggctccgaggatgcctgtgaggagccgtgcttcccgagtgtccactgcgttcctgggaagggctgcgaggcctgccctccaaacctgactggggatgggcggcactgtgcggctctggggagctctttcctgtgtcagaaccagtcctgccctgtgaattactgctacaatcaaggccactgctacatctcccagactctgggctgtcagcccatgtgcacctgccccccagccttcactgacagccgctgcttcctggctgggaacaacttcagtccaactgtcaacctagaacttcccttaagagtcatccagctcttgctcagtgaagaggaaaatgcctccatggcagaagtcaacgcctcggtggcatacagactggggaccctggacatgcgggcctttctccgcaacagccaagtggaacgaatcgattctgcagcaccggcctcgggaagccccatccaacactggatggtcatctcggagttccagtaccgccctcggggcccggtcattgacttcctgaacaaccagctgctggccgcggtggtggaggcgttcttataccacgttccacggaggagtgaggagcccaggaacgacgtggtcttccagcccatctccggggaagacgtgcgcgatgtgacagccctgaacgtgagcacgctgaaggcttacttcagatgcgatggctacaagggctacgacctggtctacagcccccagagcggcttcacctgcgtgtccccgtgcagtaggggctactgtgaccatggaggccagtgccagcacctgcccagtgggccccgctgcagctgtgtgtccttctccatctacacggcctggggcgagcactgtgagcacctgagcatgaaactcgacgcgttcttcggcatcttctttggggccctgggcggcctcttgctgctgggggtcgggacgttcgtggtcctgcgcttctggggttgctccggggccaggttctcctatttcctgaactcagctgaggccttgccttgaaggggcagctgtggcctaggctacctcaagactcacctcatccttaccgcacatttaaggcgccattgcttttgggagactggaaaagggaaggtgactgaaggctgtcaggattcttcaaggagaatgaatactgggaatcaagacaagactataccttatccataggcgcaggtgcacagggggaggccataaagatcaaacatgcatggatgggtcctcacgcagacacacccacagaaggacactagcctgtgcacgcgcgcgtgcacacacacacacacacacacgagttcataatgtggtgatggccctaagttaagcaaaatgcttctgcacacaaaactctctggtttacttcaaattaactctatttaaataaagtctctctgactttttgtgtctccaaaa

SEQ ID NO: 155650 - DNA, 16197 bp, Homo sapiens
  Payload ID: 10597
  Gene Symbol: MUC4
  Gene Name: mucin 4, cell surface associated
  ENST ID: ENST00000462323
  CDS Start-End: 73-13401
gtctgctcctcacactgcagctgctgggccgtggagcttccccagggagccagggggacttttgccgcagccatgaagggggcacgctggaggagggtcccctgggtgtccctgagctgcctgtgtctctgcctccttccgcatgtggtcccaggaaccacagaggacacattaataactggaagtaaaactgctgccccagtcacctcaacaggctcaacaacagcgacactagagggacaatcaactgcagcttcttcaaggacctctaatcaggacatatcagcttcatctcagaaccaccagactaagagcacggagaccaccagcaaagctcaaaccgacaccctcacgcagatgatgacatcaactcttttttcttccccaagtgtacacaatgtgatggagacagctcctccagatgaaatgaccacatcatttccctccagtgtcaccaacacactcatgatgacatcaaagactataacaatgacaacctccacagactccactcttggaaacacagaagagacatcaacagcaggaactgaaagttctaccccagtgacctcagcagtctcaataacagctggacaggaaggacaatcacgaacaacttcctggaggacctctatccaagacacatcagcttcttctcagaaccactggactcggagcacgcagaccaccagggaatctcaaaccagcaccctaacacacagaaccacttcaactccttctttctctccaagtgtacacaatgtgacagggactgtttctcagaagacatctccttcaggtgaaacagctacctcatccctctgtagtgtcacaaacacatccatgatgacatcagagaagataacagtgacaacctccacaggctccactcttggaaacccaggggagacatcatcagtacctgttactggaagtcttatgccagtcacctcagcagccttagtaacatttgatccagaaggacaatcaccagcaactttctcaaggacttctactcaggacacaacagctttttctaagaaccaccagactcagagcgtggagaccaccagagtatctcaaatcaacaccctcaacaccctcacaccggttacaacatcaactgttttatcctcaccaagtggattcaacccaagtggaacagtttctcaggagacattcccttctggtgaaacaaccacctcatccccttccagtgtcagcaatacattcctggtaacatcaaaggtgttcagaatgccaacctccagagactctactcttggaaacacagaggagacatcactatctgtaagtggaaccatttctgcaatcacttccaaagtttcaaccatatggtggtcagacactctgtcaacagcactctcccccagttctctacctccaaaaatatccacagctttccacacccagcagagtgaaggtgcagagaccacaggacggcctcatgagaggagctcattctctccaggtgtgtctcaagaaatatttactctacatgaaacaacaacatggccttcctcattctccagcaaaggccacacaacttggtcacaaacagaactgccctcaacatcaacaggtgctgccactaggcttgtcacaggaaatccatctacagggacagctggcactattccaagggtcccctctaaggtctcagcaataggggaaccaggagagcccaccacatactcctcccacagcacaactctcccaaaaacaacaggggcaggcgcccagacacaatggacacaagaaacggggaccactggagaggctcttctcagcagcccaagctacagtgtgactcagatgataaaaacggccacatccccatcttcttcacctatgctggatagacacacatcccaacaaattacaacggcaccatcaacaaatcattcaacaatacattccacaagcacctctcctcaggaatcaccagctgtttcccaaaggggtcacactcaagccccgcagaccacacaagaatcacaaaccacgaggtccgtctcccccatgactgacaccaagacagtcaccaccccaggttcttccttcacagccagtgggcactcgccctcagaaattgttcctcaggacgcacccaccataagtgcagcaacaacctttgccccagctcccaccggggatggtcacacaacccaggccccgaccacagcactgcaggcagcacccagcagccatgatgccaccctggggccctcaggaggcacgtcactttccaaaacaggtgcccttactctggccaactctgtagtgtcaacaccagggggcccagaaggacaatggacatcagcctctgccagcacctcacctgacacagcagcagccatgacccatacccaccaggctgagagcacagaggcctctggacaaacacagaccagcgaaccggcctcctcagggtcacgaaccacctcagcgggcacagctaccccttcctcatccggggcgagtggcacaacaccttcaggaagcgaaggaatatccacctcaggagagacgacaaggttttcatcaaacccctccagggacagtcacacaacccagtcaacaaccgaattgctgtccgcctcagccagtcatggtgccatcccagtaagcacaggaatggcgtcttcgatcgtccccggcacctttcatcccaccctctctgaggcctccactgcagggagaccgacaggacagtcaagcccaacttctcccagtgcctctcctcaggagacagccgccatttcccggatggcccagactcagaggacaagaaccagcagagggtctgacactatcagcctggcgtcccaggcaaccgacaccttctcaacagtcccacccacacctccatcgatcacatccactgggcttacatctccacaaaccgagacccacactctgtcaccttcagggtctggtaaaaccttcaccacggccctcatcagcaacgccacccctcttcctgtcacctacgcttcctcggcatccacaggtcacaccacccctcttcatgtcaccgatgcttcctcagtatccacaggtcacgccacccctcttcctgtcaccagcccttcctcagtatccacaggtcacaccacccctcttcctgtcaccgacacttcctcagaatccacaggtcacgtcacccctcttcctgtcaccagcttttcctcagcatccacaggtgacagcacccctcttcctgtcactgacacttcctcagcatccacaggtcacgtcacccctcttcctgtcaccagcctttcctcagcatccacaggtgacaccacccctcttcctgtcactgacacttcctcagcatccacaggtcacgccacctctcttcctgtcaccgacacttcctcagtatccacaggtcacaccacccctcttcctgtcaccgacacttcctcagcatccacaggtcacgccacctctcttcctgtcaccgacacttcctcagtatccacaggtcacaccacccctcttcatgtcactgatgcttcctcagcatccacaggtcaggccacccctcttcctgtcaccagcctttcctcagtatccacaggtgacaccacgcctcttcctgtcactagcccttcctcagcatccacaggtcacgccacccctcttcttgtcaccgacacttcctcagcatccacaggacacgccacccctcttcctgtcaccgacgcttcctcagtgtccacagatcacgccacctctcttcctgtaaccatcccttccgcagcatccacaggtcacaccacccctcttcctgtcaccgacacttcctcagcatccacaggtcaggccacctctcttcttgtcaccgacacttcctcagtatccacaggtgacaccacgcctcttcctgtcactagcacttcctcagcatccacaggtcacgtcactcctcttcatgtcaccagcccttcctcagcatccacaggtcacgccacccctcttcctgtcaccagcctttcctcagcatccacaggtgacaccatgcctcttcctgtcactagcccttcctcagcatccacaggtgacaccacccctcttcctgtcaccgacgcttcctcagtatccacaggtcacaccacccctcttcatgtcactgatgcttcctcagcatccacaggtcaggccacccctcttcctgtcaccagcctttcctcagtatccacaggtgacaccacgcctcttcctgtcactagcccttcctcagcatccacaggtcacgccacccctcttcttgtcaccgacacttcctcagcatccacaggacacgccacccctcttcctgtcaccgacgcttcctcagtgtccacagatcacgccacctctcttcctgtaaccatcccttccgcagcatccacaggtcacaccacccctcttcctgtcaccgacacttcctcagcatccacaggtcaggccacctctcttcttgtcaccgacacttcctcagtatccacaggtgacaccacgcctcttcctgtcactagcacttcctcagcatccacaggtcacgtcactcctcttcatgtcaccagcccttcctcagcatccacaggtcacgccacccctcttcctgtcaccagcctttcctcagcatccacaggtgacaccatgcctcttcctgtcactagcccttcctcagcatccacaggtgacaccacccctcttcctgtcaccgacgcttcctcagtatccacaggtcacaccacccctcttcctgtcaccagcccttcctcagcatctacaggtcacaccacccctcttcctgtcaccgacacttcctcagcatccaaaggtgacaccacccctcttcctgtcaccagcccttcctcagcatctacaggtcacaccacccctcttcctgtcaccgacacttcctcagcatccacaggtgacaccacccctcttcctgtcaccaatgcttcctcattatccacaggtcacgccacccctcttcatgtcaccagcccttcctcagcatccacaggtcacgccacccctcttcctgtcaccagcacttcctcagcatccaccggtcacgccacccctcttcctgtcaccggcctttcctcagctaccacagatgacaccacccgtcttcctgtcaccgacgtttcctcggcatccacaggtcaggccacccctcttcctgtcaccagcctttcctcagtatccacaggtgacaccacgcctcttcctgtcactagcccttcctcagcatccacaggtcacgccagccctcttcttgtcactgacgcttcctcagcatccacaggtcaggccacccctcttcctgtcaccgacacttcctcagtatccacagctcacgccaccccacttcctgtcaccggcctttcttcagcttccacagatgacaccacccgtcttcctgtcaccgacgtttcctcggcatccacaggtcaggccatccctcttcctgtcaccagcccttcctcagcatccacaggtgacaccacccctcttcctgtcaccgacgcttcctcagcatccacaggtgacaccacctctcttcctgtcaccatcccttcctcagcatcttcaggtcacaccacctctcttcctgtcaccgacgcttcctcagtgtccacaggtcacgccacctctcttcttgtcaccgacgcttcctcagtatccacaggtgacaccacccctcttcctgtcaccgacactaactcagcatccacaggtgacaccacccctcttcatgtcaccgacgcttcctcagtatccacaggtcacgccacctctcttcctgtcaccagcctttcctcagcatccacaggtgacaccacgcctcttcctgtcactagcccttcctcagcatcctcaggtcacaccacccctcttcctgtcaccgacgcttcctcagtacccacaggtcacgccacctctcttcctgtcaccgacgcttcctcagtgtccacaggtcacgccacccctcttcctgtcaccgacgcttcctcagtgtccacaggtcatgccacccctcttccggtcaccgacacttcctcagtatctacaggacaggccacccctcttcctgtcaccagcctttcctcagcatccactggtgacaccacgccgcttcctgtcaccgatacttcctcagcatccacaggtcaggacacccctcttcctgtcaccagcctttcctcagtatccacaggtgacaccacgcctcttcctgtcactaacccttcctcagcatccacaggtcacgccacccctcttcttgtcaccgacgcttcctcaatatccacaggtcacgccacctctcttcttgtcaccgacgcttcctcagtatccacaggtcacgccaccgctcttcatgacaccgatgcttcctcattatccacaggggacaccacccctcttcctgtcaccagcccttcctcaacatccacaggtgacaccacccctcttcctgtcaccgaaacttcctcagtatccacaggtcacgccacctctcttcctgtcaccgacacttcctcagcatccacaggtcacgccacctctcttcctgtcaccgacacttcctcagcatccacaggtcacgccacccctcttcctgtcaccgacacttcctcagcatccacaggtcaggccacccctcttcctgtcaccagcccttcctcagcatccacaggtcacgccatccctcttcttgtcaccgacacttcctcagcatccacaggacaggccacccctcttcctgtcaccagcctttcctcagcatccacaggtgacaccacccctcttcctgtcaccgacgcttcctcagtgtccacaggtcacgccacctctcttcctgtcaccagcctttcctcagtatccacaggtgacaccactcctcttcctgtcactagcccttcctcagcatccacaggtcacgccacccctcttcatgtcaccgacgcttcctcagcatccacaggtcacgccacccctcttcctgtcaccagcctttcctcagcatccacaggtgacaccacgcctcttcctgtcactagcccttcctcagcatccacaggtcacgccacccctcttcatgtcaccgacgcttcctcagtatccacaggtgacaccacccctcttcctgtcaccagctcttcctcagcatcctcaggtcacaccacccctcttcctgtcaccgacgcttcctcagcatccacaggtgacaccacccctcttcctgtcaccgacacttcctcagcatccacaggtcacgccacccatcttcctgtcaccggcctttcctcagcttccacaggtgacaccacccgtcttcctgtcaccaacgtttcctcggcatccacaggtcatgccacccctcttcctgtcaccagcacttcctcagcatccacaggtgacaccacccctcttcctggcaccgacacttcctcagtatccacaggtcacaccacccctcttcttgtcaccgacgcttcgtcagtatccacaggtgacaccacccgtcttcctgtcaccagcccttcctcagcatctacaggtcacaccacccctctacctgtcaccgacactccctcagcatccacaggtgacaccacccctcttcctgtcaccaatgcttcctcattatccacacgtcacgccacctctcttcatgtcaccagcccttcctcagcatccacaggtcacgccacctctcttcctgtcaccgacacttccgcagcatccacaggtcacgccacccctcttcctgtcaccagcacttcctcagcatccacaggtgacaccacccctcttcctgtcaccgacacttactcagcatccacaggtcaggccacccctcttcctgtcaccagcctttcctcagtatccacaggtgacaccacgcctcttcctgtcactagcccttcctcagcatccacaggtcacgccactcctcttcttgtcaccgacgcttcctcagcatccacaggtcaggccacccctcttcctgtcaccagcctttcctcagtatccacaggtgacaccacgcctcttcctgtcactagcccttcctcagcatccaccggtcatgccacctctcttcctgtcaccgacacttcctcagcatccacaggtgacaccacctctcttcctgtcaccgacacttcctcagcatacacaggtgacaccacctctcttcctgtcaccgacacttcctcatcatccacaggtgacaccacccctcttcttgtcaccgagacttcctcagtatccacaggtgacaccacccctcttcctgtcaccgacacttcctcagcatccacaggtcacgccacccctcttcctgtcaccaacacttcctcagtatccacaggtcacgccacccctcttcatgtcaccagcccttcctcagcatccacaggtcacaccacccctcttcctgtcaccgacgcttcgtcagtgtccacaggtcacgccacctctcttcctgtcaccgacgcttcctcagtgttcacaggtcatgccacctctcttcctgtcaccatcccttcctcagcatcctcaggtcacaccacccctcttcctgtcaccgacgcttcctcagtgtccacaggtcacgccacctctcttcctgtcaccgacgcttcctcagtgtccacaggtcatgccacccctcttcctgtcaccgacgcttcctcagtgtccacaggtcacgctacccctcttcctctcaccagcctttcctcagtatccacaggtgacaccacgcctcttcctgtcaccgacacttcctcagcatccacaggtcaggccacccctcttcctgtcaccagcctttcctcagtatccacaggtgacaccacccctcttcctgtcaccgacacttcctcagcatccacaggtcacgccacctctcttcctgtcaccgacacttcctcagcatccacaggtcacgccacccctcttcctgacaccgacacttcctcagcatccacaggtcacgccacccttcttcctgtcaccgacacttcctcagcatccataggtcacgccacctctcttcctgtcaccgacacttcctcaatatccacaggtcacgccacccctcttcatgtcaccagcccttcctcagcatccaccggtcacgccaccccgcttcctgtcaccgacacttcctcagcatccacaggtcacgccaaccctcttcatgtcaccagcccttcctcagcatccaccggtcacgccaccccgcttcctgtcaccgacacttcctcagcatccacaggtcacgccacccctcttcctgtcaccagcctttcctcagtatccacaggtgacaccacgcctcttcctgtcactagcccttcctcagcatccacaggtcacaccacccctcttcctgtcaccgacacttcctcagcatccacaggtcaggccaccgctcttcctgtcaccagcacttcctcagcatccacaggtgacaccacccctcttcctgtcaccgacacttcctcagcatccacaggtcaggccacccctcttcctgtcaccagcctttcctcagtatccacaggtgacaccacgcctcttcctgtcactagcccttcctcagcatccacaggtcacgccactcctcttcttgtcaccgacgcttcctcagcatccacaggtcaggccacccctcttcctgtcaccagcctttcctcagtatccacaggtgacaccacgcctcttcctgtcactagcccttcctcagcatccaccggtcatgccacctctcttcctgtcaccgacacttcctcagcatccacaggtgacaccacctctcttcctgtcaccgacacttcctcagcatacacaggtgacaccacctctcttcctgtcaccgacacttcctcatcatccacaggtgacaccacccctcttcttgtcaccgagacttcctcagtatccacaggtcacgccactcctcttcttgtcaccgacgcttcctcagcatccacaggtcacgccacccctcttcatgtcaccagcccttcctcagcatccacaggtgacaccacccctgtgcctgtcaccgacacttcctcagtatccacaggtcacgccacccctcttcctgtcaccggcctttcctcagcttccacaggtgacaccacccgtcttcctgtcaccgacatttcctcggcatccacaggtcaggccacccctcttcctgtcaccaacacttcctcagtatccacaggtgacaccatgcctcttcctgtcactagcccttcctcagcatccacaggtcacgccacccctcttcctgtcaccagcacttcctcagcatccaccggtcacgccacccctgttcctgtcaccagcacttcctcagcatctacaggtcacaccacccctcttcctgtcaccgacacttcctcagcatccacaggtgacaccacccctcttcctgtcaccagcccttcctcagcatctacaggtcacaccacccctcttcatgtcaccatcccttcctcagcatccacaggtgacaccagcactcttcctgtcaccggcgcttcctcagcatccaccggtcacgccacccctcttcctgtcaccgacacttcctcagtatccaccggtcacgccacgcctcttcctgtcaccagcctttcctcagtatccacaggtgacaccacccctcttcctgtcaccgacgcttcctcggcatccacaggtcaggccacccctcttcctgtcaccagcctttcctcagtatccacaggtgacaccacccctcttcttgtcaccgacgcttcctcagtatccacaggtcacgccacccctcttcctgtcaccgacacttcctcagcatccacaggtgacaccacccgtcttcctgtcacggacacttcctcagcatccacaggtcaggccacccctcttcctgtcaccagcctttcctcagtatccacaggtgacaccacccctcttcttgtcaccgacgcttcctcagtatccacaggtcacgccacccctcttcctgtcaccgacacttcctcagcatccacaggtgacaccacccgtcttcctgtcacggacacttcctcagcatccacaggtcaggccacccctcttcctgtcaccatcccttcctcatcatcctcaggtcacaccacccctcttcctgtcaccagcacttcctcagtatctacaggtcacgtcacccctcttcatgtcaccagcccttcctcagcatccacaggtcacgtcacccctcttcctgtcaccagcacttcctcagcatccacaggtcacgccacccctcttcttgtcaccgacgcttcctcagtgtccacaggtcacgccacgcctcttcctgtcaccgacgcttcctcagcatccacaggtgacaccacccctcttcctgtcaccgacacttcctcagcatccacaggtcaggccacccctcttcctgtcaccagcctttcctcagtatccacaggtgacaccacccctcttcctgtcaccgacgcttcctcagcatccacaggtcacgccacccctcttcctgtcaccatcccttcctcagtatccacaggtgacaccatgcctcttcctgtcactagcccttcctcagcatccacaggtcacgccacccctcttcctgttaccggcctttcctcagcttccacaggtgacaccacccctcttcctgtcaccgacacttcctcagcatccacacgtcacgccacccctcttcctgtcaccgacacttcctcagcttccacagatgacaccacccgtcttcctgtcaccgacgtttcctcggcatccacaggacatgccacccctcttcctgtcaccagcacttcctcagcatccacaggtgacaccacccctcttcctgtcaccgacacttcctcagtatccacaggtcacgccacctctcttcctgtcaccagccgttcctcagcatccacaggtcacgccaccccccttcctgtcaccgacacttcctcagtatccacaggtcacgccacccctcttcctgtcaccagcacttcctcagtatctacaggtcacgccacccctcttcctgtcaccagcccttcctcagcatccacaggtcacgccacccctgttcctgtcaccagcacttcctcagcatccacaggtgacaccacccctcttcctgtcaccaatgcttcctcattatccacaggtcacgccacccctcttcatgtcaccagcccttcctcagcatccagaggtgacaccagcactcttcctgtcaccgatgcttcctcagcatccaccggtcacgccacccctcttcctctcaccagcctttcctcagtatccacaggtgacaccacgcctcttcctgtcaccgacacttcctctgcatccacaggtcaggccacccctcttcctgtcaccagcctttcctcagtatccacaggtgacaccacgcctcttcctgtcaccatcccttcctcagcatcctcaggtcacaccacctctcttcctgtcaccgacgcttcctcagtgtccacaggtcacggcacccctcttcctgtcaccagcacttcctcagcatccacaggtgacaccacccctcttcctgtcaccgacacttcctcagcatccacaggtcacgccacccctcttcctgtcaccgacacttcctcagcatccacaggtcacgccacccctcttcctgtcaccagcctttcctcagtatccacaggtcacgccacccctcttgctgtcagcagtgctacctcagcttccacagtatcctcggactcccctctgaagatggaaacaccaggaatgacaacaccgtcactgaagacagacggtgggagacgcacagccacatcaccaccccccacaacctcccagaccatcatttccaccattcccagcactgccatgcacacccgctccacagctgcccccatccccatcctgcctgagagaggagtttccctcttcccctatggggcaggcgccggggacctggagttcgtcaggaggaccgtggacttcacctccccactcttcaagccggcgactggcttcccccttggctcctctctccgtgattccctctacgcttcacaggccgggaccctgtggccctggtggctccgttctgggacgatgctgacttctccactggtcgggggaccacattttatcagagcaacacctaccaagccatcctctccacggacgggagcaggtcctatgccctgtttctctaccagagcggtgggatgcagtgggacgtggcccagcgctcaggcaacccggtgctcatgggcttctctagtggagatggctatttcgaaaacagcccactgatgtcccagccagtgtgggagaggtatcgccctgatagattcctgaattccaactcaggcctccaagggctgcagttctacaggctacaccgggaagaaaggcccaactaccgtctcgagtgcctgcagtggctgaagagccagcctcggtggcccagctggggctggaaccaggtctcctgcccttgttcctggcagcagggacgacgggacttacgattccaacccgtcagcataggtcgctggggcctcggcagtaggcagctgtgcagcttcacctcttggcgaggaggcgtgtgctgcagctacgggccctggggagagtttcgtgaaggctggcacgtgcagcgtccttggcagttggcccaggaactggagccacagagctggtgctgccgctggaatgacaagccctacctctgtgccctgtaccagcagaggcggccccacgtgggctgtgctacatacaggcccccacagcccgcctggatgttcggggacccccacatcaccaccttggatggtgtcagttacaccttcaatgggctgggggacttcctgctggtcggggcccaagacgggaactcctccttcctgcttcagggccgcaccgcccagactggctcagcccaggccaccaacttcatcgcctttgcggctcagtaccgctccagcagcctgggccccgtcacggtccaatggctccttgagcctcacgacgcaatccgtgtcctgctggataaccagactgtgacatttcagcctgaccatgaagacggcggaggccaggagacgttcaacgccaccggagtcctcctgagccgcaacggctctgaggtctcggccagcttcgacggctgggccaccgtctcggtgatcgcgctctccaacatcctccacgcctccgccagcctcccgcccgagtaccagaaccgcacggaggggctcctgggggtctggaataacaatccagaggacgacttcaggatgcccaatggctccaccattcccccagggagccctgaggagatgcttttccactttggaatgacctggcagatcaacgggacaggcctccttggcaagaggaatgaccagctgccttccaacttcacccctgttttctactcacaactgcaaaaaaacagctcctgggctgaacatttgatctccaactgtgacggagatagctcatgcatctatgacaccctggccctgcgcaacgcaagcatcggacttcacacgagggaagtcagtaaaaactacgagcaggcgaacgccaccctcaatcagtacccgccctccatcaatggtggtcgtgtgattgaagcctacaaggggcagaccacgctgattcagtacaccagcaatgctgaggatgccaacttcacgctcagagacagctgcaccgacttggagctctttgagaatgggacgttgctgtggacacccaagtcgctggagccattcactctggagattctagcaagaagtgccaagattggcttggcatctgcactccagcccaggactgtggtctgccattgcaatgcagagagccagtgtttgtacaatcagaccagcagggtgggcaactcctccctggaggtggctggctgcaagtgtgacgggggcaccttcggccgctactgcgagggctccgaggatgcctgtgaggagccgtgcttcccgagtgtccactgcgttcctgggaagggctgcgaggcctgccctccaaacctgactggggatgggcggcactgtgcggctctggggagctctttcctgtgtcagaaccagtcctgccctgtgaattactgctacaatcaaggccactgctacatctcccagactctgggctgtcagcccatgtgcacctgccccccagccttcactgacagccgctgcttcctggctgggaacaacttcagtccaactgtcaacctagaacttcccttaagagtcatccagctcttgctcagtgaagaggaaaatgcctccatggcagaagtcaacgcctcggtggcatacagactggggaccctggacatgcgggcctttctccgcaacagccaagtggaacgaatcgattctgcagcaccggcctcgggaagccccatccaacactggatggtcatctcggagttccagtaccgccctcggggcccggtcattgacttcctgaacaaccagctgctggccgcggtggtggaggcgttcttataccacgttccacggaggagtgaggagcccaggaacgacgtggtcttccagcccatctccggggaagacgtgcgcgatgtgacagccctgaacgtgagcacgctgaaggcttacttcagatgcgatggctacaagggctacgacctggtctacagcccccagagcggcttcacctgcgtgtccccgtgcagtaggggctactgtgaccatggaggccagtgccagcacctgcccagtgggccccgctgcagctgtgtgtccttctccatctacacggcctggggcgagcactgtgagcacctgagcatgaaactcgacgcgttcttcggcatcttctttggggccctgggcggcctcttgctgctgggggtcgggacgttcgtggtcctgcgcttctggggttgctccggggccaggttctcctatttcctgaactcagctgaggccttgccttgaaggggcagctgtggcctaggctacctcaagactcacctcatccttaccgcacatttaaggcgccattgcttttgggagactggaaaagggaaggtgactgaaggctgtcaggattctt

SEQ ID NO: 155651 - DNA, 17110 bp, Homo sapiens
  Payload ID: 10597
  Gene Symbol: MUC4
  Gene Name: mucin 4, cell surface associated
  ENST ID: ENST00000463781
  CDS Start-End: 461-16699
tacagccccaaggtcgctccctctggggccctttcttccccattcttcccagcagcccaaagctctggtgggacaggggcagcccctggggagggaggagaggacccaggaacccggctaggagggtggcccacccatttccagtgtgacctgttcccattcccccatgtctcctcccatccctcccgccactcagctcaggctgatgagaagcagagcaacgggtgtatcggtgttttctttcctggtggggtagtggggtggggctgaggagagaaaagggtgattagcgtggggccccgccctcttttgtcctcttcccaggttccctggccccttcggagaaacgcacttggttcgggccagccgcctgaggggacgggctcacgtctgctcctcacactgcagctgctgggccgtggagcttccccagggagccagggggacttttgccgcagccatgaagggggcacgctggaggagggtcccctgggtgtccctgagctgcctgtgtctctgcctccttccgcatgtggtcccaggaaccacagaggacacattaataactggaagtaaaactgctgccccagtcacctcaacaggctcaacaacagcgacactagagggacaatcaactgcagcttcttcaaggacctctaatcaggacatatcagcttcatctcagaaccaccagactaagagcacggagaccaccagcaaagctcaaaccgacaccctcacgcagatgatgacatcaactcttttttcttccccaagtgtacacaatgtgatggagacagctcctccagatgaaatgaccacatcatttccctccagtgtcaccaacacactcatgatgacatcaaagactataacaatgacaacctccacagactccactcttggaaacacagaagagacatcaacagcaggaactgaaagttctaccccagtgacctcagcagtctcaataacagctggacaggaaggacaatcacgaacaacttcctggaggacctctatccaagacacatcagcttcttctcagaaccactggactcggagcacgcagaccaccagggaatctcaaaccagcaccctaacacacagaaccacttcaactccttctttctctccaagtgtacacaatgtgacagggactgtttctcagaagacatctccttcaggtgaaacagctacctcatccctctgtagtgtcacaaacacatccatgatgacatcagagaagataacagtgacaacctccacaggctccactcttggaaacccaggggagacatcatcagtacctgttactggaagtcttatgccagtcacctcagcagccttagtaacatttgatccagaaggacaatcaccagcaactttctcaaggacttctactcaggacacaacagctttttctaagaaccaccagactcagagcgtggagaccaccagagtatctcaaatcaacaccctcaacaccctcacaccggttacaacatcaactgttttatcctcaccaagtggattcaacccaagtggaacagtttctcaggagacattcccttctggtgaaacaaccacctcatccccttccagtgtcagcaatacattcctggtaacatcaaaggtgttcagaatgccaacctccagagactctactcttggaaacacagaggagacatcactatctgtaagtggaaccatttctgcaatcacttccaaagtttcaaccatatggtggtcagacactctgtcaacagcactctcccccagttctctacctccaaaaatatccacagctttccacacccagcagagtgaaggtgcagagaccacaggacggcctcatgagaggagctcattctctccaggtgtgtctcaagaaatatttactctacatgaaacaacaacatggccttcctcattctccagcaaaggccacacaacttggtcacaaacagaactgccctcaacatcaacaggtgctgccactaggcttgtcacaggaaatccatctacagggacagctggcactattccaagggtcccctctaaggtctcagcaataggggaaccaggagagcccaccacatactcctcccacagcacaactctcccaaaaacaacaggggcaggcgcccagacacaatggacacaagaaacggggaccactggagaggctcttctcagcagcccaagctacagtgtgactcagatgataaaaacggccacatccccatcttcttcacctatgctggatagacacacatcccaacaaattacaacggcaccatcaacaaatcattcaacaatacattccacaagcacctctcctcaggaatcaccagctgtttcccaaaggggtcacactcaagccccgcagaccacacaagaatcacaaaccacgaggtccgtctcccccatgactgacaccaagacagtcaccaccccaggttcttccttcacagccagtgggcactcgccctcagaaattgttcctcaggacgcacccaccataagtgcagcaacaacctttgccccagctcccaccggggatggtcacacaacccaggccccgaccacagcactgcaggcagcacccagcagccatgatgccaccctggggccctcaggaggcacgtcactttccaaaacaggtgcccttactctggccaactctgtagtgtcaacaccagggggcccagaaggacaatggacatcagcctctgccagcacctcacctgacacagcagcagccatgacccatacccaccaggctgagagcacagaggcctctggacaaacacagaccagcgaaccggcctcctcagggtcacgaaccacctcagcgggcacagctaccccttcctcatccggggcgagtggcacaacaccttcaggaagcgaaggaatatccacctcaggagagacgacaaggttttcatcaaacccctccagggacagtcacacaacccagtcaacaaccgaattgctgtccgcctcagccagtcatggtgccatcccagtaagcacaggaatggcgtcttcgatcgtccccggcacctttcatcccaccctctctgaggcctccactgcagggagaccgacaggacagtcaagcccaacttctcccagtgcctctcctcaggagacagccgccatttcccggatggcccagactcagaggacaagaaccagcagagggtctgacactatcagcctggcgtcccaggcaaccgacaccttctcaacagtcccacccacacctccatcgatcacatccactgggcttacatctccacaaaccgagacccacactctgtcaccttcagggtctggtaaaaccttcaccacggccctcatcagcaacgccacccctcttcctgtcacctacgcttcctcggcatccacaggtcacaccacccctcttcatgtcaccgatgcttcctcagtatccacaggtcacgccacccctcttcctgtcaccagcccttcctcagtatccacaggtcacaccacccctcttcctgtcaccgacacttcctcagaatccacaggtcacgtcacccctcttcctgtcaccagcttttcctcagcatccacaggtgacagcacccctcttcctgtcactgacacttcctcagcatccacaggtcacgtcacccctcttcctgtcaccagcctttcctcagcatccacaggtgacaccacccctcttcctgtcactgacacttcctcagcatccacaggtcacgccacctctcttcctgtcaccgacacttcctcagtatccacaggtcacaccacccctcttcctgtcaccgacacttcctcagcatccacaggtcacgccacctctcttcctgtcaccgacacttcctcagtatccacaggtcacaccacccctcttcatgtcactgatgcttcctcagcatccacaggtcaggccacccctcttcctgtcaccagcctttcctcagtatccacaggtgacaccacgcctcttcctgtcactagcccttcctcagcatccacaggtcacgccacccctcttcttgtcaccgacacttcctcagcatccacaggacacgccacccctcttcctgtcaccgacgcttcctcagtgtccacagatcacgccacctctcttcctgtaaccatcccttccgcagcatccacaggtcacaccacccctcttcctgtcaccgacacttcctcagcatccacaggtcaggccacctctcttcttgtcaccgacacttcctcagtatccacaggtgacaccacgcctcttcctgtcactagcacttcctcagcatccacaggtcacgtcactcctcttcatgtcaccagcccttcctcagcatccacaggtcacgccacccctcttcctgtcaccagcctttcctcagcatccacaggtgacaccatgcctcttcctgtcactagcccttcctcagcatccacaggtgacaccacccctcttcctgtcaccgacgcttcctcagtatccacaggtcacaccacccctcttcatgtcactgatgcttcctcagcatccacaggtcaggccacccctcttcctgtcaccagcctttcctcagtatccacaggtgacaccacgcctcttcctgtcactagcccttcctcagcatccacaggtcacgccacccctcttcttgtcaccgacacttcctcagcatccacaggacacgccacccctcttcctgtcaccgacgcttcctcagtgtccacagatcacgccacctctcttcctgtaaccatcccttccgcagcatccacaggtcacaccacccctcttcctgtcaccgacacttcctcagcatccacaggtcaggccacctctcttcttgtcaccgacacttcctcagtatccacaggtgacaccacgcctcttcctgtcactagcacttcctcagcatccacaggtcacgtcactcctcttcatgtcaccagcccttcctcagcatccacaggtcacgccacccctcttcctgtcaccagcctttcctcagcatccacaggtgacaccatgcctcttcctgtcactagcccttcctcagcatccacaggtgacaccacccctcttcctgtcaccgacgcttcctcagtatccacaggtcacaccacccctcttcctgtcaccagcccttcctcagcatctacaggtcacaccacccctcttcctgtcaccgacacttcctcagcatccaaaggtgacaccacccctcttcctgtcaccagcccttcctcagcatctacaggtcacaccacccctcttcctgtcaccgacacttcctcagcatccacaggtgacaccacccctcttcctgtcaccaatgcttcctcattatccacaggtcacgccacccctcttcatgtcaccagcccttcctcagcatccacaggtcacgccacccctcttcctgtcaccagcacttcctcagcatccaccggtcacgccacccctcttcctgtcaccggcctttcctcagctaccacagatgacaccacccgtcttcctgtcaccgacgtttcctcggcatccacaggtcaggccacccctcttcctgtcaccagcctttcctcagtatccacaggtgacaccacgcctcttcctgtcactagcccttcctcagcatccacaggtcacgccagccctcttcttgtcactgacgcttcctcagcatccacaggtcaggccacccctcttcctgtcaccgacacttcctcagtatccacagctcacgccaccccacttcctgtcaccggcctttcttcagcttccacagatgacaccacccgtcttcctgtcaccgacgtttcctcggcatccacaggtcaggccatccctcttcctgtcaccagcccttcctcagcatccacaggtgacaccacccctcttcctgtcaccgacgcttcctcagcatccacaggtgacaccacctctcttcctgtcaccatcccttcctcagcatcttcaggtcacaccacctctcttcctgtcaccgacgcttcctcagtgtccacaggtcacgccacctctcttcttgtcaccgacgcttcctcagtatccacaggtgacaccacccctcttcctgtcaccgacactaactcagcatccacaggtgacaccacccctcttcatgtcaccgacgcttcctcagtatccacaggtcacgccacctctcttcctgtcaccagcctttcctcagcatccacaggtgacaccacgcctcttcctgtcactagcccttcctcagcatcctcaggtcacaccacccctcttcctgtcaccgacgcttcctcagtacccacaggtcacgccacctctcttcctgtcaccgacgcttcctcagtgtccacaggtcacgccacccctcttcctgtcaccgacgcttcctcagtgtccacaggtcatgccacccctcttccggtcaccgacacttcctcagtatctacaggacaggccacccctcttcctgtcaccagcctttcctcagcatccactggtgacaccacgccgcttcctgtcaccgatacttcctcagcatccacaggtcaggacacccctcttcctgtcaccagcctttcctcagtatccacaggtgacaccacgcctcttcctgtcactaacccttcctcagcatccacaggtcacgccacccctcttcttgtcaccgacgcttcctcaatatccacaggtcacgccacctctcttcttgtcaccgacgcttcctcagtatccacaggtcacgccaccgctcttcatgacaccgatgcttcctcattatccacaggggacaccacccctcttcctgtcaccagcccttcctcaacatccacaggtgacaccacccctcttcctgtcaccgaaacttcctcagtatccacaggtcacgccacctctcttcctgtcaccgacacttcctcagcatccacaggtcacgccacctctcttcctgtcaccgacacttcctcagcatccacaggtcacgccacccctcttcctgtcaccgacacttcctcagcatccacaggtcaggccacccctcttcctgtcaccagcccttcctcagcatccacaggtcacgccatccctcttcttgtcaccgacacttcctcagcatccacaggacaggccacccctcttcctgtcaccagcctttcctcagcatccacaggtgacaccacccctcttcctgtcaccgacgcttcctcagtgtccacaggtcacgccacctctcttcctgtcaccagcctttcctcagtatccacaggtgacaccactcctcttcctgtcactagcccttcctcagcatccacaggtcacgccacccctcttcatgtcaccgacgcttcctcagcatccacaggtcacgccacccctcttcctgtcaccagcctttcctcagcatccacaggtgacaccacgcctcttcctgtcactagcccttcctcagcatccacaggtcacgccacccctcttcatgtcaccgacgcttcctcagtatccacaggtgacaccacccctcttcctgtcaccagctcttcctcagcatcctcaggtcacaccacccctcttcctgtcaccgacgcttcctcagcatccacaggtgacaccacccctcttcctgtcaccgacacttcctcagcatccacaggtcacgccacccatcttcctgtcaccggcctttcctcagcttccacaggtgacaccacccgtcttcctgtcaccaacgtttcctcggcatccacaggtcatgccacccctcttcctgtcaccagcacttcctcagcatccacaggtgacaccacccctcttcctggcaccgacacttcctcagtatccacaggtcacaccacccctcttcttgtcaccgacgcttcgtcagtatccacaggtgacaccacccgtcttcctgtcaccagcccttcctcagcatctacaggtcacaccacccctctacctgtcaccgacactccctcagcatccacaggtgacaccacccctcttcctgtcaccaatgcttcctcattatccacacgtcacgccacctctcttcatgtcaccagcccttcctcagcatccacaggtcacgccacctctcttcctgtcaccgacacttccgcagcatccacaggtcacgccacccctcttcctgtcaccagcacttcctcagcatccacaggtgacaccacccctcttcctgtcaccgacacttactcagcatccacaggtcaggccacccctcttcctgtcaccagcctttcctcagtatccacaggtgacaccacgcctcttcctgtcactagcccttcctcagcatccacaggtcacgccactcctcttcttgtcaccgacgcttcctcagcatccacaggtcaggccacccctcttcctgtcaccagcctttcctcagtatccacaggtgacaccacgcctcttcctgtcactagcccttcctcagcatccaccggtcatgccacctctcttcctgtcaccgacacttcctcagcatccacaggtgacaccacctctcttcctgtcaccgacacttcctcagcatacacaggtgacaccacctctcttcctgtcaccgacacttcctcatcatccacaggtgacaccacccctcttcttgtcaccgagacttcctcagtatccacaggtgacaccacccctcttcctgtcaccgacacttcctcagcatccacaggtcacgccacccctcttcctgtcaccaacacttcctcagtatccacaggtcacgccacccctcttcatgtcaccagcccttcctcagcatccacaggtcacaccacccctcttcctgtcaccgacgcttcgtcagtgtccacaggtcacgccacctctcttcctgtcaccgacgcttcctcagtgttcacaggtcatgccacctctcttcctgtcaccatcccttcctcagcatcctcaggtcacaccacccctcttcctgtcaccgacgcttcctcagtgtccacaggtcacgccacctctcttcctgtcaccgacgcttcctcagtgtccacaggtcatgccacccctcttcctgtcaccgacgcttcctcagtgtccacaggtcacgctacccctcttcctctcaccagcctttcctcagtatccacaggtgacaccacgcctcttcctgtcaccgacacttcctcagcatccacaggtcaggccacccctcttcctgtcaccagcctttcctcagtatccacaggtgacaccacccctcttcctgtcaccgacacttcctcagcatccacaggtcacgccacctctcttcctgtcaccgacacttcctcagcatccacaggtcacgccacccctcttcctgacaccgacacttcctcagcatccacaggtcacgccacccttcttcctgtcaccgacacttcctcagcatccataggtcacgccacctctcttcctgtcaccgacacttcctcaatatccacaggtcacgccacccctcttcatgtcaccagcccttcctcagcatccaccggtcacgccaccccgcttcctgtcaccgacacttcctcagcatccacaggtcacgccaaccctcttcatgtcaccagcccttcctcagcatccaccggtcacgccaccccgcttcctgtcaccgacacttcctcagcatccacaggtcacgccacccctcttcctgtcaccagcctttcctcagtatccacaggtgacaccacgcctcttcctgtcactagcccttcctcagcatccacaggtcacaccacccctcttcctgtcaccgacacttcctcagcatccacaggtcaggccaccgctcttcctgtcaccagcacttcctcagcatccacaggtgacaccacccctcttcctgtcaccgacacttcctcagcatccacaggtcaggccacccctcttcctgtcaccagcctttcctcagtatccacaggtgacaccacgcctcttcctgtcactagcccttcctcagcatccacaggtcacgccactcctcttcttgtcaccgacgcttcctcagcatccacaggtcaggccacccctcttcctgtcaccagcctttcctcagtatccacaggtgacaccacgcctcttcctgtcactagcccttcctcagcatccaccggtcatgccacctctcttcctgtcaccgacacttcctcagcatccacaggtgacaccacctctcttcctgtcaccgacacttcctcagcatacacaggtgacaccacctctcttcctgtcaccgacacttcctcatcatccacaggtgacaccacccctcttcttgtcaccgagacttcctcagtatccacaggtcacgccactcctcttcttgtcaccgacgcttcctcagcatccacaggtcacgccacccctcttcatgtcaccagcccttcctcagcatccacaggtgacaccacccctgtgcctgtcaccgacacttcctcagtatccacaggtcacgccacccctcttcctgtcaccggcctttcctcagcttccacaggtgacaccacccgtcttcctgtcaccgacatttcctcggcatccacaggtcaggccacccctcttcctgtcaccaacacttcctcagtatccacaggtgacaccatgcctcttcctgtcactagcccttcctcagcatccacaggtcacgccacccctcttcctgtcaccagcacttcctcagcatccaccggtcacgccacccctgttcctgtcaccagcacttcctcagcatctacaggtcacaccacccctcttcctgtcaccgacacttcctcagcatccacaggtgacaccacccctcttcctgtcaccagcccttcctcagcatctacaggtcacaccacccctcttcatgtcaccatcccttcctcagcatccacaggtgacaccagcactcttcctgtcaccggcgcttcctcagcatccaccggtcacgccacccctcttcctgtcaccgacacttcctcagtatccaccggtcacgccacgcctcttcctgtcaccagcctttcctcagtatccacaggtgacaccacccctcttcctgtcaccgacgcttcctcggcatccacaggtcaggccacccctcttcctgtcaccagcctttcctcagtatccacaggtgacaccacccctcttcttgtcaccgacgcttcctcagtatccacaggtcacgccacccctcttcctgtcaccgacacttcctcagcatccacaggtgacaccacccgtcttcctgtcacggacacttcctcagcatccacaggtcaggccacccctcttcctgtcaccagcctttcctcagtatccacaggtgacaccacccctcttcttgtcaccgacgcttcctcagtatccacaggtcacgccacccctcttcctgtcaccgacacttcctcagcatccacaggtgacaccacccgtcttcctgtcacggacacttcctcagcatccacaggtcaggccacccctcttcctgtcaccatcccttcctcatcatcctcaggtcacaccacccctcttcctgtcaccagcacttcctcagtatctacaggtcacgtcacccctcttcatgtcaccagcccttcctcagcatccacaggtcacgtcacccctcttcctgtcaccagcacttcctcagcatccacaggtcacgccacccctcttcttgtcaccgacgcttcctcagtgtccacaggtcacgccacgcctcttcctgtcaccgacgcttcctcagcatccacaggtgacaccacccctcttcctgtcaccgacacttcctcagcatccacaggtcaggccacccctcttcctgtcaccagcctttcctcagtatccacaggtgacaccacccctcttcctgtcaccgacgcttcctcagcatccacaggtcacgccacccctcttcctgtcaccatcccttcctcagtatccacaggtgacaccatgcctcttcctgtcactagcccttcctcagcatccacaggtcacgccacccctcttcctgttaccggcctttcctcagcttccacaggtgacaccacccctcttcctgtcaccgacacttcctcagcatccacacgtcacgccacccctcttcctgtcaccgacacttcctcagcttccacagatgacaccacccgtcttcctgtcaccgacgtttcctcggcatccacaggacatgccacccctcttcctgtcaccagcacttcctcagcatccacaggtgacaccacccctcttcctgtcaccgacacttcctcagtatccacaggtcacgccacctctcttcctgtcaccagccgttcctcagcatccacaggtcacgccaccccccttcctgtcaccgacacttcctcagtatccacaggtcacgccacccctcttcctgtcaccagcacttcctcagtatctacaggtcacgccacccctcttcctgtcaccagcccttcctcagcatccacaggtcacgccacccctgttcctgtcaccagcacttcctcagcatccacaggtgacaccacccctcttcctgtcaccaatgcttcctcattatccacaggtcacgccacccctcttcatgtcaccagcccttcctcagcatccagaggtgacaccagcactcttcctgtcaccgatgcttcctcagcatccaccggtcacgccacccctcttcctctcaccagcctttcctcagtatccacaggtgacaccacgcctcttcctgtcaccgacacttcctctgcatccacaggtcaggccacccctcttcctgtcaccagcctttcctcagtatccacaggtgacaccacgcctcttcctgtcaccatcccttcctcagcatcctcaggtcacaccacctctcttcctgtcaccgacgcttcctcagtgtccacaggtcacggcacccctcttcctgtcaccagcacttcctcagcatccacaggtgacaccacccctcttcctgtcaccgacacttcctcagcatccacaggtcacgccacccctcttcctgtcaccgacacttcctcagcatccacaggtcacgccacccctcttcctgtcaccagcctttcctcagtatccacaggtcacgccacccctcttgctgtcagcagtgctacctcagcttccacagtatcctcggactcccctctgaagatggaaacaccaggaatgacaacaccgtcactgaagacagacggtgggagacgcacagccacatcaccaccccccacaacctcccagaccatcatttccaccattcccagcactgccatgcacacccgctccacagctgcccccatccccatcctgcctgagagaggagtttccctcttcccctatggggcaggcgccggggacctggagttcgtcaggaggaccgtggacttcacctccccactcttcaagccggcgactggcttcccccttggctcctctctccgtgattccctctacttcacagacaatggccagatcatcttcccagagtcagactaccagattttctcctaccccaacccactcccaacaggcttcacaggccgggaccctgtggccctggtggctccgttctgggacgatgctgacttctccactggtcgggggaccacattttatcaggaatacgagacgttctatggtgaacacagcctgctagtccagcaggccgagtcttggattagaaagatgacaaacaacgggggctacaaggccaggtgggccctaaaggtcacgtgggtcaatgcccacgcctatcctgcccagtggaccctcgggagcaacacctaccaagccatcctctccacggacgggagcaggtcctatgccctgtttctctaccagagcggtgggatgcagtgggacgtggcccagcgctcaggcaacccggtgctcatgggcttctctagtggagatggctatttcgaaaacagcccactgatgtcccagccagtgtgggagaggtatcgccctgatagattcctgaattccaactcaggcctccaagggctgcagttctacaggctacaccgggaagaaaggcccaactaccgtctcgagtgcctgcagtggctgaagagccagcctcggtggcccagctggggctggaaccaggtctcctgcccttgttcctggcagcagggacgacgggacttacgattccaacccgtcagcataggtcgctggggcctcggcagtaggcagctgtgcagcttcacctcttggcgaggaggcgtgtgctgcagctacgggccctggggagagtttcgtgaaggctggcacgtgcagcgtccttggcagttggcccaggaactggagccacagagctggtgctgccgctggaatgacaagccctacctctgtgccctgtaccagcagaggcggccccacgtgggctgtgctacatacaggcccccacagcccgcctggatgttcggggacccccacatcaccaccttggatggtgtcagttacaccttcaatgggctgggggacttcctgctggtcggggcccaagacgggaactcctccttcctgcttcagggccgcaccgcccagactggctcagcccaggccaccaacttcatcgcctttgcggctcagtaccgctccagcagcctgggccccgtcacggtccaatggctccttgagcctcacgacgcaatccgtgtcctgctggataaccagactgtgacatttcagcctgaccatgaagacggcggaggccaggagacgttcaacgccaccggagtcctcctgagccgcaacggctctgaggtctcggccagcttcgacggctgggccaccgtctcggtgatcgcgctctccaacatcctccacgcctccgccagcctcccgcccgagtaccagaaccgcacggaggggctcctgggggtctggaataacaatccagaggacgacttcaggatgcccaatggctccaccattcccccagggagccctgaggagatgcttttccactttggaatgacctggcagatcaacgggacaggcctccttggcaagaggaatgaccagctgccttccaacttcacccctgttttctactcacaactgcaaaaaaacagctcctgggctgaacatttgatctccaactgtgacggagatagctcatgcatctatgacaccctggccctgcgcaacgcaagcatcggacttcacacgagggaagtcagtaaaaactacgagcaggcgaacgccaccctcaatcagtacccgccctccatcaatggtggtcgtgtgattgaagcctacaaggggcagaccacgctgattcagtacaccagcaatgctgaggatgccaacttcacgctcagagacagctgcaccgacttggagctctttgagaatgggacgttgctgtggacacccaagtcgctggagccattcactctggagattctagcaagaagtgccaagattggcttggcatctgcactccagcccaggactgtggtctgccattgcaatgcagagagccagtgtttgtacaatcagaccagcagggtgggcaactcctccctggaggtggctggctgcaagtgtgacgggggcaccttcggccgctactgcgagggctccgaggatgcctgtgaggagccgtgcttcccgagtgtccactgcgttcctgggaagggctgcgaggcctgccctccaaacctgactggggatgggcggcactgtgcggctctggggagctctttcctgtgtcagaaccagtcctgccctgtgaattactgctacaatcaaggccactgctacatctcccagactctgggctgtcagcccatgtgcacctgccccccagccttcactgacagccgctgcttcctggctgggaacaacttcagtccaactgtcaacctagaacttcccttaagagtcatccagctcttgctcagtgaagaggaaaatgcctccatggcagaagtcaacgcctcggtggcatacagactggggaccctggacatgcgggcctttctccgcaacagccaagtggaacgaatcgattctgcagcaccggcctcgggaagccccatccaacactggatggtcatctcggagttccagtaccgccctcggggcccggtcattgacttcctgaacaaccagctgctggccgcggtggtggaggcgttcttataccacgttccacggaggagtgaggagcccaggaacgacgtggtcttccagcccatctccggggaagacgtgcgcgatgtgacagccctgaacgtgagcacgctgaaggcttacttcagatgcgatggctacaagggctacgacctggtctacagcccccagagcggcttcacctgcgtgtccccgtgcagtaggggctactgtgaccatggaggccagtgccagcacctgcccagtgggccccgctgcagctgtgtgtccttctccatctacacggcctggggcgagcactgtgagcacctgagcatgaaactcgacgcgttcttcggcatcttctttggggccctgggcggcctcttgctgctgggggtcgggacgttcgtggtcctgcgcttctggggttgctccggggccaggttctcctatttcctgaactcagctgaggccttgccttgaaggggcagctgtggcctaggctacctcaagactcacctcatccttaccgcacatttaaggcgccattgcttttgggagactggaaaagggaaggtgactgaaggctgtcaggattcttcaaggagaatgaatactgggaatcaagacaagactataccttatccataggcgcaggtgcacagggggaggccataaagatcaaacatgcatggatgggtcctcacgcagacacacccacagaaggacactagcctgtgcacgcgcgcgtgcacacacacacacacacacacgagttcataatgtggtgatggccctaagttaagcaaaatgcttctgcacacaaaactctctggtttacttcaaattaactctatttaaataaagtctctctgactttttgtgtctccaaaa

SEQ ID NO: 155652 - DNA, 16245 bp, Homo sapiens
  Payload ID: 10597
  Gene Symbol: MUC4
  Gene Name: mucin 4, cell surface associated
  ENST ID: ENST00000480843
  CDS Start-End: 73-13449
gtctgctcctcacactgcagctgctgggccgtggagcttccccagggagccagggggacttttgccgcagccatgaagggggcacgctggaggagggtcccctgggtgtccctgagctgcctgtgtctctgcctccttccgcatgtggtcccaggaaccacagaggacacattaataactggaagtaaaactgctgccccagtcacctcaacaggctcaacaacagcgacactagagggacaatcaactgcagcttcttcaaggacctctaatcaggacatatcagcttcatctcagaaccaccagactaagagcacggagaccaccagcaaagctcaaaccgacaccctcacgcagatgatgacatcaactcttttttcttccccaagtgtacacaatgtgatggagacagctcctccagatgaaatgaccacatcatttccctccagtgtcaccaacacactcatgatgacatcaaagactataacaatgacaacctccacagactccactcttggaaacacagaagagacatcaacagcaggaactgaaagttctaccccagtgacctcagcagtctcaataacagctggacaggaaggacaatcacgaacaacttcctggaggacctctatccaagacacatcagcttcttctcagaaccactggactcggagcacgcagaccaccagggaatctcaaaccagcaccctaacacacagaaccacttcaactccttctttctctccaagtgtacacaatgtgacagggactgtttctcagaagacatctccttcaggtgaaacagctacctcatccctctgtagtgtcacaaacacatccatgatgacatcagagaagataacagtgacaacctccacaggctccactcttggaaacccaggggagacatcatcagtacctgttactggaagtcttatgccagtcacctcagcagccttagtaacatttgatccagaaggacaatcaccagcaactttctcaaggacttctactcaggacacaacagctttttctaagaaccaccagactcagagcgtggagaccaccagagtatctcaaatcaacaccctcaacaccctcacaccggttacaacatcaactgttttatcctcaccaagtggattcaacccaagtggaacagtttctcaggagacattcccttctggtgaaacaaccacctcatccccttccagtgtcagcaatacattcctggtaacatcaaaggtgttcagaatgccaacctccagagactctactcttggaaacacagaggagacatcactatctgtaagtggaaccatttctgcaatcacttccaaagtttcaaccatatggtggtcagacactctgtcaacagcactctcccccagttctctacctccaaaaatatccacagctttccacacccagcagagtgaaggtgcagagaccacaggacggcctcatgagaggagctcattctctccaggtgtgtctcaagaaatatttactctacatgaaacaacaacatggccttcctcattctccagcaaaggccacacaacttggtcacaaacagaactgccctcaacatcaacaggtgctgccactaggcttgtcacaggaaatccatctacagggacagctggcactattccaagggtcccctctaaggtctcagcaataggggaaccaggagagcccaccacatactcctcccacagcacaactctcccaaaaacaacaggggcaggcgcccagacacaatggacacaagaaacggggaccactggagaggctcttctcagcagcccaagctacagtgtgactcagatgataaaaacggccacatccccatcttcttcacctatgctggatagacacacatcccaacaaattacaacggcaccatcaacaaatcattcaacaatacattccacaagcacctctcctcaggaatcaccagctgtttcccaaaggggtcacactcaagccccgcagaccacacaagaatcacaaaccacgaggtccgtctcccccatgactgacaccaagacagtcaccaccccaggttcttccttcacagccagtgggcactcgccctcagaaattgttcctcaggacgcacccaccataagtgcagcaacaacctttgccccagctcccaccggggatggtcacacaacccaggccccgaccacagcactgcaggcagcacccagcagccatgatgccaccctggggccctcaggaggcacgtcactttccaaaacaggtgcccttactctggccaactctgtagtgtcaacaccagggggcccagaaggacaatggacatcagcctctgccagcacctcacctgacacagcagcagccatgacccatacccaccaggctgagagcacagaggcctctggacaaacacagaccagcgaaccggcctcctcagggtcacgaaccacctcagcgggcacagctaccccttcctcatccggggcgagtggcacaacaccttcaggaagcgaaggaatatccacctcaggagagacgacaaggttttcatcaaacccctccagggacagtcacacaacccagtcaacaaccgaattgctgtccgcctcagccagtcatggtgccatcccagtaagcacaggaatggcgtcttcgatcgtccccggcacctttcatcccaccctctctgaggcctccactgcagggagaccgacaggacagtcaagcccaacttctcccagtgcctctcctcaggagacagccgccatttcccggatggcccagactcagaggacaagaaccagcagagggtctgacactatcagcctggcgtcccaggcaaccgacaccttctcaacagtcccacccacacctccatcgatcacatccactgggcttacatctccacaaaccgagacccacactctgtcaccttcagggtctggtaaaaccttcaccacggccctcatcagcaacgccacccctcttcctgtcacctacgcttcctcggcatccacaggtcacaccacccctcttcatgtcaccgatgcttcctcagtatccacaggtcacgccacccctcttcctgtcaccagcccttcctcagtatccacaggtcacaccacccctcttcctgtcaccgacacttcctcagaatccacaggtcacgtcacccctcttcctgtcaccagcttttcctcagcatccacaggtgacagcacccctcttcctgtcactgacacttcctcagcatccacaggtcacgtcacccctcttcctgtcaccagcctttcctcagcatccacaggtgacaccacccctcttcctgtcactgacacttcctcagcatccacaggtcacgccacctctcttcctgtcaccgacacttcctcagtatccacaggtcacaccacccctcttcctgtcaccgacacttcctcagcatccacaggtcacgccacctctcttcctgtcaccgacacttcctcagtatccacaggtcacaccacccctcttcatgtcactgatgcttcctcagcatccacaggtcaggccacccctcttcctgtcaccagcctttcctcagtatccacaggtgacaccacgcctcttcctgtcactagcccttcctcagcatccacaggtcacgccacccctcttcttgtcaccgacacttcctcagcatccacaggacacgccacccctcttcctgtcaccgacgcttcctcagtgtccacagatcacgccacctctcttcctgtaaccatcccttccgcagcatccacaggtcacaccacccctcttcctgtcaccgacacttcctcagcatccacaggtcaggccacctctcttcttgtcaccgacacttcctcagtatccacaggtgacaccacgcctcttcctgtcactagcacttcctcagcatccacaggtcacgtcactcctcttcatgtcaccagcccttcctcagcatccacaggtcacgccacccctcttcctgtcaccagcctttcctcagcatccacaggtgacaccatgcctcttcctgtcactagcccttcctcagcatccacaggtgacaccacccctcttcctgtcaccgacgcttcctcagtatccacaggtcacaccacccctcttcatgtcactgatgcttcctcagcatccacaggtcaggccacccctcttcctgtcaccagcctttcctcagtatccacaggtgacaccacgcctcttcctgtcactagcccttcctcagcatccacaggtcacgccacccctcttcttgtcaccgacacttcctcagcatccacaggacacgccacccctcttcctgtcaccgacgcttcctcagtgtccacagatcacgccacctctcttcctgtaaccatcccttccgcagcatccacaggtcacaccacccctcttcctgtcaccgacacttcctcagcatccacaggtcaggccacctctcttcttgtcaccgacacttcctcagtatccacaggtgacaccacgcctcttcctgtcactagcacttcctcagcatccacaggtcacgtcactcctcttcatgtcaccagcccttcctcagcatccacaggtcacgccacccctcttcctgtcaccagcctttcctcagcatccacaggtgacaccatgcctcttcctgtcactagcccttcctcagcatccacaggtgacaccacccctcttcctgtcaccgacgcttcctcagtatccacaggtcacaccacccctcttcctgtcaccagcccttcctcagcatctacaggtcacaccacccctcttcctgtcaccgacacttcctcagcatccaaaggtgacaccacccctcttcctgtcaccagcccttcctcagcatctacaggtcacaccacccctcttcctgtcaccgacacttcctcagcatccacaggtgacaccacccctcttcctgtcaccaatgcttcctcattatccacaggtcacgccacccctcttcatgtcaccagcccttcctcagcatccacaggtcacgccacccctcttcctgtcaccagcacttcctcagcatccaccggtcacgccacccctcttcctgtcaccggcctttcctcagctaccacagatgacaccacccgtcttcctgtcaccgacgtttcctcggcatccacaggtcaggccacccctcttcctgtcaccagcctttcctcagtatccacaggtgacaccacgcctcttcctgtcactagcccttcctcagcatccacaggtcacgccagccctcttcttgtcactgacgcttcctcagcatccacaggtcaggccacccctcttcctgtcaccgacacttcctcagtatccacagctcacgccaccccacttcctgtcaccggcctttcttcagcttccacagatgacaccacccgtcttcctgtcaccgacgtttcctcggcatccacaggtcaggccatccctcttcctgtcaccagcccttcctcagcatccacaggtgacaccacccctcttcctgtcaccgacgcttcctcagcatccacaggtgacaccacctctcttcctgtcaccatcccttcctcagcatcttcaggtcacaccacctctcttcctgtcaccgacgcttcctcagtgtccacaggtcacgccacctctcttcttgtcaccgacgcttcctcagtatccacaggtgacaccacccctcttcctgtcaccgacactaactcagcatccacaggtgacaccacccctcttcatgtcaccgacgcttcctcagtatccacaggtcacgccacctctcttcctgtcaccagcctttcctcagcatccacaggtgacaccacgcctcttcctgtcactagcccttcctcagcatcctcaggtcacaccacccctcttcctgtcaccgacgcttcctcagtacccacaggtcacgccacctctcttcctgtcaccgacgcttcctcagtgtccacaggtcacgccacccctcttcctgtcaccgacgcttcctcagtgtccacaggtcatgccacccctcttccggtcaccgacacttcctcagtatctacaggacaggccacccctcttcctgtcaccagcctttcctcagcatccactggtgacaccacgccgcttcctgtcaccgatacttcctcagcatccacaggtcaggacacccctcttcctgtcaccagcctttcctcagtatccacaggtgacaccacgcctcttcctgtcactaacccttcctcagcatccacaggtcacgccacccctcttcttgtcaccgacgcttcctcaatatccacaggtcacgccacctctcttcttgtcaccgacgcttcctcagtatccacaggtcacgccaccgctcttcatgacaccgatgcttcctcattatccacaggggacaccacccctcttcctgtcaccagcccttcctcaacatccacaggtgacaccacccctcttcctgtcaccgaaacttcctcagtatccacaggtcacgccacctctcttcctgtcaccgacacttcctcagcatccacaggtcacgccacctctcttcctgtcaccgacacttcctcagcatccacaggtcacgccacccctcttcctgtcaccgacacttcctcagcatccacaggtcaggccacccctcttcctgtcaccagcccttcctcagcatccacaggtcacgccatccctcttcttgtcaccgacacttcctcagcatccacaggacaggccacccctcttcctgtcaccagcctttcctcagcatccacaggtgacaccacccctcttcctgtcaccgacgcttcctcagtgtccacaggtcacgccacctctcttcctgtcaccagcctttcctcagtatccacaggtgacaccactcctcttcctgtcactagcccttcctcagcatccacaggtcacgccacccctcttcatgtcaccgacgcttcctcagcatccacaggtcacgccacccctcttcctgtcaccagcctttcctcagcatccacaggtgacaccacgcctcttcctgtcactagcccttcctcagcatccacaggtcacgccacccctcttcatgtcaccgacgcttcctcagtatccacaggtgacaccacccctcttcctgtcaccagctcttcctcagcatcctcaggtcacaccacccctcttcctgtcaccgacgcttcctcagcatccacaggtgacaccacccctcttcctgtcaccgacacttcctcagcatccacaggtcacgccacccatcttcctgtcaccggcctttcctcagcttccacaggtgacaccacccgtcttcctgtcaccaacgtttcctcggcatccacaggtcatgccacccctcttcctgtcaccagcacttcctcagcatccacaggtgacaccacccctcttcctggcaccgacacttcctcagtatccacaggtcacaccacccctcttcttgtcaccgacgcttcgtcagtatccacaggtgacaccacccgtcttcctgtcaccagcccttcctcagcatctacaggtcacaccacccctctacctgtcaccgacactccctcagcatccacaggtgacaccacccctcttcctgtcaccaatgcttcctcattatccacacgtcacgccacctctcttcatgtcaccagcccttcctcagcatccacaggtcacgccacctctcttcctgtcaccgacacttccgcagcatccacaggtcacgccacccctcttcctgtcaccagcacttcctcagcatccacaggtgacaccacccctcttcctgtcaccgacacttactcagcatccacaggtcaggccacccctcttcctgtcaccagcctttcctcagtatccacaggtgacaccacgcctcttcctgtcactagcccttcctcagcatccacaggtcacgccactcctcttcttgtcaccgacgcttcctcagcatccacaggtcaggccacccctcttcctgtcaccagcctttcctcagtatccacaggtgacaccacgcctcttcctgtcactagcccttcctcagcatccaccggtcatgccacctctcttcctgtcaccgacacttcctcagcatccacaggtgacaccacctctcttcctgtcaccgacacttcctcagcatacacaggtgacaccacctctcttcctgtcaccgacacttcctcatcatccacaggtgacaccacccctcttcttgtcaccgagacttcctcagtatccacaggtgacaccacccctcttcctgtcaccgacacttcctcagcatccacaggtcacgccacccctcttcctgtcaccaacacttcctcagtatccacaggtcacgccacccctcttcatgtcaccagcccttcctcagcatccacaggtcacaccacccctcttcctgtcaccgacgcttcgtcagtgtccacaggtcacgccacctctcttcctgtcaccgacgcttcctcagtgttcacaggtcatgccacctctcttcctgtcaccatcccttcctcagcatcctcaggtcacaccacccctcttcctgtcaccgacgcttcctcagtgtccacaggtcacgccacctctcttcctgtcaccgacgcttcctcagtgtccacaggtcatgccacccctcttcctgtcaccgacgcttcctcagtgtccacaggtcacgctacccctcttcctctcaccagcctttcctcagtatccacaggtgacaccacgcctcttcctgtcaccgacacttcctcagcatccacaggtcaggccacccctcttcctgtcaccagcctttcctcagtatccacaggtgacaccacccctcttcctgtcaccgacacttcctcagcatccacaggtcacgccacctctcttcctgtcaccgacacttcctcagcatccacaggtcacgccacccctcttcctgacaccgacacttcctcagcatccacaggtcacgccacccttcttcctgtcaccgacacttcctcagcatccataggtcacgccacctctcttcctgtcaccgacacttcctcaatatccacaggtcacgccacccctcttcatgtcaccagcccttcctcagcatccaccggtcacgccaccccgcttcctgtcaccgacacttcctcagcatccacaggtcacgccaaccctcttcatgtcaccagcccttcctcagcatccaccggtcacgccaccccgcttcctgtcaccgacacttcctcagcatccacaggtcacgccacccctcttcctgtcaccagcctttcctcagtatccacaggtgacaccacgcctcttcctgtcactagcccttcctcagcatccacaggtcacaccacccctcttcctgtcaccgacacttcctcagcatccacaggtcaggccaccgctcttcctgtcaccagcacttcctcagcatccacaggtgacaccacccctcttcctgtcaccgacacttcctcagcatccacaggtcaggccacccctcttcctgtcaccagcctttcctcagtatccacaggtgacaccacgcctcttcctgtcactagcccttcctcagcatccacaggtcacgccactcctcttcttgtcaccgacgcttcctcagcatccacaggtcaggccacccctcttcctgtcaccagcctttcctcagtatccacaggtgacaccacgcctcttcctgtcactagcccttcctcagcatccaccggtcatgccacctctcttcctgtcaccgacacttcctcagcatccacaggtgacaccacctctcttcctgtcaccgacacttcctcagcatacacaggtgacaccacctctcttcctgtcaccgacacttcctcatcatccacaggtgacaccacccctcttcttgtcaccgagacttcctcagtatccacaggtcacgccactcctcttcttgtcaccgacgcttcctcagcatccacaggtcacgccacccctcttcatgtcaccagcccttcctcagcatccacaggtgacaccacccctgtgcctgtcaccgacacttcctcagtatccacaggtcacgccacccctcttcctgtcaccggcctttcctcagcttccacaggtgacaccacccgtcttcctgtcaccgacatttcctcggcatccacaggtcaggccacccctcttcctgtcaccaacacttcctcagtatccacaggtgacaccatgcctcttcctgtcactagcccttcctcagcatccacaggtcacgccacccctcttcctgtcaccagcacttcctcagcatccaccggtcacgccacccctgttcctgtcaccagcacttcctcagcatctacaggtcacaccacccctcttcctgtcaccgacacttcctcagcatccacaggtgacaccacccctcttcctgtcaccagcccttcctcagcatctacaggtcacaccacccctcttcatgtcaccatcccttcctcagcatccacaggtgacaccagcactcttcctgtcaccggcgcttcctcagcatccaccggtcacgccacccctcttcctgtcaccgacacttcctcagtatccaccggtcacgccacgcctcttcctgtcaccagcctttcctcagtatccacaggtgacaccacccctcttcctgtcaccgacgcttcctcggcatccacaggtcaggccacccctcttcctgtcaccagcctttcctcagtatccacaggtgacaccacccctcttcttgtcaccgacgcttcctcagtatccacaggtcacgccacccctcttcctgtcaccgacacttcctcagcatccacaggtgacaccacccgtcttcctgtcacggacacttcctcagcatccacaggtcaggccacccctcttcctgtcaccagcctttcctcagtatccacaggtgacaccacccctcttcttgtcaccgacgcttcctcagtatccacaggtcacgccacccctcttcctgtcaccgacacttcctcagcatccacaggtgacaccacccgtcttcctgtcacggacacttcctcagcatccacaggtcaggccacccctcttcctgtcaccatcccttcctcatcatcctcaggtcacaccacccctcttcctgtcaccagcacttcctcagtatctacaggtcacgtcacccctcttcatgtcaccagcccttcctcagcatccacaggtcacgtcacccctcttcctgtcaccagcacttcctcagcatccacaggtcacgccacccctcttcttgtcaccgacgcttcctcagtgtccacaggtcacgccacgcctcttcctgtcaccgacgcttcctcagcatccacaggtgacaccacccctcttcctgtcaccgacacttcctcagcatccacaggtcaggccacccctcttcctgtcaccagcctttcctcagtatccacaggtgacaccacccctcttcctgtcaccgacgcttcctcagcatccacaggtcacgccacccctcttcctgtcaccatcccttcctcagtatccacaggtgacaccatgcctcttcctgtcactagcccttcctcagcatccacaggtcacgccacccctcttcctgttaccggcctttcctcagcttccacaggtgacaccacccctcttcctgtcaccgacacttcctcagcatccacacgtcacgccacccctcttcctgtcaccgacacttcctcagcttccacagatgacaccacccgtcttcctgtcaccgacgtttcctcggcatccacaggacatgccacccctcttcctgtcaccagcacttcctcagcatccacaggtgacaccacccctcttcctgtcaccgacacttcctcagtatccacaggtcacgccacctctcttcctgtcaccagccgttcctcagcatccacaggtcacgccaccccccttcctgtcaccgacacttcctcagtatccacaggtcacgccacccctcttcctgtcaccagcacttcctcagtatctacaggtcacgccacccctcttcctgtcaccagcccttcctcagcatccacaggtcacgccacccctgttcctgtcaccagcacttcctcagcatccacaggtgacaccacccctcttcctgtcaccaatgcttcctcattatccacaggtcacgccacccctcttcatgtcaccagcccttcctcagcatccagaggtgacaccagcactcttcctgtcaccgatgcttcctcagcatccaccggtcacgccacccctcttcctctcaccagcctttcctcagtatccacaggtgacaccacgcctcttcctgtcaccgacacttcctctgcatccacaggtcaggccacccctcttcctgtcaccagcctttcctcagtatccacaggtgacaccacgcctcttcctgtcaccatcccttcctcagcatcctcaggtcacaccacctctcttcctgtcaccgacgcttcctcagtgtccacaggtcacggcacccctcttcctgtcaccagcacttcctcagcatccacaggtgacaccacccctcttcctgtcaccgacacttcctcagcatccacaggtcacgccacccctcttcctgtcaccgacacttcctcagcatccacaggtcacgccacccctcttcctgtcaccagcctttcctcagtatccacaggtcacgccacccctcttgctgtcagcagtgctacctcagcttccacagtatcctcggactcccctctgaagatggaaacaccaggaatgacaacaccgtcactgaagacagacggtgggagacgcacagccacatcaccaccccccacaacctcccagaccatcatttccaccattcccagcactgccatgcacacccgctccacagctgcccccatccccatcctgcctgagagaggagtttccctcttcccctatggggcaggcgccggggacctggagttcgtcaggaggaccgtggacttcacctccccactcttcaagccggcgactggcttcccccttggctcctctctccgtgattccctctacttcacagacaatggccagatcatcttcccagagtcagactaccagattttctcctaccccaacccactcccaacaggcttcacaggccgggaccctgtggccctggtggctccgttctgggacgatgctgacttctccactggtcgggggaccacattttatcagagcaacacctaccaagccatcctctccacggacgggagcaggtcctatgccctgtttctctaccagagcggtgggatgcagtgggacgtggcccagcgctcagtggagatggctatttcgaaaacagcccactgatgtcccagccagtgtgggagaggtatcgccctgatagattcctgaattccaactcaggcctccaagggctgcagttctacaggctacaccgggaagaaaggcccaactaccgtctcgagtgcctgcagtggctgaagagccagcctcggtggcccagctggggctggaaccaggtctcctgcccttgttcctggcagcagggacgacgggacttacgattccaacccgtcagcataggtcgctggggcctcggcagtaggcagctgtgcagcttcacctcttggcgaggaggcgtgtgctgcagctacgggccctggggagagtttcgtgaaggctggcacgtgcagcgtccttggcagttggcccaggaactggagccacagagctggtgctgccgctggaatgacaagccctacctctgtgccctgtaccagcagaggcggccccacgtgggctgtgctacatacaggcccccacagcccgcctggatgttcggggacccccacatcaccaccttggatggtgtcagttacaccttcaatgggctgggggacttcctgctggtcggggcccaagacgggaactcctccttcctgcttcagggccgcaccgcccagactggctcagcccaggccaccaacttcatcgcctttgcggctcagtaccgctccagcagcctgggccccgtcacggtccaatggctccttgagcctcacgacgcaatccgtgtcctgctggataaccagactgtgacatttcagcctgaccatgaagacggcggaggccaggagacgttcaacgccaccggagtcctcctgagccgcaacggctctgaggtctcggccagcttcgacggctgggccaccgtctcggtgatcgcgctctccaacatcctccacgcctccgccagcctcccgcccgagtaccagaaccgcacggaggggctcctgggggtctggaataacaatccagaggacgacttcaggatgcccaatggctccaccattcccccagggagccctgaggagatgcttttccactttggaatgacctggcagatcaacgggacaggcctccttggcaagaggaatgaccagctgccttccaacttcacccctgttttctactcacaactgcaaaaaaacagctcctgggctgaacatttgatctccaactgtgacggagatagctcatgcatctatgacaccctggccctgcgcaacgcaagcatcggacttcacacgagggaagtcagtaaaaactacgagcaggcgaacgccaccctcaatcagtacccgccctccatcaatggtggtcgtgtgattgaagcctacaaggggcagaccacgctgattcagtacaccagcaatgctgaggatgccaacttcacgctcagagacagctgcaccgacttggagctctttgagaatgggacgttgctgtggacacccaagtcgctggagccattcactctggagattctagcaagaagtgccaagattggcttggcatctgcactccagcccaggactgtggtctgccattgcaatgcagagagccagtgtttgtacaatcagaccagcagggtgggcaactcctccctggaggtggctggctgcaagtgtgacgggggcaccttcggccgctactgcgagggctccgaggatgcctgtgaggagccgtgcttcccgagtgtccactgcgttcctgggaagggctgcgaggcctgccctccaaacctgactggggatgggcggcactgtgcggctctggggagctctttcctgtgtcagaaccagtcctgccctgtgaattactgctacaatcaaggccactgctacatctcccagactctgggctgtcagcccatgtgcacctgccccccagccttcactgacagccgctgcttcctggctgggaacaacttcagtccaactgtcaacctagaacttcccttaagagtcatccagctcttgctcagtgaagaggaaaatgcctccatggcagaagtcaacgcctcggtggcatacagactggggaccctggacatgcgggcctttctccgcaacagccaagtggaacgaatcgattctgcagcaccggcctcgggaagccccatccaacactggatggtcatctcggagttccagtaccgccctcggggcccggtcattgacttcctgaacaaccagctgctggccgcggtggtggaggcgttcttataccacgttccacggaggagtgaggagcccaggaacgacgtggtcttccagcccatctccggggaagacgtgcgcgatgtgacagccctgaacgtgagcacgctgaaggcttacttcagatgcgatggctacaagggctacgacctggtctacagcccccagagcggcttcacctgcgtgtccccgtgcagtaggggctactgtgaccatggaggccagtgccagcacctgcccagtgggccccgctgcagctgtgtgtccttctccatctacacggcctggggcgagcactgtgagcacctgagcatgaaactcgacgcgttcttcggcatcttctttggggccctgggcggcctcttgctgctgggggtcgggacgttcgtggtcctgcgcttctggggttgctccggggccaggttctcctatttcctgaactcagctgaggccttgccttgaaggggcagctgtggcctaggctacctcaagactcacctcatccttaccgcacatttaaggcgccattgcttttgggagactggaaaagggaaggtgactgaaggctgtcaggattctt

SEQ ID NO: 155653 - DNA, 16443 bp, Homo sapiens
  Payload ID: 10597
  Gene Symbol: MUC4
  Gene Name: mucin 4, cell surface associated
  ENST ID: ENST00000466475
  CDS Start-End: 73-13365
gtctgctcctcacactgcagctgctgggccgtggagcttccccagggagccagggggacttttgccgcagccatgaagggggcacgctggaggagggtcccctgggtgtccctgagctgcctgtgtctctgcctccttccgcatgtggtcccaggaaccacagaggacacattaataactggaagtaaaactgctgccccagtcacctcaacaggctcaacaacagcgacactagagggacaatcaactgcagcttcttcaaggacctctaatcaggacatatcagcttcatctcagaaccaccagactaagagcacggagaccaccagcaaagctcaaaccgacaccctcacgcagatgatgacatcaactcttttttcttccccaagtgtacacaatgtgatggagacagctcctccagatgaaatgaccacatcatttccctccagtgtcaccaacacactcatgatgacatcaaagactataacaatgacaacctccacagactccactcttggaaacacagaagagacatcaacagcaggaactgaaagttctaccccagtgacctcagcagtctcaataacagctggacaggaaggacaatcacgaacaacttcctggaggacctctatccaagacacatcagcttcttctcagaaccactggactcggagcacgcagaccaccagggaatctcaaaccagcaccctaacacacagaaccacttcaactccttctttctctccaagtgtacacaatgtgacagggactgtttctcagaagacatctccttcaggtgaaacagctacctcatccctctgtagtgtcacaaacacatccatgatgacatcagagaagataacagtgacaacctccacaggctccactcttggaaacccaggggagacatcatcagtacctgttactggaagtcttatgccagtcacctcagcagccttagtaacatttgatccagaaggacaatcaccagcaactttctcaaggacttctactcaggacacaacagctttttctaagaaccaccagactcagagcgtggagaccaccagagtatctcaaatcaacaccctcaacaccctcacaccggttacaacatcaactgttttatcctcaccaagtggattcaacccaagtggaacagtttctcaggagacattcccttctggtgaaacaaccacctcatccccttccagtgtcagcaatacattcctggtaacatcaaaggtgttcagaatgccaacctccagagactctactcttggaaacacagaggagacatcactatctgtaagtggaaccatttctgcaatcacttccaaagtttcaaccatatggtggtcagacactctgtcaacagcactctcccccagttctctacctccaaaaatatccacagctttccacacccagcagagtgaaggtgcagagaccacaggacggcctcatgagaggagctcattctctccaggtgtgtctcaagaaatatttactctacatgaaacaacaacatggccttcctcattctccagcaaaggccacacaacttggtcacaaacagaactgccctcaacatcaacaggtgctgccactaggcttgtcacaggaaatccatctacagggacagctggcactattccaagggtcccctctaaggtctcagcaataggggaaccaggagagcccaccacatactcctcccacagcacaactctcccaaaaacaacaggggcaggcgcccagacacaatggacacaagaaacggggaccactggagaggctcttctcagcagcccaagctacagtgtgactcagatgataaaaacggccacatccccatcttcttcacctatgctggatagacacacatcccaacaaattacaacggcaccatcaacaaatcattcaacaatacattccacaagcacctctcctcaggaatcaccagctgtttcccaaaggggtcacactcaagccccgcagaccacacaagaatcacaaaccacgaggtccgtctcccccatgactgacaccaagacagtcaccaccccaggttcttccttcacagccagtgggcactcgccctcagaaattgttcctcaggacgcacccaccataagtgcagcaacaacctttgccccagctcccaccggggatggtcacacaacccaggccccgaccacagcactgcaggcagcacccagcagccatgatgccaccctggggccctcaggaggcacgtcactttccaaaacaggtgcccttactctggccaactctgtagtgtcaacaccagggggcccagaaggacaatggacatcagcctctgccagcacctcacctgacacagcagcagccatgacccatacccaccaggctgagagcacagaggcctctggacaaacacagaccagcgaaccggcctcctcagggtcacgaaccacctcagcgggcacagctaccccttcctcatccggggcgagtggcacaacaccttcaggaagcgaaggaatatccacctcaggagagacgacaaggttttcatcaaacccctccagggacagtcacacaacccagtcaacaaccgaattgctgtccgcctcagccagtcatggtgccatcccagtaagcacaggaatggcgtcttcgatcgtccccggcacctttcatcccaccctctctgaggcctccactgcagggagaccgacaggacagtcaagcccaacttctcccagtgcctctcctcaggagacagccgccatttcccggatggcccagactcagaggacaagaaccagcagagggtctgacactatcagcctggcgtcccaggcaaccgacaccttctcaacagtcccacccacacctccatcgatcacatccactgggcttacatctccacaaaccgagacccacactctgtcaccttcagggtctggtaaaaccttcaccacggccctcatcagcaacgccacccctcttcctgtcacctacgcttcctcggcatccacaggtcacaccacccctcttcatgtcaccgatgcttcctcagtatccacaggtcacgccacccctcttcctgtcaccagcccttcctcagtatccacaggtcacaccacccctcttcctgtcaccgacacttcctcagaatccacaggtcacgtcacccctcttcctgtcaccagcttttcctcagcatccacaggtgacagcacccctcttcctgtcactgacacttcctcagcatccacaggtcacgtcacccctcttcctgtcaccagcctttcctcagcatccacaggtgacaccacccctcttcctgtcactgacacttcctcagcatccacaggtcacgccacctctcttcctgtcaccgacacttcctcagtatccacaggtcacaccacccctcttcctgtcaccgacacttcctcagcatccacaggtcacgccacctctcttcctgtcaccgacacttcctcagtatccacaggtcacaccacccctcttcatgtcactgatgcttcctcagcatccacaggtcaggccacccctcttcctgtcaccagcctttcctcagtatccacaggtgacaccacgcctcttcctgtcactagcccttcctcagcatccacaggtcacgccacccctcttcttgtcaccgacacttcctcagcatccacaggacacgccacccctcttcctgtcaccgacgcttcctcagtgtccacagatcacgccacctctcttcctgtaaccatcccttccgcagcatccacaggtcacaccacccctcttcctgtcaccgacacttcctcagcatccacaggtcaggccacctctcttcttgtcaccgacacttcctcagtatccacaggtgacaccacgcctcttcctgtcactagcacttcctcagcatccacaggtcacgtcactcctcttcatgtcaccagcccttcctcagcatccacaggtcacgccacccctcttcctgtcaccagcctttcctcagcatccacaggtgacaccatgcctcttcctgtcactagcccttcctcagcatccacaggtgacaccacccctcttcctgtcaccgacgcttcctcagtatccacaggtcacaccacccctcttcatgtcactgatgcttcctcagcatccacaggtcaggccacccctcttcctgtcaccagcctttcctcagtatccacaggtgacaccacgcctcttcctgtcactagcccttcctcagcatccacaggtcacgccacccctcttcttgtcaccgacacttcctcagcatccacaggacacgccacccctcttcctgtcaccgacgcttcctcagtgtccacagatcacgccacctctcttcctgtaaccatcccttccgcagcatccacaggtcacaccacccctcttcctgtcaccgacacttcctcagcatccacaggtcaggccacctctcttcttgtcaccgacacttcctcagtatccacaggtgacaccacgcctcttcctgtcactagcacttcctcagcatccacaggtcacgtcactcctcttcatgtcaccagcccttcctcagcatccacaggtcacgccacccctcttcctgtcaccagcctttcctcagcatccacaggtgacaccatgcctcttcctgtcactagcccttcctcagcatccacaggtgacaccacccctcttcctgtcaccgacgcttcctcagtatccacaggtcacaccacccctcttcctgtcaccagcccttcctcagcatctacaggtcacaccacccctcttcctgtcaccgacacttcctcagcatccaaaggtgacaccacccctcttcctgtcaccagcccttcctcagcatctacaggtcacaccacccctcttcctgtcaccgacacttcctcagcatccacaggtgacaccacccctcttcctgtcaccaatgcttcctcattatccacaggtcacgccacccctcttcatgtcaccagcccttcctcagcatccacaggtcacgccacccctcttcctgtcaccagcacttcctcagcatccaccggtcacgccacccctcttcctgtcaccggcctttcctcagctaccacagatgacaccacccgtcttcctgtcaccgacgtttcctcggcatccacaggtcaggccacccctcttcctgtcaccagcctttcctcagtatccacaggtgacaccacgcctcttcctgtcactagcccttcctcagcatccacaggtcacgccagccctcttcttgtcactgacgcttcctcagcatccacaggtcaggccacccctcttcctgtcaccgacacttcctcagtatccacagctcacgccaccccacttcctgtcaccggcctttcttcagcttccacagatgacaccacccgtcttcctgtcaccgacgtttcctcggcatccacaggtcaggccatccctcttcctgtcaccagcccttcctcagcatccacaggtgacaccacccctcttcctgtcaccgacgcttcctcagcatccacaggtgacaccacctctcttcctgtcaccatcccttcctcagcatcttcaggtcacaccacctctcttcctgtcaccgacgcttcctcagtgtccacaggtcacgccacctctcttcttgtcaccgacgcttcctcagtatccacaggtgacaccacccctcttcctgtcaccgacactaactcagcatccacaggtgacaccacccctcttcatgtcaccgacgcttcctcagtatccacaggtcacgccacctctcttcctgtcaccagcctttcctcagcatccacaggtgacaccacgcctcttcctgtcactagcccttcctcagcatcctcaggtcacaccacccctcttcctgtcaccgacgcttcctcagtacccacaggtcacgccacctctcttcctgtcaccgacgcttcctcagtgtccacaggtcacgccacccctcttcctgtcaccgacgcttcctcagtgtccacaggtcatgccacccctcttccggtcaccgacacttcctcagtatctacaggacaggccacccctcttcctgtcaccagcctttcctcagcatccactggtgacaccacgccgcttcctgtcaccgatacttcctcagcatccacaggtcaggacacccctcttcctgtcaccagcctttcctcagtatccacaggtgacaccacgcctcttcctgtcactaacccttcctcagcatccacaggtcacgccacccctcttcttgtcaccgacgcttcctcaatatccacaggtcacgccacctctcttcttgtcaccgacgcttcctcagtatccacaggtcacgccaccgctcttcatgacaccgatgcttcctcattatccacaggggacaccacccctcttcctgtcaccagcccttcctcaacatccacaggtgacaccacccctcttcctgtcaccgaaacttcctcagtatccacaggtcacgccacctctcttcctgtcaccgacacttcctcagcatccacaggtcacgccacctctcttcctgtcaccgacacttcctcagcatccacaggtcacgccacccctcttcctgtcaccgacacttcctcagcatccacaggtcaggccacccctcttcctgtcaccagcccttcctcagcatccacaggtcacgccatccctcttcttgtcaccgacacttcctcagcatccacaggacaggccacccctcttcctgtcaccagcctttcctcagcatccacaggtgacaccacccctcttcctgtcaccgacgcttcctcagtgtccacaggtcacgccacctctcttcctgtcaccagcctttcctcagtatccacaggtgacaccactcctcttcctgtcactagcccttcctcagcatccacaggtcacgccacccctcttcatgtcaccgacgcttcctcagcatccacaggtcacgccacccctcttcctgtcaccagcctttcctcagcatccacaggtgacaccacgcctcttcctgtcactagcccttcctcagcatccacaggtcacgccacccctcttcatgtcaccgacgcttcctcagtatccacaggtgacaccacccctcttcctgtcaccagctcttcctcagcatcctcaggtcacaccacccctcttcctgtcaccgacgcttcctcagcatccacaggtgacaccacccctcttcctgtcaccgacacttcctcagcatccacaggtcacgccacccatcttcctgtcaccggcctttcctcagcttccacaggtgacaccacccgtcttcctgtcaccaacgtttcctcggcatccacaggtcatgccacccctcttcctgtcaccagcacttcctcagcatccacaggtgacaccacccctcttcctggcaccgacacttcctcagtatccacaggtcacaccacccctcttcttgtcaccgacgcttcgtcagtatccacaggtgacaccacccgtcttcctgtcaccagcccttcctcagcatctacaggtcacaccacccctctacctgtcaccgacactccctcagcatccacaggtgacaccacccctcttcctgtcaccaatgcttcctcattatccacacgtcacgccacctctcttcatgtcaccagcccttcctcagcatccacaggtcacgccacctctcttcctgtcaccgacacttccgcagcatccacaggtcacgccacccctcttcctgtcaccagcacttcctcagcatccacaggtgacaccacccctcttcctgtcaccgacacttactcagcatccacaggtcaggccacccctcttcctgtcaccagcctttcctcagtatccacaggtgacaccacgcctcttcctgtcactagcccttcctcagcatccacaggtcacgccactcctcttcttgtcaccgacgcttcctcagcatccacaggtcaggccacccctcttcctgtcaccagcctttcctcagtatccacaggtgacaccacgcctcttcctgtcactagcccttcctcagcatccaccggtcatgccacctctcttcctgtcaccgacacttcctcagcatccacaggtgacaccacctctcttcctgtcaccgacacttcctcagcatacacaggtgacaccacctctcttcctgtcaccgacacttcctcatcatccacaggtgacaccacccctcttcttgtcaccgagacttcctcagtatccacaggtgacaccacccctcttcctgtcaccgacacttcctcagcatccacaggtcacgccacccctcttcctgtcaccaacacttcctcagtatccacaggtcacgccacccctcttcatgtcaccagcccttcctcagcatccacaggtcacaccacccctcttcctgtcaccgacgcttcgtcagtgtccacaggtcacgccacctctcttcctgtcaccgacgcttcctcagtgttcacaggtcatgccacctctcttcctgtcaccatcccttcctcagcatcctcaggtcacaccacccctcttcctgtcaccgacgcttcctcagtgtccacaggtcacgccacctctcttcctgtcaccgacgcttcctcagtgtccacaggtcatgccacccctcttcctgtcaccgacgcttcctcagtgtccacaggtcacgctacccctcttcctctcaccagcctttcctcagtatccacaggtgacaccacgcctcttcctgtcaccgacacttcctcagcatccacaggtcaggccacccctcttcctgtcaccagcctttcctcagtatccacaggtgacaccacccctcttcctgtcaccgacacttcctcagcatccacaggtcacgccacctctcttcctgtcaccgacacttcctcagcatccacaggtcacgccacccctcttcctgacaccgacacttcctcagcatccacaggtcacgccacccttcttcctgtcaccgacacttcctcagcatccataggtcacgccacctctcttcctgtcaccgacacttcctcaatatccacaggtcacgccacccctcttcatgtcaccagcccttcctcagcatccaccggtcacgccaccccgcttcctgtcaccgacacttcctcagcatccacaggtcacgccaaccctcttcatgtcaccagcccttcctcagcatccaccggtcacgccaccccgcttcctgtcaccgacacttcctcagcatccacaggtcacgccacccctcttcctgtcaccagcctttcctcagtatccacaggtgacaccacgcctcttcctgtcactagcccttcctcagcatccacaggtcacaccacccctcttcctgtcaccgacacttcctcagcatccacaggtcaggccaccgctcttcctgtcaccagcacttcctcagcatccacaggtgacaccacccctcttcctgtcaccgacacttcctcagcatccacaggtcaggccacccctcttcctgtcaccagcctttcctcagtatccacaggtgacaccacgcctcttcctgtcactagcccttcctcagcatccacaggtcacgccactcctcttcttgtcaccgacgcttcctcagcatccacaggtcaggccacccctcttcctgtcaccagcctttcctcagtatccacaggtgacaccacgcctcttcctgtcactagcccttcctcagcatccaccggtcatgccacctctcttcctgtcaccgacacttcctcagcatccacaggtgacaccacctctcttcctgtcaccgacacttcctcagcatacacaggtgacaccacctctcttcctgtcaccgacacttcctcatcatccacaggtgacaccacccctcttcttgtcaccgagacttcctcagtatccacaggtcacgccactcctcttcttgtcaccgacgcttcctcagcatccacaggtcacgccacccctcttcatgtcaccagcccttcctcagcatccacaggtgacaccacccctgtgcctgtcaccgacacttcctcagtatccacaggtcacgccacccctcttcctgtcaccggcctttcctcagcttccacaggtgacaccacccgtcttcctgtcaccgacatttcctcggcatccacaggtcaggccacccctcttcctgtcaccaacacttcctcagtatccacaggtgacaccatgcctcttcctgtcactagcccttcctcagcatccacaggtcacgccacccctcttcctgtcaccagcacttcctcagcatccaccggtcacgccacccctgttcctgtcaccagcacttcctcagcatctacaggtcacaccacccctcttcctgtcaccgacacttcctcagcatccacaggtgacaccacccctcttcctgtcaccagcccttcctcagcatctacaggtcacaccacccctcttcatgtcaccatcccttcctcagcatccacaggtgacaccagcactcttcctgtcaccggcgcttcctcagcatccaccggtcacgccacccctcttcctgtcaccgacacttcctcagtatccaccggtcacgccacgcctcttcctgtcaccagcctttcctcagtatccacaggtgacaccacccctcttcctgtcaccgacgcttcctcggcatccacaggtcaggccacccctcttcctgtcaccagcctttcctcagtatccacaggtgacaccacccctcttcttgtcaccgacgcttcctcagtatccacaggtcacgccacccctcttcctgtcaccgacacttcctcagcatccacaggtgacaccacccgtcttcctgtcacggacacttcctcagcatccacaggtcaggccacccctcttcctgtcaccagcctttcctcagtatccacaggtgacaccacccctcttcttgtcaccgacgcttcctcagtatccacaggtcacgccacccctcttcctgtcaccgacacttcctcagcatccacaggtgacaccacccgtcttcctgtcacggacacttcctcagcatccacaggtcaggccacccctcttcctgtcaccatcccttcctcatcatcctcaggtcacaccacccctcttcctgtcaccagcacttcctcagtatctacaggtcacgtcacccctcttcatgtcaccagcccttcctcagcatccacaggtcacgtcacccctcttcctgtcaccagcacttcctcagcatccacaggtcacgccacccctcttcttgtcaccgacgcttcctcagtgtccacaggtcacgccacgcctcttcctgtcaccgacgcttcctcagcatccacaggtgacaccacccctcttcctgtcaccgacacttcctcagcatccacaggtcaggccacccctcttcctgtcaccagcctttcctcagtatccacaggtgacaccacccctcttcctgtcaccgacgcttcctcagcatccacaggtcacgccacccctcttcctgtcaccatcccttcctcagtatccacaggtgacaccatgcctcttcctgtcactagcccttcctcagcatccacaggtcacgccacccctcttcctgttaccggcctttcctcagcttccacaggtgacaccacccctcttcctgtcaccgacacttcctcagcatccacacgtcacgccacccctcttcctgtcaccgacacttcctcagcttccacagatgacaccacccgtcttcctgtcaccgacgtttcctcggcatccacaggacatgccacccctcttcctgtcaccagcacttcctcagcatccacaggtgacaccacccctcttcctgtcaccgacacttcctcagtatccacaggtcacgccacctctcttcctgtcaccagccgttcctcagcatccacaggtcacgccaccccccttcctgtcaccgacacttcctcagtatccacaggtcacgccacccctcttcctgtcaccagcacttcctcagtatctacaggtcacgccacccctcttcctgtcaccagcccttcctcagcatccacaggtcacgccacccctgttcctgtcaccagcacttcctcagcatccacaggtgacaccacccctcttcctgtcaccaatgcttcctcattatccacaggtcacgccacccctcttcatgtcaccagcccttcctcagcatccagaggtgacaccagcactcttcctgtcaccgatgcttcctcagcatccaccggtcacgccacccctcttcctctcaccagcctttcctcagtatccacaggtgacaccacgcctcttcctgtcaccgacacttcctctgcatccacaggtcaggccacccctcttcctgtcaccagcctttcctcagtatccacaggtgacaccacgcctcttcctgtcaccatcccttcctcagcatcctcaggtcacaccacctctcttcctgtcaccgacgcttcctcagtgtccacaggtcacggcacccctcttcctgtcaccagcacttcctcagcatccacaggtgacaccacccctcttcctgtcaccgacacttcctcagcatccacaggtcacgccacccctcttcctgtcaccgacacttcctcagcatccacaggtcacgccacccctcttcctgtcaccagcctttcctcagtatccacaggtcacgccacccctcttgctgtcagcagtgctacctcagcttccacagtatcctcggactcccctctgaagatggaaacaccaggaatgacaacaccgtcactgaagacagacggtgggagacgcacagccacatcaccaccccccacaacctcccagaccatcatttccaccattcccagcactgccatgcacacccgctccacagctgcccccatccccatcctgcctgagagaggtgaggccatacaggagtttccctcttcccctatggggcaggcgccggggacctggagttcgtcaggaggaccgtggacttcacctccccactcttcaagccggcgactggcttcccccttggctcctctctccgtgattccctctacttcacagacaatggccagatcatcttcccagagtcagactaccagattttctcctaccccaacccactcccaacaggcttcacaggccgggaccctgtggccctggtggctccgttctgggacgatgctgacttctccactggtcgggggaccacattttatcaggaatacgagacgttctatggtgaacacagcctgctagtccagcaggccgagtcttggattagaaagatgacaaacaacgggggctacaaggccaggtgggccctaaaggtcacgtgggtcaatgcccacgcctatcctgcccagtggaccctcgggagcaacacctaccaagccatcctctccacggacgggagcaggtcctatgccctgtttctctaccagagcggtgggatgcagtgggacgtggcccagcgctcaggcaacccggtgctcatgggcttctctagtggagatggctatttcgaaaacagcccactgatgtcccagccagtgtgggagaggtatcgccctgatagattcctgaattccaactcaggcctccaagggctgcagttctacaggctacaccgggaagaaaggcccaactaccgtctcgagtgcctgcagtggctgaagagccagcctcggtggcccagctggggctggaaccaggtctcctgcccttgttcctggcagcagggacgacgggacttacgattccaacccgtcagcataggtcgctggggcctcggcagtaggcagctgtgcagcttcacctcttggcgaggaggcgtgtgctgcagctacgggccctggggagagtttcgtgaaggctggcacgtgcagcgtccttggcagttggcccaggaactggagccacagagctggtgctgccgctggaatgacaagccctacctctgtgccctgtaccagcagaggcggccccacgtgggctgtgctacatacaggcccccacagcccgcctggatgttcggggacccccacatcaccaccttggatggtgtcagttacaccttcaatgggctgggggacttcctgctggtcggggcccaagacgggaactcctccttcctgcttcagggccgcaccgcccagactggctcagcccaggccaccaacttcatcgcctttgcggctcagtaccgctccagcagcctgggccccgtcacggtccaatggctccttgagcctcacgacgcaatccgtgtcctgctggataaccagactgtgacatttcagcctgaccatgaagacggcggaggccaggagacgttcaacgccaccggagtcctcctgagccgcaacggctctgaggtctcggccagcttcgacggctgggccaccgtctcggtgatcgcgctctccaacatcctccacgcctccgccagcctcccgcccgagtaccagaaccgcacggaggggctcctgggggtctggaataacaatccagaggacgacttcaggatgcccaatggctccaccattcccccagggagccctgaggagatgcttttccactttggaatgacctggcagatcaacgggacaggcctccttggcaagaggaatgaccagctgccttccaacttcacccctgttttctactcacaactgcaaaaaaacagctcctgggctgaacatttgatctccaactgtgacggagatagctcatgcatctatgacaccctggccctgcgcaacgcaagcatcggacttcacacgagggaagtcagtaaaaactacgagcaggcgaacgccaccctcaatcagtacccgccctccatcaatggtggtcgtgtgattgaagcctacaaggggcagaccacgctgattcagtacaccagcaatgctgaggatgccaacttcacgctcagagacagctgcaccgacttggagctctttgagaatgggacgttgctgtggacacccaagtcgctggagccattcactctggagattctagcaagaagtgccaagattggcttggcatctgcactccagcccaggactgtggtctgccattgcaatgcagagagccagtgtttgtacaatcagaccagcagggtgggcaactcctccctggaggtggctggctgcaagtgtgacgggggcaccttcggccgctactgcgagggctccgaggatgcctgtgaggagccgtgcttcccgagtgtccactgcgttcctgggaagggctgcgaggcctgccctccaaacctgactggggatgggcggcactgtgcggctctggggagctctttcctgtgtcagaaccagtcctgccctgtgaattactgctacaatcaaggccactgctacatctcccagactctgggctgtcagcccatgtgcacctgccccccagccttcactgacagccgctgcttcctggctgggaacaacttcagtccaactgtcaacctagaacttcccttaagagtcatccagctcttgctcagtgaagaggaaaatgcctccatggcagaagtcaacgcctcggtggcatacagactggggaccctggacatgcgggcctttctccgcaacagccaagtggaacgaatcgattctgcagcaccggcctcgggaagccccatccaacactggatggtcatctcggagttccagtaccgccctcggggcccggtcattgacttcctgaacaaccagctgctggccgcggtggtggaggcgttcttataccacgttccacggaggagtgaggagcccaggaacgacgtggtcttccagcccatctccggggaagacgtgcgcgatgtgacagccctgaacgtgagcacgctgaaggcttacttcagatgcgatggctacaagggctacgacctggtctacagcccccagagcggcttcacctgcgtgtccccgtgcagtaggggctactgtgaccatggaggccagtgccagcacctgcccagtgggccccgctgcagctgtgtgtccttctccatctacacggcctggggcgagcactgtgagcacctgagcatgaaactcgacgcgttcttcggcatcttctttggggccctgggcggcctcttgctgctgggggtcgggacgttcgtggtcctgcgcttctggggttgctccggggccaggttctcctatttcctgaactcagctgaggccttgccttgaaggggcagctgtggcctaggctacctcaagactcacctcatccttaccgcacatttaaggcgccattgcttttgggagactggaaaagggaaggtgactgaaggctgtcaggattctt

SEQ ID NO: 155654 - DNA, 16075 bp, Homo sapiens
  Payload ID: 10597
  Gene Symbol: MUC4
  Gene Name: mucin 4, cell surface associated
  ENST ID: ENST00000479406
  CDS Start-End: 73-13365
gtctgctcctcacactgcagctgctgggccgtggagcttccccagggagccagggggacttttgccgcagccatgaagggggcacgctggaggagggtcccctgggtgtccctgagctgcctgtgtctctgcctccttccgcatgtggtcccaggaaccacagaggacacattaataactggaagtaaaactgctgccccagtcacctcaacaggctcaacaacagcgacactagagggacaatcaactgcagcttcttcaaggacctctaatcaggacatatcagcttcatctcagaaccaccagactaagagcacggagaccaccagcaaagctcaaaccgacaccctcacgcagatgatgacatcaactcttttttcttccccaagtgtacacaatgtgatggagacagctcctccagatgaaatgaccacatcatttccctccagtgtcaccaacacactcatgatgacatcaaagactataacaatgacaacctccacagactccactcttggaaacacagaagagacatcaacagcaggaactgaaagttctaccccagtgacctcagcagtctcaataacagctggacaggaaggacaatcacgaacaacttcctggaggacctctatccaagacacatcagcttcttctcagaaccactggactcggagcacgcagaccaccagggaatctcaaaccagcaccctaacacacagaaccacttcaactccttctttctctccaagtgtacacaatgtgacagggactgtttctcagaagacatctccttcaggtgaaacagctacctcatccctctgtagtgtcacaaacacatccatgatgacatcagagaagataacagtgacaacctccacaggctccactcttggaaacccaggggagacatcatcagtacctgttactggaagtcttatgccagtcacctcagcagccttagtaacatttgatccagaaggacaatcaccagcaactttctcaaggacttctactcaggacacaacagctttttctaagaaccaccagactcagagcgtggagaccaccagagtatctcaaatcaacaccctcaacaccctcacaccggttacaacatcaactgttttatcctcaccaagtggattcaacccaagtggaacagtttctcaggagacattcccttctggtgaaacaaccacctcatccccttccagtgtcagcaatacattcctggtaacatcaaaggtgttcagaatgccaacctccagagactctactcttggaaacacagaggagacatcactatctgtaagtggaaccatttctgcaatcacttccaaagtttcaaccatatggtggtcagacactctgtcaacagcactctcccccagttctctacctccaaaaatatccacagctttccacacccagcagagtgaaggtgcagagaccacaggacggcctcatgagaggagctcattctctccaggtgtgtctcaagaaatatttactctacatgaaacaacaacatggccttcctcattctccagcaaaggccacacaacttggtcacaaacagaactgccctcaacatcaacaggtgctgccactaggcttgtcacaggaaatccatctacagggacagctggcactattccaagggtcccctctaaggtctcagcaataggggaaccaggagagcccaccacatactcctcccacagcacaactctcccaaaaacaacaggggcaggcgcccagacacaatggacacaagaaacggggaccactggagaggctcttctcagcagcccaagctacagtgtgactcagatgataaaaacggccacatccccatcttcttcacctatgctggatagacacacatcccaacaaattacaacggcaccatcaacaaatcattcaacaatacattccacaagcacctctcctcaggaatcaccagctgtttcccaaaggggtcacactcaagccccgcagaccacacaagaatcacaaaccacgaggtccgtctcccccatgactgacaccaagacagtcaccaccccaggttcttccttcacagccagtgggcactcgccctcagaaattgttcctcaggacgcacccaccataagtgcagcaacaacctttgccccagctcccaccggggatggtcacacaacccaggccccgaccacagcactgcaggcagcacccagcagccatgatgccaccctggggccctcaggaggcacgtcactttccaaaacaggtgcccttactctggccaactctgtagtgtcaacaccagggggcccagaaggacaatggacatcagcctctgccagcacctcacctgacacagcagcagccatgacccatacccaccaggctgagagcacagaggcctctggacaaacacagaccagcgaaccggcctcctcagggtcacgaaccacctcagcgggcacagctaccccttcctcatccggggcgagtggcacaacaccttcaggaagcgaaggaatatccacctcaggagagacgacaaggttttcatcaaacccctccagggacagtcacacaacccagtcaacaaccgaattgctgtccgcctcagccagtcatggtgccatcccagtaagcacaggaatggcgtcttcgatcgtccccggcacctttcatcccaccctctctgaggcctccactgcagggagaccgacaggacagtcaagcccaacttctcccagtgcctctcctcaggagacagccgccatttcccggatggcccagactcagaggacaagaaccagcagagggtctgacactatcagcctggcgtcccaggcaaccgacaccttctcaacagtcccacccacacctccatcgatcacatccactgggcttacatctccacaaaccgagacccacactctgtcaccttcagggtctggtaaaaccttcaccacggccctcatcagcaacgccacccctcttcctgtcacctacgcttcctcggcatccacaggtcacaccacccctcttcatgtcaccgatgcttcctcagtatccacaggtcacgccacccctcttcctgtcaccagcccttcctcagtatccacaggtcacaccacccctcttcctgtcaccgacacttcctcagaatccacaggtcacgtcacccctcttcctgtcaccagcttttcctcagcatccacaggtgacagcacccctcttcctgtcactgacacttcctcagcatccacaggtcacgtcacccctcttcctgtcaccagcctttcctcagcatccacaggtgacaccacccctcttcctgtcactgacacttcctcagcatccacaggtcacgccacctctcttcctgtcaccgacacttcctcagtatccacaggtcacaccacccctcttcctgtcaccgacacttcctcagcatccacaggtcacgccacctctcttcctgtcaccgacacttcctcagtatccacaggtcacaccacccctcttcatgtcactgatgcttcctcagcatccacaggtcaggccacccctcttcctgtcaccagcctttcctcagtatccacaggtgacaccacgcctcttcctgtcactagcccttcctcagcatccacaggtcacgccacccctcttcttgtcaccgacacttcctcagcatccacaggacacgccacccctcttcctgtcaccgacgcttcctcagtgtccacagatcacgccacctctcttcctgtaaccatcccttccgcagcatccacaggtcacaccacccctcttcctgtcaccgacacttcctcagcatccacaggtcaggccacctctcttcttgtcaccgacacttcctcagtatccacaggtgacaccacgcctcttcctgtcactagcacttcctcagcatccacaggtcacgtcactcctcttcatgtcaccagcccttcctcagcatccacaggtcacgccacccctcttcctgtcaccagcctttcctcagcatccacaggtgacaccatgcctcttcctgtcactagcccttcctcagcatccacaggtgacaccacccctcttcctgtcaccgacgcttcctcagtatccacaggtcacaccacccctcttcatgtcactgatgcttcctcagcatccacaggtcaggccacccctcttcctgtcaccagcctttcctcagtatccacaggtgacaccacgcctcttcctgtcactagcccttcctcagcatccacaggtcacgccacccctcttcttgtcaccgacacttcctcagcatccacaggacacgccacccctcttcctgtcaccgacgcttcctcagtgtccacagatcacgccacctctcttcctgtaaccatcccttccgcagcatccacaggtcacaccacccctcttcctgtcaccgacacttcctcagcatccacaggtcaggccacctctcttcttgtcaccgacacttcctcagtatccacaggtgacaccacgcctcttcctgtcactagcacttcctcagcatccacaggtcacgtcactcctcttcatgtcaccagcccttcctcagcatccacaggtcacgccacccctcttcctgtcaccagcctttcctcagcatccacaggtgacaccatgcctcttcctgtcactagcccttcctcagcatccacaggtgacaccacccctcttcctgtcaccgacgcttcctcagtatccacaggtcacaccacccctcttcctgtcaccagcccttcctcagcatctacaggtcacaccacccctcttcctgtcaccgacacttcctcagcatccaaaggtgacaccacccctcttcctgtcaccagcccttcctcagcatctacaggtcacaccacccctcttcctgtcaccgacacttcctcagcatccacaggtgacaccacccctcttcctgtcaccaatgcttcctcattatccacaggtcacgccacccctcttcatgtcaccagcccttcctcagcatccacaggtcacgccacccctcttcctgtcaccagcacttcctcagcatccaccggtcacgccacccctcttcctgtcaccggcctttcctcagctaccacagatgacaccacccgtcttcctgtcaccgacgtttcctcggcatccacaggtcaggccacccctcttcctgtcaccagcctttcctcagtatccacaggtgacaccacgcctcttcctgtcactagcccttcctcagcatccacaggtcacgccagccctcttcttgtcactgacgcttcctcagcatccacaggtcaggccacccctcttcctgtcaccgacacttcctcagtatccacagctcacgccaccccacttcctgtcaccggcctttcttcagcttccacagatgacaccacccgtcttcctgtcaccgacgtttcctcggcatccacaggtcaggccatccctcttcctgtcaccagcccttcctcagcatccacaggtgacaccacccctcttcctgtcaccgacgcttcctcagcatccacaggtgacaccacctctcttcctgtcaccatcccttcctcagcatcttcaggtcacaccacctctcttcctgtcaccgacgcttcctcagtgtccacaggtcacgccacctctcttcttgtcaccgacgcttcctcagtatccacaggtgacaccacccctcttcctgtcaccgacactaactcagcatccacaggtgacaccacccctcttcatgtcaccgacgcttcctcagtatccacaggtcacgccacctctcttcctgtcaccagcctttcctcagcatccacaggtgacaccacgcctcttcctgtcactagcccttcctcagcatcctcaggtcacaccacccctcttcctgtcaccgacgcttcctcagtacccacaggtcacgccacctctcttcctgtcaccgacgcttcctcagtgtccacaggtcacgccacccctcttcctgtcaccgacgcttcctcagtgtccacaggtcatgccacccctcttccggtcaccgacacttcctcagtatctacaggacaggccacccctcttcctgtcaccagcctttcctcagcatccactggtgacaccacgccgcttcctgtcaccgatacttcctcagcatccacaggtcaggacacccctcttcctgtcaccagcctttcctcagtatccacaggtgacaccacgcctcttcctgtcactaacccttcctcagcatccacaggtcacgccacccctcttcttgtcaccgacgcttcctcaatatccacaggtcacgccacctctcttcttgtcaccgacgcttcctcagtatccacaggtcacgccaccgctcttcatgacaccgatgcttcctcattatccacaggggacaccacccctcttcctgtcaccagcccttcctcaacatccacaggtgacaccacccctcttcctgtcaccgaaacttcctcagtatccacaggtcacgccacctctcttcctgtcaccgacacttcctcagcatccacaggtcacgccacctctcttcctgtcaccgacacttcctcagcatccacaggtcacgccacccctcttcctgtcaccgacacttcctcagcatccacaggtcaggccacccctcttcctgtcaccagcccttcctcagcatccacaggtcacgccatccctcttcttgtcaccgacacttcctcagcatccacaggacaggccacccctcttcctgtcaccagcctttcctcagcatccacaggtgacaccacccctcttcctgtcaccgacgcttcctcagtgtccacaggtcacgccacctctcttcctgtcaccagcctttcctcagtatccacaggtgacaccactcctcttcctgtcactagcccttcctcagcatccacaggtcacgccacccctcttcatgtcaccgacgcttcctcagcatccacaggtcacgccacccctcttcctgtcaccagcctttcctcagcatccacaggtgacaccacgcctcttcctgtcactagcccttcctcagcatccacaggtcacgccacccctcttcatgtcaccgacgcttcctcagtatccacaggtgacaccacccctcttcctgtcaccagctcttcctcagcatcctcaggtcacaccacccctcttcctgtcaccgacgcttcctcagcatccacaggtgacaccacccctcttcctgtcaccgacacttcctcagcatccacaggtcacgccacccatcttcctgtcaccggcctttcctcagcttccacaggtgacaccacccgtcttcctgtcaccaacgtttcctcggcatccacaggtcatgccacccctcttcctgtcaccagcacttcctcagcatccacaggtgacaccacccctcttcctggcaccgacacttcctcagtatccacaggtcacaccacccctcttcttgtcaccgacgcttcgtcagtatccacaggtgacaccacccgtcttcctgtcaccagcccttcctcagcatctacaggtcacaccacccctctacctgtcaccgacactccctcagcatccacaggtgacaccacccctcttcctgtcaccaatgcttcctcattatccacacgtcacgccacctctcttcatgtcaccagcccttcctcagcatccacaggtcacgccacctctcttcctgtcaccgacacttccgcagcatccacaggtcacgccacccctcttcctgtcaccagcacttcctcagcatccacaggtgacaccacccctcttcctgtcaccgacacttactcagcatccacaggtcaggccacccctcttcctgtcaccagcctttcctcagtatccacaggtgacaccacgcctcttcctgtcactagcccttcctcagcatccacaggtcacgccactcctcttcttgtcaccgacgcttcctcagcatccacaggtcaggccacccctcttcctgtcaccagcctttcctcagtatccacaggtgacaccacgcctcttcctgtcactagcccttcctcagcatccaccggtcatgccacctctcttcctgtcaccgacacttcctcagcatccacaggtgacaccacctctcttcctgtcaccgacacttcctcagcatacacaggtgacaccacctctcttcctgtcaccgacacttcctcatcatccacaggtgacaccacccctcttcttgtcaccgagacttcctcagtatccacaggtgacaccacccctcttcctgtcaccgacacttcctcagcatccacaggtcacgccacccctcttcctgtcaccaacacttcctcagtatccacaggtcacgccacccctcttcatgtcaccagcccttcctcagcatccacaggtcacaccacccctcttcctgtcaccgacgcttcgtcagtgtccacaggtcacgccacctctcttcctgtcaccgacgcttcctcagtgttcacaggtcatgccacctctcttcctgtcaccatcccttcctcagcatcctcaggtcacaccacccctcttcctgtcaccgacgcttcctcagtgtccacaggtcacgccacctctcttcctgtcaccgacgcttcctcagtgtccacaggtcatgccacccctcttcctgtcaccgacgcttcctcagtgtccacaggtcacgctacccctcttcctctcaccagcctttcctcagtatccacaggtgacaccacgcctcttcctgtcaccgacacttcctcagcatccacaggtcaggccacccctcttcctgtcaccagcctttcctcagtatccacaggtgacaccacccctcttcctgtcaccgacacttcctcagcatccacaggtcacgccacctctcttcctgtcaccgacacttcctcagcatccacaggtcacgccacccctcttcctgacaccgacacttcctcagcatccacaggtcacgccacccttcttcctgtcaccgacacttcctcagcatccataggtcacgccacctctcttcctgtcaccgacacttcctcaatatccacaggtcacgccacccctcttcatgtcaccagcccttcctcagcatccaccggtcacgccaccccgcttcctgtcaccgacacttcctcagcatccacaggtcacgccaaccctcttcatgtcaccagcccttcctcagcatccaccggtcacgccaccccgcttcctgtcaccgacacttcctcagcatccacaggtcacgccacccctcttcctgtcaccagcctttcctcagtatccacaggtgacaccacgcctcttcctgtcactagcccttcctcagcatccacaggtcacaccacccctcttcctgtcaccgacacttcctcagcatccacaggtcaggccaccgctcttcctgtcaccagcacttcctcagcatccacaggtgacaccacccctcttcctgtcaccgacacttcctcagcatccacaggtcaggccacccctcttcctgtcaccagcctttcctcagtatccacaggtgacaccacgcctcttcctgtcactagcccttcctcagcatccacaggtcacgccactcctcttcttgtcaccgacgcttcctcagcatccacaggtcaggccacccctcttcctgtcaccagcctttcctcagtatccacaggtgacaccacgcctcttcctgtcactagcccttcctcagcatccaccggtcatgccacctctcttcctgtcaccgacacttcctcagcatccacaggtgacaccacctctcttcctgtcaccgacacttcctcagcatacacaggtgacaccacctctcttcctgtcaccgacacttcctcatcatccacaggtgacaccacccctcttcttgtcaccgagacttcctcagtatccacaggtcacgccactcctcttcttgtcaccgacgcttcctcagcatccacaggtcacgccacccctcttcatgtcaccagcccttcctcagcatccacaggtgacaccacccctgtgcctgtcaccgacacttcctcagtatccacaggtcacgccacccctcttcctgtcaccggcctttcctcagcttccacaggtgacaccacccgtcttcctgtcaccgacatttcctcggcatccacaggtcaggccacccctcttcctgtcaccaacacttcctcagtatccacaggtgacaccatgcctcttcctgtcactagcccttcctcagcatccacaggtcacgccacccctcttcctgtcaccagcacttcctcagcatccaccggtcacgccacccctgttcctgtcaccagcacttcctcagcatctacaggtcacaccacccctcttcctgtcaccgacacttcctcagcatccacaggtgacaccacccctcttcctgtcaccagcccttcctcagcatctacaggtcacaccacccctcttcatgtcaccatcccttcctcagcatccacaggtgacaccagcactcttcctgtcaccggcgcttcctcagcatccaccggtcacgccacccctcttcctgtcaccgacacttcctcagtatccaccggtcacgccacgcctcttcctgtcaccagcctttcctcagtatccacaggtgacaccacccctcttcctgtcaccgacgcttcctcggcatccacaggtcaggccacccctcttcctgtcaccagcctttcctcagtatccacaggtgacaccacccctcttcttgtcaccgacgcttcctcagtatccacaggtcacgccacccctcttcctgtcaccgacacttcctcagcatccacaggtgacaccacccgtcttcctgtcacggacacttcctcagcatccacaggtcaggccacccctcttcctgtcaccagcctttcctcagtatccacaggtgacaccacccctcttcttgtcaccgacgcttcctcagtatccacaggtcacgccacccctcttcctgtcaccgacacttcctcagcatccacaggtgacaccacccgtcttcctgtcacggacacttcctcagcatccacaggtcaggccacccctcttcctgtcaccatcccttcctcatcatcctcaggtcacaccacccctcttcctgtcaccagcacttcctcagtatctacaggtcacgtcacccctcttcatgtcaccagcccttcctcagcatccacaggtcacgtcacccctcttcctgtcaccagcacttcctcagcatccacaggtcacgccacccctcttcttgtcaccgacgcttcctcagtgtccacaggtcacgccacgcctcttcctgtcaccgacgcttcctcagcatccacaggtgacaccacccctcttcctgtcaccgacacttcctcagcatccacaggtcaggccacccctcttcctgtcaccagcctttcctcagtatccacaggtgacaccacccctcttcctgtcaccgacgcttcctcagcatccacaggtcacgccacccctcttcctgtcaccatcccttcctcagtatccacaggtgacaccatgcctcttcctgtcactagcccttcctcagcatccacaggtcacgccacccctcttcctgttaccggcctttcctcagcttccacaggtgacaccacccctcttcctgtcaccgacacttcctcagcatccacacgtcacgccacccctcttcctgtcaccgacacttcctcagcttccacagatgacaccacccgtcttcctgtcaccgacgtttcctcggcatccacaggacatgccacccctcttcctgtcaccagcacttcctcagcatccacaggtgacaccacccctcttcctgtcaccgacacttcctcagtatccacaggtcacgccacctctcttcctgtcaccagccgttcctcagcatccacaggtcacgccaccccccttcctgtcaccgacacttcctcagtatccacaggtcacgccacccctcttcctgtcaccagcacttcctcagtatctacaggtcacgccacccctcttcctgtcaccagcccttcctcagcatccacaggtcacgccacccctgttcctgtcaccagcacttcctcagcatccacaggtgacaccacccctcttcctgtcaccaatgcttcctcattatccacaggtcacgccacccctcttcatgtcaccagcccttcctcagcatccagaggtgacaccagcactcttcctgtcaccgatgcttcctcagcatccaccggtcacgccacccctcttcctctcaccagcctttcctcagtatccacaggtgacaccacgcctcttcctgtcaccgacacttcctctgcatccacaggtcaggccacccctcttcctgtcaccagcctttcctcagtatccacaggtgacaccacgcctcttcctgtcaccatcccttcctcagcatcctcaggtcacaccacctctcttcctgtcaccgacgcttcctcagtgtccacaggtcacggcacccctcttcctgtcaccagcacttcctcagcatccacaggtgacaccacccctcttcctgtcaccgacacttcctcagcatccacaggtcacgccacccctcttcctgtcaccgacacttcctcagcatccacaggtcacgccacccctcttcctgtcaccagcctttcctcagtatccacaggtcacgccacccctcttgctgtcagcagtgctacctcagcttccacagtatcctcggactcccctctgaagatggaaacaccaggaatgacaacaccgtcactgaagacagacggtgggagacgcacagccacatcaccaccccccacaacctcccagaccatcatttccaccattcccagcactgccatgcacacccgctccacagctgcccccatccccatcctgcctgagagaggtgaggccatacaggagtttccctcttcccctatggggcaggcgccggggacctggagttcgtcaggaggaccgtggacttcacctccccactcttcaagccggcgactggcttcccccttggctcctctctccgtgattccctctacttcacagacaatggccagatcatcttcccagagtcagactaccagattttctcctaccccaacccactcccaacaggcttcacaggccgggaccctgtggccctggtggctccgttctgggacgatgctgacttctccactggtcgggggaccacattttatcaggaatacgagacgttctatggtgaacacagcctgctagtccagcaggccgagtcttggattagaaagatgacaaacaacgggggctacaaggccaggtgggccctaaaggtcacgtgggtcaatgcccacgcctatcctgcccagtggaccctcgggagcaacacctaccaagccatcctctccacggacgggagcaggtcctatgccctgtttctctaccagagcggtgggatgcagtgggacgtggcccagcgctcaggcaacccggtgctcatgggcttctctagtggagatggctatttcgaaaacagcccactgatgtcccagccagtgtgggagaggtatcgccctgatagattcctgaattccaactcaggcctccaagggctgcagttctacaggctacaccgggaagaaaggcccaactaccgtctcgagtgcctgcagtggctgaagagccagcctcggtggcccagctggggctggaaccaggtctcctgcccttgttcctggcagcagggacgacgggacttacgattccaacccgtcagcataggtcgctggggcctcggcagtaggcagctgtgcagcttcacctcttggcgaggaggcgtgtgctgcagctacgggccctggggagagtttcgtgaaggctggcacgtgcagcgtccttggcagttggcccaggaactggagccacagagctggtgctgccgctggaatgacaagccctacctctgtgccctgtaccagcagaggcggccccacgtgggctgtgctacatacaggcccccacagcccgcctggatgttcggggacccccacatcaccaccttggatggtgtcagttacaccttcaatgggctgggggacttcctgctggtcggggcccaagacgggaactcctccttcctgcttcagggccgcaccgcccagactggctcagcccaggccaccaacttcatcgcctttgcggctcagtaccgctccagcagcctgggccccgtcacggtccaatggctccttgagcctcacgacgcaatccgtgtcctgctggataaccagactgtgacatttcagcctgaccatgaagacggcggaggccaggagacgttcaacgccaccggagtcctcctgagccgcaacggctctgaggtctcggccagcttcgacggctgggccaccgtctcggtgatcgcgctctccaacatcctccacgcctccgccagcctcccgcccgagtaccagaaccgcacggaggggctcctgggggtctggaataacaatccagaggacgacttcaggatgcccaatggctccaccattcccccagggagccctgaggagatgcttttccactttggaatgacctggcagatcaacgggacaggcctccttggcaagaggaatgaccagctgccttccaacttcacccctgttttctactcacaactgcaaaaaaacagctcctgggctgaacatttgatctccaactgtgacggagatagctcatgcatctatgacaccctggccctgcgcaacgcaagcatcggacttcacacgagggaagtcagtaaaaactacgagcaggcgaacgccaccctcaatcagtacccgccctccatcaatggtggtcgtgtgattgaagcctacaaggggcagaccacgctgattcagtacaccagcaatgctgaggatgccaacttcacgctcagagacagctgcaccgacttggagctctttgaaccagtcctgccctgtgaattactgctacaatcaaggccactgctacatctcccagactctgggctgtcagcccatgtgcacctgccccccagccttcactgacagccgctgcttcctggctgggaacaacttcagtccaactgtcaacctagaacttcccttaagagtcatccagctcttgctcagtgaagaggaaaatgcctccatggcagaagtcaacgcctcggtggcatacagactggggaccctggacatgcgggcctttctccgcaacagccaagtggaacgaatcgattctgcagcaccggcctcgggaagccccatccaacactggatggtcatctcggagttccagtaccgccctcggggcccggtcattgacttcctgaacaaccagctgctggccgcggtggtggaggcgttcttataccacgttccacggaggagtgaggagcccaggaacgacgtggtcttccagcccatctccggggaagacgtgcgcgatgtgacagccctgaacgtgagcacgctgaaggcttacttcagatgcgatggctacaagggctacgacctggtctacagcccccagagcggcttcacctgcgtgtccccgtgcagtaggggctactgtgaccatggaggccagtgccagcacctgcccagtgggccccgctgcagctgtgtgtccttctccatctacacggcctggggcgagcactgtgagcacctgagcatgaaactcgacgcgttcttcggcatcttctttggggccctgggcggcctcttgctgctgggggtcgggacgttcgtggtcctgcgcttctggggttgctccggggccaggttctcctatttcctgaactcagctgaggccttgccttgaaggggcagctgtggcctaggctacctcaagactcacctcatccttaccgcacatttaaggcgccattgcttttgggagactggaaaagggaaggtgactgaaggctgtcaggattctt

SEQ ID NO: 155655 - DNA, 16401 bp, Homo sapiens
  Payload ID: 10597
  Gene Symbol: MUC4
  Gene Name: mucin 4, cell surface associated
  ENST ID: ENST00000477756
  CDS Start-End: 73-13605
gtctgctcctcacactgcagctgctgggccgtggagcttccccagggagccagggggacttttgccgcagccatgaagggggcacgctggaggagggtcccctgggtgtccctgagctgcctgtgtctctgcctccttccgcatgtggtcccaggaaccacagaggacacattaataactggaagtaaaactgctgccccagtcacctcaacaggctcaacaacagcgacactagagggacaatcaactgcagcttcttcaaggacctctaatcaggacatatcagcttcatctcagaaccaccagactaagagcacggagaccaccagcaaagctcaaaccgacaccctcacgcagatgatgacatcaactcttttttcttccccaagtgtacacaatgtgatggagacagctcctccagatgaaatgaccacatcatttccctccagtgtcaccaacacactcatgatgacatcaaagactataacaatgacaacctccacagactccactcttggaaacacagaagagacatcaacagcaggaactgaaagttctaccccagtgacctcagcagtctcaataacagctggacaggaaggacaatcacgaacaacttcctggaggacctctatccaagacacatcagcttcttctcagaaccactggactcggagcacgcagaccaccagggaatctcaaaccagcaccctaacacacagaaccacttcaactccttctttctctccaagtgtacacaatgtgacagggactgtttctcagaagacatctccttcaggtgaaacagctacctcatccctctgtagtgtcacaaacacatccatgatgacatcagagaagataacagtgacaacctccacaggctccactcttggaaacccaggggagacatcatcagtacctgttactggaagtcttatgccagtcacctcagcagccttagtaacatttgatccagaaggacaatcaccagcaactttctcaaggacttctactcaggacacaacagctttttctaagaaccaccagactcagagcgtggagaccaccagagtatctcaaatcaacaccctcaacaccctcacaccggttacaacatcaactgttttatcctcaccaagtggattcaacccaagtggaacagtttctcaggagacattcccttctggtgaaacaaccacctcatccccttccagtgtcagcaatacattcctggtaacatcaaaggtgttcagaatgccaacctccagagactctactcttggaaacacagaggagacatcactatctgtaagtggaaccatttctgcaatcacttccaaagtttcaaccatatggtggtcagacactctgtcaacagcactctcccccagttctctacctccaaaaatatccacagctttccacacccagcagagtgaaggtgcagagaccacaggacggcctcatgagaggagctcattctctccaggtgtgtctcaagaaatatttactctacatgaaacaacaacatggccttcctcattctccagcaaaggccacacaacttggtcacaaacagaactgccctcaacatcaacaggtgctgccactaggcttgtcacaggaaatccatctacagggacagctggcactattccaagggtcccctctaaggtctcagcaataggggaaccaggagagcccaccacatactcctcccacagcacaactctcccaaaaacaacaggggcaggcgcccagacacaatggacacaagaaacggggaccactggagaggctcttctcagcagcccaagctacagtgtgactcagatgataaaaacggccacatccccatcttcttcacctatgctggatagacacacatcccaacaaattacaacggcaccatcaacaaatcattcaacaatacattccacaagcacctctcctcaggaatcaccagctgtttcccaaaggggtcacactcaagccccgcagaccacacaagaatcacaaaccacgaggtccgtctcccccatgactgacaccaagacagtcaccaccccaggttcttccttcacagccagtgggcactcgccctcagaaattgttcctcaggacgcacccaccataagtgcagcaacaacctttgccccagctcccaccggggatggtcacacaacccaggccccgaccacagcactgcaggcagcacccagcagccatgatgccaccctggggccctcaggaggcacgtcactttccaaaacaggtgcccttactctggccaactctgtagtgtcaacaccagggggcccagaaggacaatggacatcagcctctgccagcacctcacctgacacagcagcagccatgacccatacccaccaggctgagagcacagaggcctctggacaaacacagaccagcgaaccggcctcctcagggtcacgaaccacctcagcgggcacagctaccccttcctcatccggggcgagtggcacaacaccttcaggaagcgaaggaatatccacctcaggagagacgacaaggttttcatcaaacccctccagggacagtcacacaacccagtcaacaaccgaattgctgtccgcctcagccagtcatggtgccatcccagtaagcacaggaatggcgtcttcgatcgtccccggcacctttcatcccaccctctctgaggcctccactgcagggagaccgacaggacagtcaagcccaacttctcccagtgcctctcctcaggagacagccgccatttcccggatggcccagactcagaggacaagaaccagcagagggtctgacactatcagcctggcgtcccaggcaaccgacaccttctcaacagtcccacccacacctccatcgatcacatccactgggcttacatctccacaaaccgagacccacactctgtcaccttcagggtctggtaaaaccttcaccacggccctcatcagcaacgccacccctcttcctgtcacctacgcttcctcggcatccacaggtcacaccacccctcttcatgtcaccgatgcttcctcagtatccacaggtcacgccacccctcttcctgtcaccagcccttcctcagtatccacaggtcacaccacccctcttcctgtcaccgacacttcctcagaatccacaggtcacgtcacccctcttcctgtcaccagcttttcctcagcatccacaggtgacagcacccctcttcctgtcactgacacttcctcagcatccacaggtcacgtcacccctcttcctgtcaccagcctttcctcagcatccacaggtgacaccacccctcttcctgtcactgacacttcctcagcatccacaggtcacgccacctctcttcctgtcaccgacacttcctcagtatccacaggtcacaccacccctcttcctgtcaccgacacttcctcagcatccacaggtcacgccacctctcttcctgtcaccgacacttcctcagtatccacaggtcacaccacccctcttcatgtcactgatgcttcctcagcatccacaggtcaggccacccctcttcctgtcaccagcctttcctcagtatccacaggtgacaccacgcctcttcctgtcactagcccttcctcagcatccacaggtcacgccacccctcttcttgtcaccgacacttcctcagcatccacaggacacgccacccctcttcctgtcaccgacgcttcctcagtgtccacagatcacgccacctctcttcctgtaaccatcccttccgcagcatccacaggtcacaccacccctcttcctgtcaccgacacttcctcagcatccacaggtcaggccacctctcttcttgtcaccgacacttcctcagtatccacaggtgacaccacgcctcttcctgtcactagcacttcctcagcatccacaggtcacgtcactcctcttcatgtcaccagcccttcctcagcatccacaggtcacgccacccctcttcctgtcaccagcctttcctcagcatccacaggtgacaccatgcctcttcctgtcactagcccttcctcagcatccacaggtgacaccacccctcttcctgtcaccgacgcttcctcagtatccacaggtcacaccacccctcttcatgtcactgatgcttcctcagcatccacaggtcaggccacccctcttcctgtcaccagcctttcctcagtatccacaggtgacaccacgcctcttcctgtcactagcccttcctcagcatccacaggtcacgccacccctcttcttgtcaccgacacttcctcagcatccacaggacacgccacccctcttcctgtcaccgacgcttcctcagtgtccacagatcacgccacctctcttcctgtaaccatcccttccgcagcatccacaggtcacaccacccctcttcctgtcaccgacacttcctcagcatccacaggtcaggccacctctcttcttgtcaccgacacttcctcagtatccacaggtgacaccacgcctcttcctgtcactagcacttcctcagcatccacaggtcacgtcactcctcttcatgtcaccagcccttcctcagcatccacaggtcacgccacccctcttcctgtcaccagcctttcctcagcatccacaggtgacaccatgcctcttcctgtcactagcccttcctcagcatccacaggtgacaccacccctcttcctgtcaccgacgcttcctcagtatccacaggtcacaccacccctcttcctgtcaccagcccttcctcagcatctacaggtcacaccacccctcttcctgtcaccgacacttcctcagcatccaaaggtgacaccacccctcttcctgtcaccagcccttcctcagcatctacaggtcacaccacccctcttcctgtcaccgacacttcctcagcatccacaggtgacaccacccctcttcctgtcaccaatgcttcctcattatccacaggtcacgccacccctcttcatgtcaccagcccttcctcagcatccacaggtcacgccacccctcttcctgtcaccagcacttcctcagcatccaccggtcacgccacccctcttcctgtcaccggcctttcctcagctaccacagatgacaccacccgtcttcctgtcaccgacgtttcctcggcatccacaggtcaggccacccctcttcctgtcaccagcctttcctcagtatccacaggtgacaccacgcctcttcctgtcactagcccttcctcagcatccacaggtcacgccagccctcttcttgtcactgacgcttcctcagcatccacaggtcaggccacccctcttcctgtcaccgacacttcctcagtatccacagctcacgccaccccacttcctgtcaccggcctttcttcagcttccacagatgacaccacccgtcttcctgtcaccgacgtttcctcggcatccacaggtcaggccatccctcttcctgtcaccagcccttcctcagcatccacaggtgacaccacccctcttcctgtcaccgacgcttcctcagcatccacaggtgacaccacctctcttcctgtcaccatcccttcctcagcatcttcaggtcacaccacctctcttcctgtcaccgacgcttcctcagtgtccacaggtcacgccacctctcttcttgtcaccgacgcttcctcagtatccacaggtgacaccacccctcttcctgtcaccgacactaactcagcatccacaggtgacaccacccctcttcatgtcaccgacgcttcctcagtatccacaggtcacgccacctctcttcctgtcaccagcctttcctcagcatccacaggtgacaccacgcctcttcctgtcactagcccttcctcagcatcctcaggtcacaccacccctcttcctgtcaccgacgcttcctcagtacccacaggtcacgccacctctcttcctgtcaccgacgcttcctcagtgtccacaggtcacgccacccctcttcctgtcaccgacgcttcctcagtgtccacaggtcatgccacccctcttccggtcaccgacacttcctcagtatctacaggacaggccacccctcttcctgtcaccagcctttcctcagcatccactggtgacaccacgccgcttcctgtcaccgatacttcctcagcatccacaggtcaggacacccctcttcctgtcaccagcctttcctcagtatccacaggtgacaccacgcctcttcctgtcactaacccttcctcagcatccacaggtcacgccacccctcttcttgtcaccgacgcttcctcaatatccacaggtcacgccacctctcttcttgtcaccgacgcttcctcagtatccacaggtcacgccaccgctcttcatgacaccgatgcttcctcattatccacaggggacaccacccctcttcctgtcaccagcccttcctcaacatccacaggtgacaccacccctcttcctgtcaccgaaacttcctcagtatccacaggtcacgccacctctcttcctgtcaccgacacttcctcagcatccacaggtcacgccacctctcttcctgtcaccgacacttcctcagcatccacaggtcacgccacccctcttcctgtcaccgacacttcctcagcatccacaggtcaggccacccctcttcctgtcaccagcccttcctcagcatccacaggtcacgccatccctcttcttgtcaccgacacttcctcagcatccacaggacaggccacccctcttcctgtcaccagcctttcctcagcatccacaggtgacaccacccctcttcctgtcaccgacgcttcctcagtgtccacaggtcacgccacctctcttcctgtcaccagcctttcctcagtatccacaggtgacaccactcctcttcctgtcactagcccttcctcagcatccacaggtcacgccacccctcttcatgtcaccgacgcttcctcagcatccacaggtcacgccacccctcttcctgtcaccagcctttcctcagcatccacaggtgacaccacgcctcttcctgtcactagcccttcctcagcatccacaggtcacgccacccctcttcatgtcaccgacgcttcctcagtatccacaggtgacaccacccctcttcctgtcaccagctcttcctcagcatcctcaggtcacaccacccctcttcctgtcaccgacgcttcctcagcatccacaggtgacaccacccctcttcctgtcaccgacacttcctcagcatccacaggtcacgccacccatcttcctgtcaccggcctttcctcagcttccacaggtgacaccacccgtcttcctgtcaccaacgtttcctcggcatccacaggtcatgccacccctcttcctgtcaccagcacttcctcagcatccacaggtgacaccacccctcttcctggcaccgacacttcctcagtatccacaggtcacaccacccctcttcttgtcaccgacgcttcgtcagtatccacaggtgacaccacccgtcttcctgtcaccagcccttcctcagcatctacaggtcacaccacccctctacctgtcaccgacactccctcagcatccacaggtgacaccacccctcttcctgtcaccaatgcttcctcattatccacacgtcacgccacctctcttcatgtcaccagcccttcctcagcatccacaggtcacgccacctctcttcctgtcaccgacacttccgcagcatccacaggtcacgccacccctcttcctgtcaccagcacttcctcagcatccacaggtgacaccacccctcttcctgtcaccgacacttactcagcatccacaggtcaggccacccctcttcctgtcaccagcctttcctcagtatccacaggtgacaccacgcctcttcctgtcactagcccttcctcagcatccacaggtcacgccactcctcttcttgtcaccgacgcttcctcagcatccacaggtcaggccacccctcttcctgtcaccagcctttcctcagtatccacaggtgacaccacgcctcttcctgtcactagcccttcctcagcatccaccggtcatgccacctctcttcctgtcaccgacacttcctcagcatccacaggtgacaccacctctcttcctgtcaccgacacttcctcagcatacacaggtgacaccacctctcttcctgtcaccgacacttcctcatcatccacaggtgacaccacccctcttcttgtcaccgagacttcctcagtatccacaggtgacaccacccctcttcctgtcaccgacacttcctcagcatccacaggtcacgccacccctcttcctgtcaccaacacttcctcagtatccacaggtcacgccacccctcttcatgtcaccagcccttcctcagcatccacaggtcacaccacccctcttcctgtcaccgacgcttcgtcagtgtccacaggtcacgccacctctcttcctgtcaccgacgcttcctcagtgttcacaggtcatgccacctctcttcctgtcaccatcccttcctcagcatcctcaggtcacaccacccctcttcctgtcaccgacgcttcctcagtgtccacaggtcacgccacctctcttcctgtcaccgacgcttcctcagtgtccacaggtcatgccacccctcttcctgtcaccgacgcttcctcagtgtccacaggtcacgctacccctcttcctctcaccagcctttcctcagtatccacaggtgacaccacgcctcttcctgtcaccgacacttcctcagcatccacaggtcaggccacccctcttcctgtcaccagcctttcctcagtatccacaggtgacaccacccctcttcctgtcaccgacacttcctcagcatccacaggtcacgccacctctcttcctgtcaccgacacttcctcagcatccacaggtcacgccacccctcttcctgacaccgacacttcctcagcatccacaggtcacgccacccttcttcctgtcaccgacacttcctcagcatccataggtcacgccacctctcttcctgtcaccgacacttcctcaatatccacaggtcacgccacccctcttcatgtcaccagcccttcctcagcatccaccggtcacgccaccccgcttcctgtcaccgacacttcctcagcatccacaggtcacgccaaccctcttcatgtcaccagcccttcctcagcatccaccggtcacgccaccccgcttcctgtcaccgacacttcctcagcatccacaggtcacgccacccctcttcctgtcaccagcctttcctcagtatccacaggtgacaccacgcctcttcctgtcactagcccttcctcagcatccacaggtcacaccacccctcttcctgtcaccgacacttcctcagcatccacaggtcaggccaccgctcttcctgtcaccagcacttcctcagcatccacaggtgacaccacccctcttcctgtcaccgacacttcctcagcatccacaggtcaggccacccctcttcctgtcaccagcctttcctcagtatccacaggtgacaccacgcctcttcctgtcactagcccttcctcagcatccacaggtcacgccactcctcttcttgtcaccgacgcttcctcagcatccacaggtcaggccacccctcttcctgtcaccagcctttcctcagtatccacaggtgacaccacgcctcttcctgtcactagcccttcctcagcatccaccggtcatgccacctctcttcctgtcaccgacacttcctcagcatccacaggtgacaccacctctcttcctgtcaccgacacttcctcagcatacacaggtgacaccacctctcttcctgtcaccgacacttcctcatcatccacaggtgacaccacccctcttcttgtcaccgagacttcctcagtatccacaggtcacgccactcctcttcttgtcaccgacgcttcctcagcatccacaggtcacgccacccctcttcatgtcaccagcccttcctcagcatccacaggtgacaccacccctgtgcctgtcaccgacacttcctcagtatccacaggtcacgccacccctcttcctgtcaccggcctttcctcagcttccacaggtgacaccacccgtcttcctgtcaccgacatttcctcggcatccacaggtcaggccacccctcttcctgtcaccaacacttcctcagtatccacaggtgacaccatgcctcttcctgtcactagcccttcctcagcatccacaggtcacgccacccctcttcctgtcaccagcacttcctcagcatccaccggtcacgccacccctgttcctgtcaccagcacttcctcagcatctacaggtcacaccacccctcttcctgtcaccgacacttcctcagcatccacaggtgacaccacccctcttcctgtcaccagcccttcctcagcatctacaggtcacaccacccctcttcatgtcaccatcccttcctcagcatccacaggtgacaccagcactcttcctgtcaccggcgcttcctcagcatccaccggtcacgccacccctcttcctgtcaccgacacttcctcagtatccaccggtcacgccacgcctcttcctgtcaccagcctttcctcagtatccacaggtgacaccacccctcttcctgtcaccgacgcttcctcggcatccacaggtcaggccacccctcttcctgtcaccagcctttcctcagtatccacaggtgacaccacccctcttcttgtcaccgacgcttcctcagtatccacaggtcacgccacccctcttcctgtcaccgacacttcctcagcatccacaggtgacaccacccgtcttcctgtcacggacacttcctcagcatccacaggtcaggccacccctcttcctgtcaccagcctttcctcagtatccacaggtgacaccacccctcttcttgtcaccgacgcttcctcagtatccacaggtcacgccacccctcttcctgtcaccgacacttcctcagcatccacaggtgacaccacccgtcttcctgtcacggacacttcctcagcatccacaggtcaggccacccctcttcctgtcaccatcccttcctcatcatcctcaggtcacaccacccctcttcctgtcaccagcacttcctcagtatctacaggtcacgtcacccctcttcatgtcaccagcccttcctcagcatccacaggtcacgtcacccctcttcctgtcaccagcacttcctcagcatccacaggtcacgccacccctcttcttgtcaccgacgcttcctcagtgtccacaggtcacgccacgcctcttcctgtcaccgacgcttcctcagcatccacaggtgacaccacccctcttcctgtcaccgacacttcctcagcatccacaggtcaggccacccctcttcctgtcaccagcctttcctcagtatccacaggtgacaccacccctcttcctgtcaccgacgcttcctcagcatccacaggtcacgccacccctcttcctgtcaccatcccttcctcagtatccacaggtgacaccatgcctcttcctgtcactagcccttcctcagcatccacaggtcacgccacccctcttcctgttaccggcctttcctcagcttccacaggtgacaccacccctcttcctgtcaccgacacttcctcagcatccacacgtcacgccacccctcttcctgtcaccgacacttcctcagcttccacagatgacaccacccgtcttcctgtcaccgacgtttcctcggcatccacaggacatgccacccctcttcctgtcaccagcacttcctcagcatccacaggtgacaccacccctcttcctgtcaccgacacttcctcagtatccacaggtcacgccacctctcttcctgtcaccagccgttcctcagcatccacaggtcacgccaccccccttcctgtcaccgacacttcctcagtatccacaggtcacgccacccctcttcctgtcaccagcacttcctcagtatctacaggtcacgccacccctcttcctgtcaccagcccttcctcagcatccacaggtcacgccacccctgttcctgtcaccagcacttcctcagcatccacaggtgacaccacccctcttcctgtcaccaatgcttcctcattatccacaggtcacgccacccctcttcatgtcaccagcccttcctcagcatccagaggtgacaccagcactcttcctgtcaccgatgcttcctcagcatccaccggtcacgccacccctcttcctctcaccagcctttcctcagtatccacaggtgacaccacgcctcttcctgtcaccgacacttcctctgcatccacaggtcaggccacccctcttcctgtcaccagcctttcctcagtatccacaggtgacaccacgcctcttcctgtcaccatcccttcctcagcatcctcaggtcacaccacctctcttcctgtcaccgacgcttcctcagtgtccacaggtcacggcacccctcttcctgtcaccagcacttcctcagcatccacaggtgacaccacccctcttcctgtcaccgacacttcctcagcatccacaggtcacgccacccctcttcctgtcaccgacacttcctcagcatccacaggtcacgccacccctcttcctgtcaccagcctttcctcagtatccacaggtcacgccacccctcttgctgtcagcagtgctacctcagcttccacagtatcctcggactcccctctgaagatggaaacaccaggaatgacaacaccgtcactgaagacagacggtgggagacgcacagccacatcaccaccccccacaacctcccagaccatcatttccaccattcccagcactgccatgcacacccgctccacagctgcccccatccccatcctgcctgagagaggagtttccctcttcccctatggggcaggcgccggggacctggagttcgtcaggaggaccgtggacttcacctccccactcttcaagccggcgactggcttcccccttggctcctctctccgtgattccctctacttcacagacaatggccagatcatcttcccagagtcagactaccagattttctcctaccccaacccactcccaacaggcttcacaggccgggaccctgtggccctggtggctccgttctgggacgatgctgacttctccactggtcgggggaccacattttatcaggaatacgagacgttctatggtgaacacagcctgctagtccagcaggccgagtcttggattagaaagatgacaaacaacgggggctacaaggccaggtgggccctaaaggtcacgtgggtcaatgcccacgcctatcctgcccagtggaccctcgggagcaacacctaccaagccatcctctccacggacgggagcaggtcctatgccctgtttctctaccagagcggtgggatgcagtgggacgtggcccagcgctcagtggagatggctatttcgaaaacagcccactgatgtcccagccagtgtgggagaggtatcgccctgatagattcctgaattccaactcaggcctccaagggctgcagttctacaggctacaccgggaagaaaggcccaactaccgtctcgagtgcctgcagtggctgaagagccagcctcggtggcccagctggggctggaaccaggtctcctgcccttgttcctggcagcagggacgacgggacttacgattccaacccgtcagcataggtcgctggggcctcggcagtaggcagctgtgcagcttcacctcttggcgaggaggcgtgtgctgcagctacgggccctggggagagtttcgtgaaggctggcacgtgcagcgtccttggcagttggcccaggaactggagccacagagctggtgctgccgctggaatgacaagccctacctctgtgccctgtaccagcagaggcggccccacgtgggctgtgctacatacaggcccccacagcccgcctggatgttcggggacccccacatcaccaccttggatggtgtcagttacaccttcaatgggctgggggacttcctgctggtcggggcccaagacgggaactcctccttcctgcttcagggccgcaccgcccagactggctcagcccaggccaccaacttcatcgcctttgcggctcagtaccgctccagcagcctgggccccgtcacggtccaatggctccttgagcctcacgacgcaatccgtgtcctgctggataaccagactgtgacatttcagcctgaccatgaagacggcggaggccaggagacgttcaacgccaccggagtcctcctgagccgcaacggctctgaggtctcggccagcttcgacggctgggccaccgtctcggtgatcgcgctctccaacatcctccacgcctccgccagcctcccgcccgagtaccagaaccgcacggaggggctcctgggggtctggaataacaatccagaggacgacttcaggatgcccaatggctccaccattcccccagggagccctgaggagatgcttttccactttggaatgacctggcagatcaacgggacaggcctccttggcaagaggaatgaccagctgccttccaacttcacccctgttttctactcacaactgcaaaaaaacagctcctgggctgaacatttgatctccaactgtgacggagatagctcatgcatctatgacaccctggccctgcgcaacgcaagcatcggacttcacacgagggaagtcagtaaaaactacgagcaggcgaacgccaccctcaatcagtacccgccctccatcaatggtggtcgtgtgattgaagcctacaaggggcagaccacgctgattcagtacaccagcaatgctgaggatgccaacttcacgctcagagacagctgcaccgacttggagctctttgagaatgggacgttgctgtggacacccaagtcgctggagccattcactctggagattctagcaagaagtgccaagattggcttggcatctgcactccagcccaggactgtggtctgccattgcaatgcagagagccagtgtttgtacaatcagaccagcagggtgggcaactcctccctggaggtggctggctgcaagtgtgacgggggcaccttcggccgctactgcgagggctccgaggatgcctgtgaggagccgtgcttcccgagtgtccactgcgttcctgggaagggctgcgaggcctgccctccaaacctgactggggatgggcggcactgtgcggctctggggagctctttcctgtgtcagaaccagtcctgccctgtgaattactgctacaatcaaggccactgctacatctcccagactctgggctgtcagcccatgtgcacctgccccccagccttcactgacagccgctgcttcctggctgggaacaacttcagtccaactgtcaacctagaacttcccttaagagtcatccagctcttgctcagtgaagaggaaaatgcctccatggcagaagtcaacgcctcggtggcatacagactggggaccctggacatgcgggcctttctccgcaacagccaagtggaacgaatcgattctgcagcaccggcctcgggaagccccatccaacactggatggtcatctcggagttccagtaccgccctcggggcccggtcattgacttcctgaacaaccagctgctggccgcggtggtggaggcgttcttataccacgttccacggaggagtgaggagcccaggaacgacgtggtcttccagcccatctccggggaagacgtgcgcgatgtgacagccctgaacgtgagcacgctgaaggcttacttcagatgcgatggctacaagggctacgacctggtctacagcccccagagcggcttcacctgcgtgtccccgtgcagtaggggctactgtgaccatggaggccagtgccagcacctgcccagtgggccccgctgcagctgtgtgtccttctccatctacacggcctggggcgagcactgtgagcacctgagcatgaaactcgacgcgttcttcggcatcttctttggggccctgggcggcctcttgctgctgggggtcgggacgttcgtggtcctgcgcttctggggttgctccggggccaggttctcctatttcctgaactcagctgaggccttgccttgaaggggcagctgtggcctaggctacctcaagactcacctcatccttaccgcacatttaaggcgccattgcttttgggagactggaaaagggaaggtgactgaaggctgtcaggattctt

SEQ ID NO: 155656 - DNA, 16562 bp, Homo sapiens
  Payload ID: 10597
  Gene Symbol: MUC4
  Gene Name: mucin 4, cell surface associated
  ENST ID: ENST00000478156
  CDS Start-End: 73-15285
gtctgctcctcacactgcagctgctgggccgtggagcttccccagggagccagggggacttttgccgcagccatgaagggggcacgctggaggagggtcccctgggtgtccctgagctgcctgtgtctctgcctccttccgcatgtggtcccaggaaccacagaggacacattaataactggaagtaaaactgctgccccagtcacctcaacaggctcaacaacagcgacactagagggacaatcaactgcagcttcttcaaggacctctaatcaggacatatcagcttcatctcagaaccaccagactaagagcacggagaccaccagcaaagctcaaaccgacaccctcacgcagatgatgacatcaactcttttttcttccccaagtgtacacaatgtgatggagacagctcctccagatgaaatgaccacatcatttccctccagtgtcaccaacacactcatgatgacatcaaagactataacaatgacaacctccacagactccactcttggaaacacagaagagacatcaacagcaggaactgaaagttctaccccagtgacctcagcagtctcaataacagctggacaggaaggacaatcacgaacaacttcctggaggacctctatccaagacacatcagcttcttctcagaaccactggactcggagcacgcagaccaccagggaatctcaaaccagcaccctaacacacagaaccacttcaactccttctttctctccaagtgtacacaatgtgacagggactgtttctcagaagacatctccttcaggtgaaacagctacctcatccctctgtagtgtcacaaacacatccatgatgacatcagagaagataacagtgacaacctccacaggctccactcttggaaacccaggggagacatcatcagtacctgttactggaagtcttatgccagtcacctcagcagccttagtaacatttgatccagaaggacaatcaccagcaactttctcaaggacttctactcaggacacaacagctttttctaagaaccaccagactcagagcgtggagaccaccagagtatctcaaatcaacaccctcaacaccctcacaccggttacaacatcaactgttttatcctcaccaagtggattcaacccaagtggaacagtttctcaggagacattcccttctggtgaaacaaccacctcatccccttccagtgtcagcaatacattcctggtaacatcaaaggtgttcagaatgccaacctccagagactctactcttggaaacacagaggagacatcactatctgtaagtggaaccatttctgcaatcacttccaaagtttcaaccatatggtggtcagacactctgtcaacagcactctcccccagttctctacctccaaaaatatccacagctttccacacccagcagagtgaaggtgcagagaccacaggacggcctcatgagaggagctcattctctccaggtgtgtctcaagaaatatttactctacatgaaacaacaacatggccttcctcattctccagcaaaggccacacaacttggtcacaaacagaactgccctcaacatcaacaggtgctgccactaggcttgtcacaggaaatccatctacagggacagctggcactattccaagggtcccctctaaggtctcagcaataggggaaccaggagagcccaccacatactcctcccacagcacaactctcccaaaaacaacaggggcaggcgcccagacacaatggacacaagaaacggggaccactggagaggctcttctcagcagcccaagctacagtgtgactcagatgataaaaacggccacatccccatcttcttcacctatgctggatagacacacatcccaacaaattacaacggcaccatcaacaaatcattcaacaatacattccacaagcacctctcctcaggaatcaccagctgtttcccaaaggggtcacactcaagccccgcagaccacacaagaatcacaaaccacgaggtccgtctcccccatgactgacaccaagacagtcaccaccccaggttcttccttcacagccagtgggcactcgccctcagaaattgttcctcaggacgcacccaccataagtgcagcaacaacctttgccccagctcccaccggggatggtcacacaacccaggccccgaccacagcactgcaggcagcacccagcagccatgatgccaccctggggccctcaggaggcacgtcactttccaaaacaggtgcccttactctggccaactctgtagtgtcaacaccagggggcccagaaggacaatggacatcagcctctgccagcacctcacctgacacagcagcagccatgacccatacccaccaggctgagagcacagaggcctctggacaaacacagaccagcgaaccggcctcctcagggtcacgaaccacctcagcgggcacagctaccccttcctcatccggggcgagtggcacaacaccttcaggaagcgaaggaatatccacctcaggagagacgacaaggttttcatcaaacccctccagggacagtcacacaacccagtcaacaaccgaattgctgtccgcctcagccagtcatggtgccatcccagtaagcacaggaatggcgtcttcgatcgtccccggcacctttcatcccaccctctctgaggcctccactgcagggagaccgacaggacagtcaagcccaacttctcccagtgcctctcctcaggagacagccgccatttcccggatggcccagactcagaggacaagaaccagcagagggtctgacactatcagcctggcgtcccaggcaaccgacaccttctcaacagtcccacccacacctccatcgatcacatccactgggcttacatctccacaaaccgagacccacactctgtcaccttcagggtctggtaaaaccttcaccacggccctcatcagcaacgccacccctcttcctgtcacctacgcttcctcggcatccacaggtcacaccacccctcttcatgtcaccgatgcttcctcagtatccacaggtcacgccacccctcttcctgtcaccagcccttcctcagtatccacaggtcacaccacccctcttcctgtcaccgacacttcctcagaatccacaggtcacgtcacccctcttcctgtcaccagcttttcctcagcatccacaggtgacagcacccctcttcctgtcactgacacttcctcagcatccacaggtcacgtcacccctcttcctgtcaccagcctttcctcagcatccacaggtgacaccacccctcttcctgtcactgacacttcctcagcatccacaggtcacgccacctctcttcctgtcaccgacacttcctcagtatccacaggtcacaccacccctcttcctgtcaccgacacttcctcagcatccacaggtcacgccacctctcttcctgtcaccgacacttcctcagtatccacaggtcacaccacccctcttcatgtcactgatgcttcctcagcatccacaggtcaggccacccctcttcctgtcaccagcctttcctcagtatccacaggtgacaccacgcctcttcctgtcactagcccttcctcagcatccacaggtcacgccacccctcttcttgtcaccgacacttcctcagcatccacaggacacgccacccctcttcctgtcaccgacgcttcctcagtgtccacagatcacgccacctctcttcctgtaaccatcccttccgcagcatccacaggtcacaccacccctcttcctgtcaccgacacttcctcagcatccacaggtcaggccacctctcttcttgtcaccgacacttcctcagtatccacaggtgacaccacgcctcttcctgtcactagcacttcctcagcatccacaggtcacgtcactcctcttcatgtcaccagcccttcctcagcatccacaggtcacgccacccctcttcctgtcaccagcctttcctcagcatccacaggtgacaccatgcctcttcctgtcactagcccttcctcagcatccacaggtgacaccacccctcttcctgtcaccgacgcttcctcagtatccacaggtcacaccacccctcttcatgtcactgatgcttcctcagcatccacaggtcaggccacccctcttcctgtcaccagcctttcctcagtatccacaggtgacaccacgcctcttcctgtcactagcccttcctcagcatccacaggtcacgccacccctcttcttgtcaccgacacttcctcagcatccacaggacacgccacccctcttcctgtcaccgacgcttcctcagtgtccacagatcacgccacctctcttcctgtaaccatcccttccgcagcatccacaggtcacaccacccctcttcctgtcaccgacacttcctcagcatccacaggtcaggccacctctcttcttgtcaccgacacttcctcagtatccacaggtgacaccacgcctcttcctgtcactagcacttcctcagcatccacaggtcacgtcactcctcttcatgtcaccagcccttcctcagcatccacaggtcacgccacccctcttcctgtcaccagcctttcctcagcatccacaggtgacaccatgcctcttcctgtcactagcccttcctcagcatccacaggtgacaccacccctcttcctgtcaccgacgcttcctcagtatccacaggtcacaccacccctcttcctgtcaccagcccttcctcagcatctacaggtcacaccacccctcttcctgtcaccgacacttcctcagcatccaaaggtgacaccacccctcttcctgtcaccagcccttcctcagcatctacaggtcacaccacccctcttcctgtcaccgacacttcctcagcatccacaggtgacaccacccctcttcctgtcaccaatgcttcctcattatccacaggtcacgccacccctcttcatgtcaccagcccttcctcagcatccacaggtcacgccacccctcttcctgtcaccagcacttcctcagcatccaccggtcacgccacccctcttcctgtcaccggcctttcctcagctaccacagatgacaccacccgtcttcctgtcaccgacgtttcctcggcatccacaggtcaggccacccctcttcctgtcaccagcctttcctcagtatccacaggtgacaccacgcctcttcctgtcactagcccttcctcagcatccacaggtcacgccagccctcttcttgtcactgacgcttcctcagcatccacaggtcaggccacccctcttcctgtcaccgacacttcctcagtatccacagctcacgccaccccacttcctgtcaccggcctttcttcagcttccacagatgacaccacccgtcttcctgtcaccgacgtttcctcggcatccacaggtcaggccatccctcttcctgtcaccagcccttcctcagcatccacaggtgacaccacccctcttcctgtcaccgacgcttcctcagcatccacaggtgacaccacctctcttcctgtcaccatcccttcctcagcatcttcaggtcacaccacctctcttcctgtcaccgacgcttcctcagtgtccacaggtcacgccacctctcttcttgtcaccgacgcttcctcagtatccacaggtgacaccacccctcttcctgtcaccgacactaactcagcatccacaggtgacaccacccctcttcatgtcaccgacgcttcctcagtatccacaggtcacgccacctctcttcctgtcaccagcctttcctcagcatccacaggtgacaccacgcctcttcctgtcactagcccttcctcagcatcctcaggtcacaccacccctcttcctgtcaccgacgcttcctcagtacccacaggtcacgccacctctcttcctgtcaccgacgcttcctcagtgtccacaggtcacgccacccctcttcctgtcaccgacgcttcctcagtgtccacaggtcatgccacccctcttccggtcaccgacacttcctcagtatctacaggacaggccacccctcttcctgtcaccagcctttcctcagcatccactggtgacaccacgccgcttcctgtcaccgatacttcctcagcatccacaggtcaggacacccctcttcctgtcaccagcctttcctcagtatccacaggtgacaccacgcctcttcctgtcactaacccttcctcagcatccacaggtcacgccacccctcttcttgtcaccgacgcttcctcaatatccacaggtcacgccacctctcttcttgtcaccgacgcttcctcagtatccacaggtcacgccaccgctcttcatgacaccgatgcttcctcattatccacaggggacaccacccctcttcctgtcaccagcccttcctcaacatccacaggtgacaccacccctcttcctgtcaccgaaacttcctcagtatccacaggtcacgccacctctcttcctgtcaccgacacttcctcagcatccacaggtcacgccacctctcttcctgtcaccgacacttcctcagcatccacaggtcacgccacccctcttcctgtcaccgacacttcctcagcatccacaggtcaggccacccctcttcctgtcaccagcccttcctcagcatccacaggtcacgccatccctcttcttgtcaccgacacttcctcagcatccacaggacaggccacccctcttcctgtcaccagcctttcctcagcatccacaggtgacaccacccctcttcctgtcaccgacgcttcctcagtgtccacaggtcacgccacctctcttcctgtcaccagcctttcctcagtatccacaggtgacaccactcctcttcctgtcactagcccttcctcagcatccacaggtcacgccacccctcttcatgtcaccgacgcttcctcagcatccacaggtcacgccacccctcttcctgtcaccagcctttcctcagcatccacaggtgacaccacgcctcttcctgtcactagcccttcctcagcatccacaggtcacgccacccctcttcatgtcaccgacgcttcctcagtatccacaggtgacaccacccctcttcctgtcaccagctcttcctcagcatcctcaggtcacaccacccctcttcctgtcaccgacgcttcctcagcatccacaggtgacaccacccctcttcctgtcaccgacacttcctcagcatccacaggtcacgccacccatcttcctgtcaccggcctttcctcagcttccacaggtgacaccacccgtcttcctgtcaccaacgtttcctcggcatccacaggtcatgccacccctcttcctgtcaccagcacttcctcagcatccacaggtgacaccacccctcttcctggcaccgacacttcctcagtatccacaggtcacaccacccctcttcttgtcaccgacgcttcgtcagtatccacaggtgacaccacccgtcttcctgtcaccagcccttcctcagcatctacaggtcacaccacccctctacctgtcaccgacactccctcagcatccacaggtgacaccacccctcttcctgtcaccaatgcttcctcattatccacacgtcacgccacctctcttcatgtcaccagcccttcctcagcatccacaggtcacgccacctctcttcctgtcaccgacacttccgcagcatccacaggtcacgccacccctcttcctgtcaccagcacttcctcagcatccacaggtgacaccacccctcttcctgtcaccgacacttactcagcatccacaggtcaggccacccctcttcctgtcaccagcctttcctcagtatccacaggtgacaccacgcctcttcctgtcactagcccttcctcagcatccacaggtcacgccactcctcttcttgtcaccgacgcttcctcagcatccacaggtcaggccacccctcttcctgtcaccagcctttcctcagtatccacaggtgacaccacgcctcttcctgtcactagcccttcctcagcatccaccggtcatgccacctctcttcctgtcaccgacacttcctcagcatccacaggtgacaccacctctcttcctgtcaccgacacttcctcagcatacacaggtgacaccacctctcttcctgtcaccgacacttcctcatcatccacaggtgacaccacccctcttcttgtcaccgagacttcctcagtatccacaggtgacaccacccctcttcctgtcaccgacacttcctcagcatccacaggtcacgccacccctcttcctgtcaccaacacttcctcagtatccacaggtcacgccacccctcttcatgtcaccagcccttcctcagcatccacaggtcacaccacccctcttcctgtcaccgacgcttcgtcagtgtccacaggtcacgccacctctcttcctgtcaccgacgcttcctcagtgttcacaggtcatgccacctctcttcctgtcaccatcccttcctcagcatcctcaggtcacaccacccctcttcctgtcaccgacgcttcctcagtgtccacaggtcacgccacctctcttcctgtcaccgacgcttcctcagtgtccacaggtcatgccacccctcttcctgtcaccgacgcttcctcagtgtccacaggtcacgctacccctcttcctctcaccagcctttcctcagtatccacaggtgacaccacgcctcttcctgtcaccgacacttcctcagcatccacaggtcaggccacccctcttcctgtcaccagcctttcctcagtatccacaggtgacaccacccctcttcctgtcaccgacacttcctcagcatccacaggtcacgccacctctcttcctgtcaccgacacttcctcagcatccacaggtcacgccacccctcttcctgacaccgacacttcctcagcatccacaggtcacgccacccttcttcctgtcaccgacacttcctcagcatccataggtcacgccacctctcttcctgtcaccgacacttcctcaatatccacaggtcacgccacccctcttcatgtcaccagcccttcctcagcatccaccggtcacgccaccccgcttcctgtcaccgacacttcctcagcatccacaggtcacgccaaccctcttcatgtcaccagcccttcctcagcatccaccggtcacgccaccccgcttcctgtcaccgacacttcctcagcatccacaggtcacgccacccctcttcctgtcaccagcctttcctcagtatccacaggtgacaccacgcctcttcctgtcactagcccttcctcagcatccacaggtcacaccacccctcttcctgtcaccgacacttcctcagcatccacaggtcaggccaccgctcttcctgtcaccagcacttcctcagcatccacaggtgacaccacccctcttcctgtcaccgacacttcctcagcatccacaggtcaggccacccctcttcctgtcaccagcctttcctcagtatccacaggtgacaccacgcctcttcctgtcactagcccttcctcagcatccacaggtcacgccactcctcttcttgtcaccgacgcttcctcagcatccacaggtcaggccacccctcttcctgtcaccagcctttcctcagtatccacaggtgacaccacgcctcttcctgtcactagcccttcctcagcatccaccggtcatgccacctctcttcctgtcaccgacacttcctcagcatccacaggtgacaccacctctcttcctgtcaccgacacttcctcagcatacacaggtgacaccacctctcttcctgtcaccgacacttcctcatcatccacaggtgacaccacccctcttcttgtcaccgagacttcctcagtatccacaggtcacgccactcctcttcttgtcaccgacgcttcctcagcatccacaggtcacgccacccctcttcatgtcaccagcccttcctcagcatccacaggtgacaccacccctgtgcctgtcaccgacacttcctcagtatccacaggtcacgccacccctcttcctgtcaccggcctttcctcagcttccacaggtgacaccacccgtcttcctgtcaccgacatttcctcggcatccacaggtcaggccacccctcttcctgtcaccaacacttcctcagtatccacaggtgacaccatgcctcttcctgtcactagcccttcctcagcatccacaggtcacgccacccctcttcctgtcaccagcacttcctcagcatccaccggtcacgccacccctgttcctgtcaccagcacttcctcagcatctacaggtcacaccacccctcttcctgtcaccgacacttcctcagcatccacaggtgacaccacccctcttcctgtcaccagcccttcctcagcatctacaggtcacaccacccctcttcatgtcaccatcccttcctcagcatccacaggtgacaccagcactcttcctgtcaccggcgcttcctcagcatccaccggtcacgccacccctcttcctgtcaccgacacttcctcagtatccaccggtcacgccacgcctcttcctgtcaccagcctttcctcagtatccacaggtgacaccacccctcttcctgtcaccgacgcttcctcggcatccacaggtcaggccacccctcttcctgtcaccagcctttcctcagtatccacaggtgacaccacccctcttcttgtcaccgacgcttcctcagtatccacaggtcacgccacccctcttcctgtcaccgacacttcctcagcatccacaggtgacaccacccgtcttcctgtcacggacacttcctcagcatccacaggtcaggccacccctcttcctgtcaccagcctttcctcagtatccacaggtgacaccacccctcttcttgtcaccgacgcttcctcagtatccacaggtcacgccacccctcttcctgtcaccgacacttcctcagcatccacaggtgacaccacccgtcttcctgtcacggacacttcctcagcatccacaggtcaggccacccctcttcctgtcaccatcccttcctcatcatcctcaggtcacaccacccctcttcctgtcaccagcacttcctcagtatctacaggtcacgtcacccctcttcatgtcaccagcccttcctcagcatccacaggtcacgtcacccctcttcctgtcaccagcacttcctcagcatccacaggtcacgccacccctcttcttgtcaccgacgcttcctcagtgtccacaggtcacgccacgcctcttcctgtcaccgacgcttcctcagcatccacaggtgacaccacccctcttcctgtcaccgacacttcctcagcatccacaggtcaggccacccctcttcctgtcaccagcctttcctcagtatccacaggtgacaccacccctcttcctgtcaccgacgcttcctcagcatccacaggtcacgccacccctcttcctgtcaccatcccttcctcagtatccacaggtgacaccatgcctcttcctgtcactagcccttcctcagcatccacaggtcacgccacccctcttcctgttaccggcctttcctcagcttccacaggtgacaccacccctcttcctgtcaccgacacttcctcagcatccacacgtcacgccacccctcttcctgtcaccgacacttcctcagcttccacagatgacaccacccgtcttcctgtcaccgacgtttcctcggcatccacaggacatgccacccctcttcctgtcaccagcacttcctcagcatccacaggtgacaccacccctcttcctgtcaccgacacttcctcagtatccacaggtcacgccacctctcttcctgtcaccagccgttcctcagcatccacaggtcacgccaccccccttcctgtcaccgacacttcctcagtatccacaggtcacgccacccctcttcctgtcaccagcacttcctcagtatctacaggtcacgccacccctcttcctgtcaccagcccttcctcagcatccacaggtcacgccacccctgttcctgtcaccagcacttcctcagcatccacaggtgacaccacccctcttcctgtcaccaatgcttcctcattatccacaggtcacgccacccctcttcatgtcaccagcccttcctcagcatccagaggtgacaccagcactcttcctgtcaccgatgcttcctcagcatccaccggtcacgccacccctcttcctctcaccagcctttcctcagtatccacaggtgacaccacgcctcttcctgtcaccgacacttcctctgcatccacaggtcaggccacccctcttcctgtcaccagcctttcctcagtatccacaggtgacaccacgcctcttcctgtcaccatcccttcctcagcatcctcaggtcacaccacctctcttcctgtcaccgacgcttcctcagtgtccacaggtcacggcacccctcttcctgtcaccagcacttcctcagcatccacaggtgacaccacccctcttcctgtcaccgacacttcctcagcatccacaggtcacgccacccctcttcctgtcaccgacacttcctcagcatccacaggtcacgccacccctcttcctgtcaccagcctttcctcagtatccacaggtcacgccacccctcttgctgtcagcagtgctacctcagcttccacagtatcctcggactcccctctgaagatggaaacaccaggaatgacaacaccgtcactgaagacagacggtgggagacgcacagccacatcaccaccccccacaacctcccagaccatcatttccaccattcccagcactgccatgcacacccgctccacagctgcccccatccccatcctgcctgagagaggagtttccctcttcccctatggggcaggcgccggggacctggagttcgtcaggaggaccgtggacttcacctccccactcttcaagccggcgactggcttcccccttggctcctctctccgtgattccctctacttcacagacaatggccagatcatcttcccagagtcagactaccagattttctcctaccccaacccactcccaacaggcttcacaggccgggaccctgtggccctggtggctccgttctgggacgatgctgacttctccactggtcgggggaccacattttatcaggaatacgagacgttctatggtgaacacagcctgctagtccagcaggccgagtcttggattagaaagatgacaaacaacgggggctacaaggccaggtgggccctaaaggtcacgtgggtcaatgcccacgcctatcctgcccagtggaccctcgggagcaacacctaccaagccatcctctccacggacgggagcaggtcctatgccctgtttctctaccagagcggtgggatgcagtgggacgtggcccagcgctcaggcaacccggtgctcatgggcttctctagtggagatggctatttcgaaaacagcccactgatgtcccagccagtgtgggagaggtatcgccctgatagattcctgaattccaactcaggcctccaagggctgcagttctacaggctacaccgggaagaaaggcccaactaccgtctcgagtgcctgcagtggctgaagagccagcctcggtggcccagctggggctggaaccaggtctcctgcccttgttcctggcagcagggacgacgggacttacgattccaacccgtcagcataggtcgctggggcctcggcagtaggcagctgtgcagcttcacctcttggcgaggaggcgtgtgctgcagctacgggccctggggagagtttcgtgaaggctggcacgtgcagcgtccttggcagttggcccaggaactggagccacagagctggtgctgccgctggaatgacaagccctacctctgtgccctgtaccagcagaggcggccccacgtgggctgtgctacatacaggcccccacagcccgcctggatgttcggggacccccacatcaccaccttggatggtgtcagttacaccttcaatgggctgggggacttcctgctggtcggggcccaagacgggaactcctccttcctgcttcagggccgcaccgcccagactggctcagcccaggccaccaacttcatcgcctttgcggctcagtaccgctccagcagcctgggccccgtcacggtccaatggctccttgagcctcacgacgcaatccgtgtcctgctggataaccagactgtgacatttcagcctgaccatgaagacggcggaggccaggagacgttcaacgccaccggagtcctcctgagccgcaacggctctgaggtctcggccagcttcgacggctgggccaccgtctcggtgatcgcgctctccaacatcctccacgcctccgccagcctcccgcccgagtaccagaaccgcacggaggggctcctgggggtctggaataacaatccagaggacgacttcaggatgcccaatggctccaccattcccccagggagccctgaggagatgcttttccactttggaatgacctggcagatcaacgggacaggcctccttggcaagaggaatgaccagctgccttccaacttcacccctgttttctactcacaactgcaaaaaaacagctcctgggctgaacatttgatctccaactgtgacggagatagctcatgcatctatgacaccctggccctgcgcaacgcaagcatcggacttcacacgagggaagtcagtaaaaactacgagcaggcgaacgccaccctcaatcagtacccgccctccatcaatggtggtcgtgtgattgaagcctacaaggggcagaccacgctgattcagtacaccagcaatgctgaggatgccaacttcacgctcagagacagctgcaccgacttggagctctttgagaatgggacgttgctgtggacacccaagtcgctggagccattcactctggagattctagcaagaagtgccaagattggcttggcatctgcactccagcccaggactgtggtctgccattgcaatgcagagagccagtgtttgtacaatcagaccagcagggtgggcaactcctccctggagctctggggagctctttcctgtgtcagaaccagtcctgccctgtgaattactgctacaatcaaggccactgctacatctcccagactctgggctgtcagcccatgtgcacctgccccccagccttcactgacagccgctgcttcctggctgggaacaacttcagtccaactgtcaacctagaacttcccttaagagtcatccagctcttgctcagtgaagaggaaaatgcctccatggcagaagtcaacgcctcggtggcatacagactggggaccctggacatgcgggcctttctccgcaacagccaagtggaacgaatcgattctgcagcaccggcctcgggaagccccatccaacactggatggtcatctcggagttccagtaccgccctcggggcccggtcattgacttcctgaacaaccagctgctggccgcggtggtggaggcgttcttataccacgttccacggaggagtgaggagcccaggaacgacgtggtcttccagcccatctccggggaagacgtgcgcgatgtgacagccctgaacgtgagcacgctgaaggcttacttcagatgcgatggctacaagggctacgacctggtctacagcccccagagcggcttcacctgcgtgtccccgtgcagtaggggctactgtgaccatggaggccagtgccagcacctgcccagtgggccccgctgcagctgtgtgtccttctccatctacacggcctggggcgagcactgtgagcacctgagcatgaaactcgacgcgttcttcggcatcttctttggggccctgggcggcctcttgctgctgggggtcgggacgttcgtggtcctgcgcttctggggttgctccggggccaggttctcctatttcctgaactcagctgaggccttgccttgaaggggcagctgtggcctaggctacctcaagactcacctcatccttaccgcacatttaaggcgccattgcttttgggagactggaaaagggaaggtgactgaaggctgtcaggattcttcaaggagaatgaatactgggaatcaagacaagactataccttatccataggcgcaggtgcacagggggaggccataaagatcaaacatgcatggatgggtcctcacgcagacacacccacagaaggacactagcctgtgcacgcgcgcgtgcacacacacacacacacacacgagttcataatgtggtgatggccctaagttaagcaaaatgcttctgcacacaaaactctctggtttacttcaaattaactctatttaaataaagtctctctgactttttgtgtctccaaaa

SEQ ID NO: 155657 - DNA, 16353 bp, Homo sapiens
  Payload ID: 10597
  Gene Symbol: MUC4
  Gene Name: mucin 4, cell surface associated
  ENST ID: ENST00000477086
  CDS Start-End: 73-13275
gtctgctcctcacactgcagctgctgggccgtggagcttccccagggagccagggggacttttgccgcagccatgaagggggcacgctggaggagggtcccctgggtgtccctgagctgcctgtgtctctgcctccttccgcatgtggtcccaggaaccacagaggacacattaataactggaagtaaaactgctgccccagtcacctcaacaggctcaacaacagcgacactagagggacaatcaactgcagcttcttcaaggacctctaatcaggacatatcagcttcatctcagaaccaccagactaagagcacggagaccaccagcaaagctcaaaccgacaccctcacgcagatgatgacatcaactcttttttcttccccaagtgtacacaatgtgatggagacagctcctccagatgaaatgaccacatcatttccctccagtgtcaccaacacactcatgatgacatcaaagactataacaatgacaacctccacagactccactcttggaaacacagaagagacatcaacagcaggaactgaaagttctaccccagtgacctcagcagtctcaataacagctggacaggaaggacaatcacgaacaacttcctggaggacctctatccaagacacatcagcttcttctcagaaccactggactcggagcacgcagaccaccagggaatctcaaaccagcaccctaacacacagaaccacttcaactccttctttctctccaagtgtacacaatgtgacagggactgtttctcagaagacatctccttcaggtgaaacagctacctcatccctctgtagtgtcacaaacacatccatgatgacatcagagaagataacagtgacaacctccacaggctccactcttggaaacccaggggagacatcatcagtacctgttactggaagtcttatgccagtcacctcagcagccttagtaacatttgatccagaaggacaatcaccagcaactttctcaaggacttctactcaggacacaacagctttttctaagaaccaccagactcagagcgtggagaccaccagagtatctcaaatcaacaccctcaacaccctcacaccggttacaacatcaactgttttatcctcaccaagtggattcaacccaagtggaacagtttctcaggagacattcccttctggtgaaacaaccacctcatccccttccagtgtcagcaatacattcctggtaacatcaaaggtgttcagaatgccaacctccagagactctactcttggaaacacagaggagacatcactatctgtaagtggaaccatttctgcaatcacttccaaagtttcaaccatatggtggtcagacactctgtcaacagcactctcccccagttctctacctccaaaaatatccacagctttccacacccagcagagtgaaggtgcagagaccacaggacggcctcatgagaggagctcattctctccaggtgtgtctcaagaaatatttactctacatgaaacaacaacatggccttcctcattctccagcaaaggccacacaacttggtcacaaacagaactgccctcaacatcaacaggtgctgccactaggcttgtcacaggaaatccatctacagggacagctggcactattccaagggtcccctctaaggtctcagcaataggggaaccaggagagcccaccacatactcctcccacagcacaactctcccaaaaacaacaggggcaggcgcccagacacaatggacacaagaaacggggaccactggagaggctcttctcagcagcccaagctacagtgtgactcagatgataaaaacggccacatccccatcttcttcacctatgctggatagacacacatcccaacaaattacaacggcaccatcaacaaatcattcaacaatacattccacaagcacctctcctcaggaatcaccagctgtttcccaaaggggtcacactcaagccccgcagaccacacaagaatcacaaaccacgaggtccgtctcccccatgactgacaccaagacagtcaccaccccaggttcttccttcacagccagtgggcactcgccctcagaaattgttcctcaggacgcacccaccataagtgcagcaacaacctttgccccagctcccaccggggatggtcacacaacccaggccccgaccacagcactgcaggcagcacccagcagccatgatgccaccctggggccctcaggaggcacgtcactttccaaaacaggtgcccttactctggccaactctgtagtgtcaacaccagggggcccagaaggacaatggacatcagcctctgccagcacctcacctgacacagcagcagccatgacccatacccaccaggctgagagcacagaggcctctggacaaacacagaccagcgaaccggcctcctcagggtcacgaaccacctcagcgggcacagctaccccttcctcatccggggcgagtggcacaacaccttcaggaagcgaaggaatatccacctcaggagagacgacaaggttttcatcaaacccctccagggacagtcacacaacccagtcaacaaccgaattgctgtccgcctcagccagtcatggtgccatcccagtaagcacaggaatggcgtcttcgatcgtccccggcacctttcatcccaccctctctgaggcctccactgcagggagaccgacaggacagtcaagcccaacttctcccagtgcctctcctcaggagacagccgccatttcccggatggcccagactcagaggacaagaaccagcagagggtctgacactatcagcctggcgtcccaggcaaccgacaccttctcaacagtcccacccacacctccatcgatcacatccactgggcttacatctccacaaaccgagacccacactctgtcaccttcagggtctggtaaaaccttcaccacggccctcatcagcaacgccacccctcttcctgtcacctacgcttcctcggcatccacaggtcacaccacccctcttcatgtcaccgatgcttcctcagtatccacaggtcacgccacccctcttcctgtcaccagcccttcctcagtatccacaggtcacaccacccctcttcctgtcaccgacacttcctcagaatccacaggtcacgtcacccctcttcctgtcaccagcttttcctcagcatccacaggtgacagcacccctcttcctgtcactgacacttcctcagcatccacaggtcacgtcacccctcttcctgtcaccagcctttcctcagcatccacaggtgacaccacccctcttcctgtcactgacacttcctcagcatccacaggtcacgccacctctcttcctgtcaccgacacttcctcagtatccacaggtcacaccacccctcttcctgtcaccgacacttcctcagcatccacaggtcacgccacctctcttcctgtcaccgacacttcctcagtatccacaggtcacaccacccctcttcatgtcactgatgcttcctcagcatccacaggtcaggccacccctcttcctgtcaccagcctttcctcagtatccacaggtgacaccacgcctcttcctgtcactagcccttcctcagcatccacaggtcacgccacccctcttcttgtcaccgacacttcctcagcatccacaggacacgccacccctcttcctgtcaccgacgcttcctcagtgtccacagatcacgccacctctcttcctgtaaccatcccttccgcagcatccacaggtcacaccacccctcttcctgtcaccgacacttcctcagcatccacaggtcaggccacctctcttcttgtcaccgacacttcctcagtatccacaggtgacaccacgcctcttcctgtcactagcacttcctcagcatccacaggtcacgtcactcctcttcatgtcaccagcccttcctcagcatccacaggtcacgccacccctcttcctgtcaccagcctttcctcagcatccacaggtgacaccatgcctcttcctgtcactagcccttcctcagcatccacaggtgacaccacccctcttcctgtcaccgacgcttcctcagtatccacaggtcacaccacccctcttcatgtcactgatgcttcctcagcatccacaggtcaggccacccctcttcctgtcaccagcctttcctcagtatccacaggtgacaccacgcctcttcctgtcactagcccttcctcagcatccacaggtcacgccacccctcttcttgtcaccgacacttcctcagcatccacaggacacgccacccctcttcctgtcaccgacgcttcctcagtgtccacagatcacgccacctctcttcctgtaaccatcccttccgcagcatccacaggtcacaccacccctcttcctgtcaccgacacttcctcagcatccacaggtcaggccacctctcttcttgtcaccgacacttcctcagtatccacaggtgacaccacgcctcttcctgtcactagcacttcctcagcatccacaggtcacgtcactcctcttcatgtcaccagcccttcctcagcatccacaggtcacgccacccctcttcctgtcaccagcctttcctcagcatccacaggtgacaccatgcctcttcctgtcactagcccttcctcagcatccacaggtgacaccacccctcttcctgtcaccgacgcttcctcagtatccacaggtcacaccacccctcttcctgtcaccagcccttcctcagcatctacaggtcacaccacccctcttcctgtcaccgacacttcctcagcatccaaaggtgacaccacccctcttcctgtcaccagcccttcctcagcatctacaggtcacaccacccctcttcctgtcaccgacacttcctcagcatccacaggtgacaccacccctcttcctgtcaccaatgcttcctcattatccacaggtcacgccacccctcttcatgtcaccagcccttcctcagcatccacaggtcacgccacccctcttcctgtcaccagcacttcctcagcatccaccggtcacgccacccctcttcctgtcaccggcctttcctcagctaccacagatgacaccacccgtcttcctgtcaccgacgtttcctcggcatccacaggtcaggccacccctcttcctgtcaccagcctttcctcagtatccacaggtgacaccacgcctcttcctgtcactagcccttcctcagcatccacaggtcacgccagccctcttcttgtcactgacgcttcctcagcatccacaggtcaggccacccctcttcctgtcaccgacacttcctcagtatccacagctcacgccaccccacttcctgtcaccggcctttcttcagcttccacagatgacaccacccgtcttcctgtcaccgacgtttcctcggcatccacaggtcaggccatccctcttcctgtcaccagcccttcctcagcatccacaggtgacaccacccctcttcctgtcaccgacgcttcctcagcatccacaggtgacaccacctctcttcctgtcaccatcccttcctcagcatcttcaggtcacaccacctctcttcctgtcaccgacgcttcctcagtgtccacaggtcacgccacctctcttcttgtcaccgacgcttcctcagtatccacaggtgacaccacccctcttcctgtcaccgacactaactcagcatccacaggtgacaccacccctcttcatgtcaccgacgcttcctcagtatccacaggtcacgccacctctcttcctgtcaccagcctttcctcagcatccacaggtgacaccacgcctcttcctgtcactagcccttcctcagcatcctcaggtcacaccacccctcttcctgtcaccgacgcttcctcagtacccacaggtcacgccacctctcttcctgtcaccgacgcttcctcagtgtccacaggtcacgccacccctcttcctgtcaccgacgcttcctcagtgtccacaggtcatgccacccctcttccggtcaccgacacttcctcagtatctacaggacaggccacccctcttcctgtcaccagcctttcctcagcatccactggtgacaccacgccgcttcctgtcaccgatacttcctcagcatccacaggtcaggacacccctcttcctgtcaccagcctttcctcagtatccacaggtgacaccacgcctcttcctgtcactaacccttcctcagcatccacaggtcacgccacccctcttcttgtcaccgacgcttcctcaatatccacaggtcacgccacctctcttcttgtcaccgacgcttcctcagtatccacaggtcacgccaccgctcttcatgacaccgatgcttcctcattatccacaggggacaccacccctcttcctgtcaccagcccttcctcaacatccacaggtgacaccacccctcttcctgtcaccgaaacttcctcagtatccacaggtcacgccacctctcttcctgtcaccgacacttcctcagcatccacaggtcacgccacctctcttcctgtcaccgacacttcctcagcatccacaggtcacgccacccctcttcctgtcaccgacacttcctcagcatccacaggtcaggccacccctcttcctgtcaccagcccttcctcagcatccacaggtcacgccatccctcttcttgtcaccgacacttcctcagcatccacaggacaggccacccctcttcctgtcaccagcctttcctcagcatccacaggtgacaccacccctcttcctgtcaccgacgcttcctcagtgtccacaggtcacgccacctctcttcctgtcaccagcctttcctcagtatccacaggtgacaccactcctcttcctgtcactagcccttcctcagcatccacaggtcacgccacccctcttcatgtcaccgacgcttcctcagcatccacaggtcacgccacccctcttcctgtcaccagcctttcctcagcatccacaggtgacaccacgcctcttcctgtcactagcccttcctcagcatccacaggtcacgccacccctcttcatgtcaccgacgcttcctcagtatccacaggtgacaccacccctcttcctgtcaccagctcttcctcagcatcctcaggtcacaccacccctcttcctgtcaccgacgcttcctcagcatccacaggtgacaccacccctcttcctgtcaccgacacttcctcagcatccacaggtcacgccacccatcttcctgtcaccggcctttcctcagcttccacaggtgacaccacccgtcttcctgtcaccaacgtttcctcggcatccacaggtcatgccacccctcttcctgtcaccagcacttcctcagcatccacaggtgacaccacccctcttcctggcaccgacacttcctcagtatccacaggtcacaccacccctcttcttgtcaccgacgcttcgtcagtatccacaggtgacaccacccgtcttcctgtcaccagcccttcctcagcatctacaggtcacaccacccctctacctgtcaccgacactccctcagcatccacaggtgacaccacccctcttcctgtcaccaatgcttcctcattatccacacgtcacgccacctctcttcatgtcaccagcccttcctcagcatccacaggtcacgccacctctcttcctgtcaccgacacttccgcagcatccacaggtcacgccacccctcttcctgtcaccagcacttcctcagcatccacaggtgacaccacccctcttcctgtcaccgacacttactcagcatccacaggtcaggccacccctcttcctgtcaccagcctttcctcagtatccacaggtgacaccacgcctcttcctgtcactagcccttcctcagcatccacaggtcacgccactcctcttcttgtcaccgacgcttcctcagcatccacaggtcaggccacccctcttcctgtcaccagcctttcctcagtatccacaggtgacaccacgcctcttcctgtcactagcccttcctcagcatccaccggtcatgccacctctcttcctgtcaccgacacttcctcagcatccacaggtgacaccacctctcttcctgtcaccgacacttcctcagcatacacaggtgacaccacctctcttcctgtcaccgacacttcctcatcatccacaggtgacaccacccctcttcttgtcaccgagacttcctcagtatccacaggtgacaccacccctcttcctgtcaccgacacttcctcagcatccacaggtcacgccacccctcttcctgtcaccaacacttcctcagtatccacaggtcacgccacccctcttcatgtcaccagcccttcctcagcatccacaggtcacaccacccctcttcctgtcaccgacgcttcgtcagtgtccacaggtcacgccacctctcttcctgtcaccgacgcttcctcagtgttcacaggtcatgccacctctcttcctgtcaccatcccttcctcagcatcctcaggtcacaccacccctcttcctgtcaccgacgcttcctcagtgtccacaggtcacgccacctctcttcctgtcaccgacgcttcctcagtgtccacaggtcatgccacccctcttcctgtcaccgacgcttcctcagtgtccacaggtcacgctacccctcttcctctcaccagcctttcctcagtatccacaggtgacaccacgcctcttcctgtcaccgacacttcctcagcatccacaggtcaggccacccctcttcctgtcaccagcctttcctcagtatccacaggtgacaccacccctcttcctgtcaccgacacttcctcagcatccacaggtcacgccacctctcttcctgtcaccgacacttcctcagcatccacaggtcacgccacccctcttcctgacaccgacacttcctcagcatccacaggtcacgccacccttcttcctgtcaccgacacttcctcagcatccataggtcacgccacctctcttcctgtcaccgacacttcctcaatatccacaggtcacgccacccctcttcatgtcaccagcccttcctcagcatccaccggtcacgccaccccgcttcctgtcaccgacacttcctcagcatccacaggtcacgccaaccctcttcatgtcaccagcccttcctcagcatccaccggtcacgccaccccgcttcctgtcaccgacacttcctcagcatccacaggtcacgccacccctcttcctgtcaccagcctttcctcagtatccacaggtgacaccacgcctcttcctgtcactagcccttcctcagcatccacaggtcacaccacccctcttcctgtcaccgacacttcctcagcatccacaggtcaggccaccgctcttcctgtcaccagcacttcctcagcatccacaggtgacaccacccctcttcctgtcaccgacacttcctcagcatccacaggtcaggccacccctcttcctgtcaccagcctttcctcagtatccacaggtgacaccacgcctcttcctgtcactagcccttcctcagcatccacaggtcacgccactcctcttcttgtcaccgacgcttcctcagcatccacaggtcaggccacccctcttcctgtcaccagcctttcctcagtatccacaggtgacaccacgcctcttcctgtcactagcccttcctcagcatccaccggtcatgccacctctcttcctgtcaccgacacttcctcagcatccacaggtgacaccacctctcttcctgtcaccgacacttcctcagcatacacaggtgacaccacctctcttcctgtcaccgacacttcctcatcatccacaggtgacaccacccctcttcttgtcaccgagacttcctcagtatccacaggtcacgccactcctcttcttgtcaccgacgcttcctcagcatccacaggtcacgccacccctcttcatgtcaccagcccttcctcagcatccacaggtgacaccacccctgtgcctgtcaccgacacttcctcagtatccacaggtcacgccacccctcttcctgtcaccggcctttcctcagcttccacaggtgacaccacccgtcttcctgtcaccgacatttcctcggcatccacaggtcaggccacccctcttcctgtcaccaacacttcctcagtatccacaggtgacaccatgcctcttcctgtcactagcccttcctcagcatccacaggtcacgccacccctcttcctgtcaccagcacttcctcagcatccaccggtcacgccacccctgttcctgtcaccagcacttcctcagcatctacaggtcacaccacccctcttcctgtcaccgacacttcctcagcatccacaggtgacaccacccctcttcctgtcaccagcccttcctcagcatctacaggtcacaccacccctcttcatgtcaccatcccttcctcagcatccacaggtgacaccagcactcttcctgtcaccggcgcttcctcagcatccaccggtcacgccacccctcttcctgtcaccgacacttcctcagtatccaccggtcacgccacgcctcttcctgtcaccagcctttcctcagtatccacaggtgacaccacccctcttcctgtcaccgacgcttcctcggcatccacaggtcaggccacccctcttcctgtcaccagcctttcctcagtatccacaggtgacaccacccctcttcttgtcaccgacgcttcctcagtatccacaggtcacgccacccctcttcctgtcaccgacacttcctcagcatccacaggtgacaccacccgtcttcctgtcacggacacttcctcagcatccacaggtcaggccacccctcttcctgtcaccagcctttcctcagtatccacaggtgacaccacccctcttcttgtcaccgacgcttcctcagtatccacaggtcacgccacccctcttcctgtcaccgacacttcctcagcatccacaggtgacaccacccgtcttcctgtcacggacacttcctcagcatccacaggtcaggccacccctcttcctgtcaccatcccttcctcatcatcctcaggtcacaccacccctcttcctgtcaccagcacttcctcagtatctacaggtcacgtcacccctcttcatgtcaccagcccttcctcagcatccacaggtcacgtcacccctcttcctgtcaccagcacttcctcagcatccacaggtcacgccacccctcttcttgtcaccgacgcttcctcagtgtccacaggtcacgccacgcctcttcctgtcaccgacgcttcctcagcatccacaggtgacaccacccctcttcctgtcaccgacacttcctcagcatccacaggtcaggccacccctcttcctgtcaccagcctttcctcagtatccacaggtgacaccacccctcttcctgtcaccgacgcttcctcagcatccacaggtcacgccacccctcttcctgtcaccatcccttcctcagtatccacaggtgacaccatgcctcttcctgtcactagcccttcctcagcatccacaggtcacgccacccctcttcctgttaccggcctttcctcagcttccacaggtgacaccacccctcttcctgtcaccgacacttcctcagcatccacacgtcacgccacccctcttcctgtcaccgacacttcctcagcttccacagatgacaccacccgtcttcctgtcaccgacgtttcctcggcatccacaggacatgccacccctcttcctgtcaccagcacttcctcagcatccacaggtgacaccacccctcttcctgtcaccgacacttcctcagtatccacaggtcacgccacctctcttcctgtcaccagccgttcctcagcatccacaggtcacgccaccccccttcctgtcaccgacacttcctcagtatccacaggtcacgccacccctcttcctgtcaccagcacttcctcagtatctacaggtcacgccacccctcttcctgtcaccagcccttcctcagcatccacaggtcacgccacccctgttcctgtcaccagcacttcctcagcatccacaggtgacaccacccctcttcctgtcaccaatgcttcctcattatccacaggtcacgccacccctcttcatgtcaccagcccttcctcagcatccagaggtgacaccagcactcttcctgtcaccgatgcttcctcagcatccaccggtcacgccacccctcttcctctcaccagcctttcctcagtatccacaggtgacaccacgcctcttcctgtcaccgacacttcctctgcatccacaggtcaggccacccctcttcctgtcaccagcctttcctcagtatccacaggtgacaccacgcctcttcctgtcaccatcccttcctcagcatcctcaggtcacaccacctctcttcctgtcaccgacgcttcctcagtgtccacaggtcacggcacccctcttcctgtcaccagcacttcctcagcatccacaggtgacaccacccctcttcctgtcaccgacacttcctcagcatccacaggtcacgccacccctcttcctgtcaccgacacttcctcagcatccacaggtcacgccacccctcttcctgtcaccagcctttcctcagtatccacaggtcacgccacccctcttgctgtcagcagtgctacctcagcttccacagtatcctcggactcccctctgaagatggaaacaccaggaatgacaacaccgtcactgaagacagacggtgggagacgcacagccacatcaccaccccccacaacctcccagaccatcatttccaccattcccagcactgccatgcacacccgctccacagctgcccccatccccatcctgcctgagagaggagtttccctcttcccctatggggcaggcgccggggacctggagttcgtcaggaggaccgtggacttcacctccccactcttcaagccggcgactggcttcccccttggctcctctctccgtgattccctctacgcttcacaggccgggaccctgtggccctggtggctccgttctgggacgatgctgacttctccactggtcgggggaccacattttatcaggaatacgagacgttctatggtgaacacagcctgctagtccagcaggccgagtcttggattagaaagatgacaaacaacgggggctacaaggccaggtgggccctaaaggtcacgtgggtcaatgcccacgcctatcctgcccagtggaccctcgggagcaacacctaccaagccatcctctccacggacgggagcaggtcctatgccctgtttctctaccagagcggtgggatgcagtgggacgtggcccagcgctcaggcaacccggtgctcatgggcttctctagtggagatggctatttcgaaaacagcccactgatgtcccagccagtgtgggagaggtatcgccctgatagattcctgaattccaactcaggcctccaagggctgcagttctacaggctacaccgggaagaaaggcccaactaccgtctcgagtgcctgcagtggctgaagagccagcctcggtggcccagctggggctggaaccaggtctcctgcccttgttcctggcagcagggacgacgggacttacgattccaacccgtcagcataggtcgctggggcctcggcagtaggcagctgtgcagcttcacctcttggcgaggaggcgtgtgctgcagctacgggccctggggagagtttcgtgaaggctggcacgtgcagcgtccttggcagttggcccaggaactggagccacagagctggtgctgccgctggaatgacaagccctacctctgtgccctgtaccagcagaggcggccccacgtgggctgtgctacatacaggcccccacagcccgcctggatgttcggggacccccacatcaccaccttggatggtgtcagttacaccttcaatgggctgggggacttcctgctggtcggggcccaagacgggaactcctccttcctgcttcagggccgcaccgcccagactggctcagcccaggccaccaacttcatcgcctttgcggctcagtaccgctccagcagcctgggccccgtcacggtccaatggctccttgagcctcacgacgcaatccgtgtcctgctggataaccagactgtgacatttcagcctgaccatgaagacggcggaggccaggagacgttcaacgccaccggagtcctcctgagccgcaacggctctgaggtctcggccagcttcgacggctgggccaccgtctcggtgatcgcgctctccaacatcctccacgcctccgccagcctcccgcccgagtaccagaaccgcacggaggggctcctgggggtctggaataacaatccagaggacgacttcaggatgcccaatggctccaccattcccccagggagccctgaggagatgcttttccactttggaatgacctggcagatcaacgggacaggcctccttggcaagaggaatgaccagctgccttccaacttcacccctgttttctactcacaactgcaaaaaaacagctcctgggctgaacatttgatctccaactgtgacggagatagctcatgcatctatgacaccctggccctgcgcaacgcaagcatcggacttcacacgagggaagtcagtaaaaactacgagcaggcgaacgccaccctcaatcagtacccgccctccatcaatggtggtcgtgtgattgaagcctacaaggggcagaccacgctgattcagtacaccagcaatgctgaggatgccaacttcacgctcagagacagctgcaccgacttggagctctttgagaatgggacgttgctgtggacacccaagtcgctggagccattcactctggagattctagcaagaagtgccaagattggcttggcatctgcactccagcccaggactgtggtctgccattgcaatgcagagagccagtgtttgtacaatcagaccagcagggtgggcaactcctccctggaggtggctggctgcaagtgtgacgggggcaccttcggccgctactgcgagggctccgaggatgcctgtgaggagccgtgcttcccgagtgtccactgcgttcctgggaagggctgcgaggcctgccctccaaacctgactggggatgggcggcactgtgcggctctggggagctctttcctgtgtcagaaccagtcctgccctgtgaattactgctacaatcaaggccactgctacatctcccagactctgggctgtcagcccatgtgcacctgccccccagccttcactgacagccgctgcttcctggctgggaacaacttcagtccaactgtcaacctagaacttcccttaagagtcatccagctcttgctcagtgaagaggaaaatgcctccatggcagaagtcaacgcctcggtggcatacagactggggaccctggacatgcgggcctttctccgcaacagccaagtggaacgaatcgattctgcagcaccggcctcgggaagccccatccaacactggatggtcatctcggagttccagtaccgccctcggggcccggtcattgacttcctgaacaaccagctgctggccgcggtggtggaggcgttcttataccacgttccacggaggagtgaggagcccaggaacgacgtggtcttccagcccatctccggggaagacgtgcgcgatgtgacagccctgaacgtgagcacgctgaaggcttacttcagatgcgatggctacaagggctacgacctggtctacagcccccagagcggcttcacctgcgtgtccccgtgcagtaggggctactgtgaccatggaggccagtgccagcacctgcccagtgggccccgctgcagctgtgtgtccttctccatctacacggcctggggcgagcactgtgagcacctgagcatgaaactcgacgcgttcttcggcatcttctttggggccctgggcggcctcttgctgctgggggtcgggacgttcgtggtcctgcgcttctggggttgctccggggccaggttctcctatttcctgaactcagctgaggccttgccttgaaggggcagctgtggcctaggctacctcaagactcacctcatccttaccgcacatttaaggcgccattgcttttgggagactggaaaagggaaggtgactgaaggctgtcaggattctt

SEQ ID NO: 155658 - DNA, 16273 bp, Homo sapiens
  Payload ID: 10597
  Gene Symbol: MUC4
  Gene Name: mucin 4, cell surface associated
  ENST ID: ENST00000475231
  CDS Start-End: 73-16155
gtctgctcctcacactgcagctgctgggccgtggagcttccccagggagccagggggacttttgccgcagccatgaagggggcacgctggaggagggtcccctgggtgtccctgagctgcctgtgtctctgcctccttccgcatgtggtcccaggaaccacagaggacacattaataactggaagtaaaactgctgccccagtcacctcaacaggctcaacaacagcgacactagagggacaatcaactgcagcttcttcaaggacctctaatcaggacatatcagcttcatctcagaaccaccagactaagagcacggagaccaccagcaaagctcaaaccgacaccctcacgcagatgatgacatcaactcttttttcttccccaagtgtacacaatgtgatggagacagctcctccagatgaaatgaccacatcatttccctccagtgtcaccaacacactcatgatgacatcaaagactataacaatgacaacctccacagactccactcttggaaacacagaagagacatcaacagcaggaactgaaagttctaccccagtgacctcagcagtctcaataacagctggacaggaaggacaatcacgaacaacttcctggaggacctctatccaagacacatcagcttcttctcagaaccactggactcggagcacgcagaccaccagggaatctcaaaccagcaccctaacacacagaaccacttcaactccttctttctctccaagtgtacacaatgtgacagggactgtttctcagaagacatctccttcaggtgaaacagctacctcatccctctgtagtgtcacaaacacatccatgatgacatcagagaagataacagtgacaacctccacaggctccactcttggaaacccaggggagacatcatcagtacctgttactggaagtcttatgccagtcacctcagcagccttagtaacatttgatccagaaggacaatcaccagcaactttctcaaggacttctactcaggacacaacagctttttctaagaaccaccagactcagagcgtggagaccaccagagtatctcaaatcaacaccctcaacaccctcacaccggttacaacatcaactgttttatcctcaccaagtggattcaacccaagtggaacagtttctcaggagacattcccttctggtgaaacaaccacctcatccccttccagtgtcagcaatacattcctggtaacatcaaaggtgttcagaatgccaacctccagagactctactcttggaaacacagaggagacatcactatctgtaagtggaaccatttctgcaatcacttccaaagtttcaaccatatggtggtcagacactctgtcaacagcactctcccccagttctctacctccaaaaatatccacagctttccacacccagcagagtgaaggtgcagagaccacaggacggcctcatgagaggagctcattctctccaggtgtgtctcaagaaatatttactctacatgaaacaacaacatggccttcctcattctccagcaaaggccacacaacttggtcacaaacagaactgccctcaacatcaacaggtgctgccactaggcttgtcacaggaaatccatctacagggacagctggcactattccaagggtcccctctaaggtctcagcaataggggaaccaggagagcccaccacatactcctcccacagcacaactctcccaaaaacaacaggggcaggcgcccagacacaatggacacaagaaacggggaccactggagaggctcttctcagcagcccaagctacagtgtgactcagatgataaaaacggccacatccccatcttcttcacctatgctggatagacacacatcccaacaaattacaacggcaccatcaacaaatcattcaacaatacattccacaagcacctctcctcaggaatcaccagctgtttcccaaaggggtcacactcaagccccgcagaccacacaagaatcacaaaccacgaggtccgtctcccccatgactgacaccaagacagtcaccaccccaggttcttccttcacagccagtgggcactcgccctcagaaattgttcctcaggacgcacccaccataagtgcagcaacaacctttgccccagctcccaccggggatggtcacacaacccaggccccgaccacagcactgcaggcagcacccagcagccatgatgccaccctggggccctcaggaggcacgtcactttccaaaacaggtgcccttactctggccaactctgtagtgtcaacaccagggggcccagaaggacaatggacatcagcctctgccagcacctcacctgacacagcagcagccatgacccatacccaccaggctgagagcacagaggcctctggacaaacacagaccagcgaaccggcctcctcagggtcacgaaccacctcagcgggcacagctaccccttcctcatccggggcgagtggcacaacaccttcaggaagcgaaggaatatccacctcaggagagacgacaaggttttcatcaaacccctccagggacagtcacacaacccagtcaacaaccgaattgctgtccgcctcagccagtcatggtgccatcccagtaagcacaggaatggcgtcttcgatcgtccccggcacctttcatcccaccctctctgaggcctccactgcagggagaccgacaggacagtcaagcccaacttctcccagtgcctctcctcaggagacagccgccatttcccggatggcccagactcagaggacaagaaccagcagagggtctgacactatcagcctggcgtcccaggcaaccgacaccttctcaacagtcccacccacacctccatcgatcacatccactgggcttacatctccacaaaccgagacccacactctgtcaccttcagggtctggtaaaaccttcaccacggccctcatcagcaacgccacccctcttcctgtcacctacgcttcctcggcatccacaggtcacaccacccctcttcatgtcaccgatgcttcctcagtatccacaggtcacgccacccctcttcctgtcaccagcccttcctcagtatccacaggtcacaccacccctcttcctgtcaccgacacttcctcagaatccacaggtcacgtcacccctcttcctgtcaccagcttttcctcagcatccacaggtgacagcacccctcttcctgtcactgacacttcctcagcatccacaggtcacgtcacccctcttcctgtcaccagcctttcctcagcatccacaggtgacaccacccctcttcctgtcactgacacttcctcagcatccacaggtcacgccacctctcttcctgtcaccgacacttcctcagtatccacaggtcacaccacccctcttcctgtcaccgacacttcctcagcatccacaggtcacgccacctctcttcctgtcaccgacacttcctcagtatccacaggtcacaccacccctcttcatgtcactgatgcttcctcagcatccacaggtcaggccacccctcttcctgtcaccagcctttcctcagtatccacaggtgacaccacgcctcttcctgtcactagcccttcctcagcatccacaggtcacgccacccctcttcttgtcaccgacacttcctcagcatccacaggacacgccacccctcttcctgtcaccgacgcttcctcagtgtccacagatcacgccacctctcttcctgtaaccatcccttccgcagcatccacaggtcacaccacccctcttcctgtcaccgacacttcctcagcatccacaggtcaggccacctctcttcttgtcaccgacacttcctcagtatccacaggtgacaccacgcctcttcctgtcactagcacttcctcagcatccacaggtcacgtcactcctcttcatgtcaccagcccttcctcagcatccacaggtcacgccacccctcttcctgtcaccagcctttcctcagcatccacaggtgacaccatgcctcttcctgtcactagcccttcctcagcatccacaggtgacaccacccctcttcctgtcaccgacgcttcctcagtatccacaggtcacaccacccctcttcatgtcactgatgcttcctcagcatccacaggtcaggccacccctcttcctgtcaccagcctttcctcagtatccacaggtgacaccacgcctcttcctgtcactagcccttcctcagcatccacaggtcacgccacccctcttcttgtcaccgacacttcctcagcatccacaggacacgccacccctcttcctgtcaccgacgcttcctcagtgtccacagatcacgccacctctcttcctgtaaccatcccttccgcagcatccacaggtcacaccacccctcttcctgtcaccgacacttcctcagcatccacaggtcaggccacctctcttcttgtcaccgacacttcctcagtatccacaggtgacaccacgcctcttcctgtcactagcacttcctcagcatccacaggtcacgtcactcctcttcatgtcaccagcccttcctcagcatccacaggtcacgccacccctcttcctgtcaccagcctttcctcagcatccacaggtgacaccatgcctcttcctgtcactagcccttcctcagcatccacaggtgacaccacccctcttcctgtcaccgacgcttcctcagtatccacaggtcacaccacccctcttcctgtcaccagcccttcctcagcatctacaggtcacaccacccctcttcctgtcaccgacacttcctcagcatccaaaggtgacaccacccctcttcctgtcaccagcccttcctcagcatctacaggtcacaccacccctcttcctgtcaccgacacttcctcagcatccacaggtgacaccacccctcttcctgtcaccaatgcttcctcattatccacaggtcacgccacccctcttcatgtcaccagcccttcctcagcatccacaggtcacgccacccctcttcctgtcaccagcacttcctcagcatccaccggtcacgccacccctcttcctgtcaccggcctttcctcagctaccacagatgacaccacccgtcttcctgtcaccgacgtttcctcggcatccacaggtcaggccacccctcttcctgtcaccagcctttcctcagtatccacaggtgacaccacgcctcttcctgtcactagcccttcctcagcatccacaggtcacgccagccctcttcttgtcactgacgcttcctcagcatccacaggtcaggccacccctcttcctgtcaccgacacttcctcagtatccacagctcacgccaccccacttcctgtcaccggcctttcttcagcttccacagatgacaccacccgtcttcctgtcaccgacgtttcctcggcatccacaggtcaggccatccctcttcctgtcaccagcccttcctcagcatccacaggtgacaccacccctcttcctgtcaccgacgcttcctcagcatccacaggtgacaccacctctcttcctgtcaccatcccttcctcagcatcttcaggtcacaccacctctcttcctgtcaccgacgcttcctcagtgtccacaggtcacgccacctctcttcttgtcaccgacgcttcctcagtatccacaggtgacaccacccctcttcctgtcaccgacactaactcagcatccacaggtgacaccacccctcttcatgtcaccgacgcttcctcagtatccacaggtcacgccacctctcttcctgtcaccagcctttcctcagcatccacaggtgacaccacgcctcttcctgtcactagcccttcctcagcatcctcaggtcacaccacccctcttcctgtcaccgacgcttcctcagtacccacaggtcacgccacctctcttcctgtcaccgacgcttcctcagtgtccacaggtcacgccacccctcttcctgtcaccgacgcttcctcagtgtccacaggtcatgccacccctcttccggtcaccgacacttcctcagtatctacaggacaggccacccctcttcctgtcaccagcctttcctcagcatccactggtgacaccacgccgcttcctgtcaccgatacttcctcagcatccacaggtcaggacacccctcttcctgtcaccagcctttcctcagtatccacaggtgacaccacgcctcttcctgtcactaacccttcctcagcatccacaggtcacgccacccctcttcttgtcaccgacgcttcctcaatatccacaggtcacgccacctctcttcttgtcaccgacgcttcctcagtatccacaggtcacgccaccgctcttcatgacaccgatgcttcctcattatccacaggggacaccacccctcttcctgtcaccagcccttcctcaacatccacaggtgacaccacccctcttcctgtcaccgaaacttcctcagtatccacaggtcacgccacctctcttcctgtcaccgacacttcctcagcatccacaggtcacgccacctctcttcctgtcaccgacacttcctcagcatccacaggtcacgccacccctcttcctgtcaccgacacttcctcagcatccacaggtcaggccacccctcttcctgtcaccagcccttcctcagcatccacaggtcacgccatccctcttcttgtcaccgacacttcctcagcatccacaggacaggccacccctcttcctgtcaccagcctttcctcagcatccacaggtgacaccacccctcttcctgtcaccgacgcttcctcagtgtccacaggtcacgccacctctcttcctgtcaccagcctttcctcagtatccacaggtgacaccactcctcttcctgtcactagcccttcctcagcatccacaggtcacgccacccctcttcatgtcaccgacgcttcctcagcatccacaggtcacgccacccctcttcctgtcaccagcctttcctcagcatccacaggtgacaccacgcctcttcctgtcactagcccttcctcagcatccacaggtcacgccacccctcttcatgtcaccgacgcttcctcagtatccacaggtgacaccacccctcttcctgtcaccagctcttcctcagcatcctcaggtcacaccacccctcttcctgtcaccgacgcttcctcagcatccacaggtgacaccacccctcttcctgtcaccgacacttcctcagcatccacaggtcacgccacccatcttcctgtcaccggcctttcctcagcttccacaggtgacaccacccgtcttcctgtcaccaacgtttcctcggcatccacaggtcatgccacccctcttcctgtcaccagcacttcctcagcatccacaggtgacaccacccctcttcctggcaccgacacttcctcagtatccacaggtcacaccacccctcttcttgtcaccgacgcttcgtcagtatccacaggtgacaccacccgtcttcctgtcaccagcccttcctcagcatctacaggtcacaccacccctctacctgtcaccgacactccctcagcatccacaggtgacaccacccctcttcctgtcaccaatgcttcctcattatccacacgtcacgccacctctcttcatgtcaccagcccttcctcagcatccacaggtcacgccacctctcttcctgtcaccgacacttccgcagcatccacaggtcacgccacccctcttcctgtcaccagcacttcctcagcatccacaggtgacaccacccctcttcctgtcaccgacacttactcagcatccacaggtcaggccacccctcttcctgtcaccagcctttcctcagtatccacaggtgacaccacgcctcttcctgtcactagcccttcctcagcatccacaggtcacgccactcctcttcttgtcaccgacgcttcctcagcatccacaggtcaggccacccctcttcctgtcaccagcctttcctcagtatccacaggtgacaccacgcctcttcctgtcactagcccttcctcagcatccaccggtcatgccacctctcttcctgtcaccgacacttcctcagcatccacaggtgacaccacctctcttcctgtcaccgacacttcctcagcatacacaggtgacaccacctctcttcctgtcaccgacacttcctcatcatccacaggtgacaccacccctcttcttgtcaccgagacttcctcagtatccacaggtgacaccacccctcttcctgtcaccgacacttcctcagcatccacaggtcacgccacccctcttcctgtcaccaacacttcctcagtatccacaggtcacgccacccctcttcatgtcaccagcccttcctcagcatccacaggtcacaccacccctcttcctgtcaccgacgcttcgtcagtgtccacaggtcacgccacctctcttcctgtcaccgacgcttcctcagtgttcacaggtcatgccacctctcttcctgtcaccatcccttcctcagcatcctcaggtcacaccacccctcttcctgtcaccgacgcttcctcagtgtccacaggtcacgccacctctcttcctgtcaccgacgcttcctcagtgtccacaggtcatgccacccctcttcctgtcaccgacgcttcctcagtgtccacaggtcacgctacccctcttcctctcaccagcctttcctcagtatccacaggtgacaccacgcctcttcctgtcaccgacacttcctcagcatccacaggtcaggccacccctcttcctgtcaccagcctttcctcagtatccacaggtgacaccacccctcttcctgtcaccgacacttcctcagcatccacaggtcacgccacctctcttcctgtcaccgacacttcctcagcatccacaggtcacgccacccctcttcctgacaccgacacttcctcagcatccacaggtcacgccacccttcttcctgtcaccgacacttcctcagcatccataggtcacgccacctctcttcctgtcaccgacacttcctcaatatccacaggtcacgccacccctcttcatgtcaccagcccttcctcagcatccaccggtcacgccaccccgcttcctgtcaccgacacttcctcagcatccacaggtcacgccaaccctcttcatgtcaccagcccttcctcagcatccaccggtcacgccaccccgcttcctgtcaccgacacttcctcagcatccacaggtcacgccacccctcttcctgtcaccagcctttcctcagtatccacaggtgacaccacgcctcttcctgtcactagcccttcctcagcatccacaggtcacaccacccctcttcctgtcaccgacacttcctcagcatccacaggtcaggccaccgctcttcctgtcaccagcacttcctcagcatccacaggtgacaccacccctcttcctgtcaccgacacttcctcagcatccacaggtcaggccacccctcttcctgtcaccagcctttcctcagtatccacaggtgacaccacgcctcttcctgtcactagcccttcctcagcatccacaggtcacgccactcctcttcttgtcaccgacgcttcctcagcatccacaggtcaggccacccctcttcctgtcaccagcctttcctcagtatccacaggtgacaccacgcctcttcctgtcactagcccttcctcagcatccaccggtcatgccacctctcttcctgtcaccgacacttcctcagcatccacaggtgacaccacctctcttcctgtcaccgacacttcctcagcatacacaggtgacaccacctctcttcctgtcaccgacacttcctcatcatccacaggtgacaccacccctcttcttgtcaccgagacttcctcagtatccacaggtcacgccactcctcttcttgtcaccgacgcttcctcagcatccacaggtcacgccacccctcttcatgtcaccagcccttcctcagcatccacaggtgacaccacccctgtgcctgtcaccgacacttcctcagtatccacaggtcacgccacccctcttcctgtcaccggcctttcctcagcttccacaggtgacaccacccgtcttcctgtcaccgacatttcctcggcatccacaggtcaggccacccctcttcctgtcaccaacacttcctcagtatccacaggtgacaccatgcctcttcctgtcactagcccttcctcagcatccacaggtcacgccacccctcttcctgtcaccagcacttcctcagcatccaccggtcacgccacccctgttcctgtcaccagcacttcctcagcatctacaggtcacaccacccctcttcctgtcaccgacacttcctcagcatccacaggtgacaccacccctcttcctgtcaccagcccttcctcagcatctacaggtcacaccacccctcttcatgtcaccatcccttcctcagcatccacaggtgacaccagcactcttcctgtcaccggcgcttcctcagcatccaccggtcacgccacccctcttcctgtcaccgacacttcctcagtatccaccggtcacgccacgcctcttcctgtcaccagcctttcctcagtatccacaggtgacaccacccctcttcctgtcaccgacgcttcctcggcatccacaggtcaggccacccctcttcctgtcaccagcctttcctcagtatccacaggtgacaccacccctcttcttgtcaccgacgcttcctcagtatccacaggtcacgccacccctcttcctgtcaccgacacttcctcagcatccacaggtgacaccacccgtcttcctgtcacggacacttcctcagcatccacaggtcaggccacccctcttcctgtcaccagcctttcctcagtatccacaggtgacaccacccctcttcttgtcaccgacgcttcctcagtatccacaggtcacgccacccctcttcctgtcaccgacacttcctcagcatccacaggtgacaccacccgtcttcctgtcacggacacttcctcagcatccacaggtcaggccacccctcttcctgtcaccatcccttcctcatcatcctcaggtcacaccacccctcttcctgtcaccagcacttcctcagtatctacaggtcacgtcacccctcttcatgtcaccagcccttcctcagcatccacaggtcacgtcacccctcttcctgtcaccagcacttcctcagcatccacaggtcacgccacccctcttcttgtcaccgacgcttcctcagtgtccacaggtcacgccacgcctcttcctgtcaccgacgcttcctcagcatccacaggtgacaccacccctcttcctgtcaccgacacttcctcagcatccacaggtcaggccacccctcttcctgtcaccagcctttcctcagtatccacaggtgacaccacccctcttcctgtcaccgacgcttcctcagcatccacaggtcacgccacccctcttcctgtcaccatcccttcctcagtatccacaggtgacaccatgcctcttcctgtcactagcccttcctcagcatccacaggtcacgccacccctcttcctgttaccggcctttcctcagcttccacaggtgacaccacccctcttcctgtcaccgacacttcctcagcatccacacgtcacgccacccctcttcctgtcaccgacacttcctcagcttccacagatgacaccacccgtcttcctgtcaccgacgtttcctcggcatccacaggacatgccacccctcttcctgtcaccagcacttcctcagcatccacaggtgacaccacccctcttcctgtcaccgacacttcctcagtatccacaggtcacgccacctctcttcctgtcaccagccgttcctcagcatccacaggtcacgccaccccccttcctgtcaccgacacttcctcagtatccacaggtcacgccacccctcttcctgtcaccagcacttcctcagtatctacaggtcacgccacccctcttcctgtcaccagcccttcctcagcatccacaggtcacgccacccctgttcctgtcaccagcacttcctcagcatccacaggtgacaccacccctcttcctgtcaccaatgcttcctcattatccacaggtcacgccacccctcttcatgtcaccagcccttcctcagcatccagaggtgacaccagcactcttcctgtcaccgatgcttcctcagcatccaccggtcacgccacccctcttcctctcaccagcctttcctcagtatccacaggtgacaccacgcctcttcctgtcaccgacacttcctctgcatccacaggtcaggccacccctcttcctgtcaccagcctttcctcagtatccacaggtgacaccacgcctcttcctgtcaccatcccttcctcagcatcctcaggtcacaccacctctcttcctgtcaccgacgcttcctcagtgtccacaggtcacggcacccctcttcctgtcaccagcacttcctcagcatccacaggtgacaccacccctcttcctgtcaccgacacttcctcagcatccacaggtcacgccacccctcttcctgtcaccgacacttcctcagcatccacaggtcacgccacccctcttcctgtcaccagcctttcctcagtatccacaggtcacgccacccctcttgctgtcagcagtgctacctcagcttccacagtatcctcggactcccctctgaagatggaaacaccaggaatgacaacaccgtcactgaagacagacggtgggagacgcacagccacatcaccaccccccacaacctcccagaccatcatttccaccattcccagcactgccatgcacacccgctccacagctgcccccatccccatcctgcctgagagaggagtttccctcttcccctatggggcaggcgccggggacctggagttcgtcaggaggaccgtggacttcacctccccactcttcaagccggcgactggcttcccccttggctcctctctccgtgattccctctacttcacagacaatggccagatcatcttcccagagtcagactaccagattttctcctaccccaacccactcccaacaggcttcacaggccgggaccctgtggccctggtggctccgttctgggacgatgctgacttctccactggtcgggggaccacattttatcagagcaacacctaccaagccatcctctccacggacgggagcaggtcctatgccctgtttctctaccagagcggtgggatgcagtgggacgtggcccagcgctcaggcaacccggtgctcatgggcttctctagtggagatggctatttcgaaaacagcccactgatgtcccagccagtgtgggagaggtatcgccctgatagattcctgaattccaactcaggcctccaagggctgcagttctacaggctacaccgggaagaaaggcccaactaccgtctcgagtgcctgcagtggctgaagagccagcctcggtggcccagctggggctggaaccaggtctcctgcccttgttcctggcagcagggacgacgggacttacgattccaacccgtcagcataggtcgctggggcctcggcagtaggcagctgtgcagcttcacctcttggcgaggaggcgtgtgctgcagctacgggccctggggagagtttcgtgaaggctggcacgtgcagcgtccttggcagttggcccaggaactggagccacagagctggtgctgccgctggaatgacaagccctacctctgtgccctgtaccagcagaggcggccccacgtgggctgtgctacatacaggcccccacagcccgcctggatgttcggggacccccacatcaccaccttggatggtgtcagttacaccttcaatgggctgggggacttcctgctggtcggggcccaagacgggaactcctccttcctgcttcagggccgcaccgcccagactggctcagcccaggccaccaacttcatcgcctttgcggctcagtaccgctccagcagcctgggccccgtcacggtccaatggctccttgagcctcacgacgcaatccgtgtcctgctggataaccagactgtgacatttcagcctgaccatgaagacggcggaggccaggagacgttcaacgccaccggagtcctcctgagccgcaacggctctgaggtctcggccagcttcgacggctgggccaccgtctcggtgatcgcgctctccaacatcctccacgcctccgccagcctcccgcccgagtaccagaaccgcacggaggggctcctgggggtctggaataacaatccagaggacgacttcaggatgcccaatggctccaccattcccccagggagccctgaggagatgcttttccactttggaatgacctggcagatcaacgggacaggcctccttggcaagaggaatgaccagctgccttccaacttcacccctgttttctactcacaactgcaaaaaaacagctcctgggctgaacatttgatctccaactgtgacggagatagctcatgcatctatgacaccctggccctgcgcaacgcaagcatcggacttcacacgagggaagtcagtaaaaactacgagcaggcgaacgccaccctcaatcagtacccgccctccatcaatggtggtcgtgtgattgaagcctacaaggggcagaccacgctgattcagtacaccagcaatgctgaggatgccaacttcacgctcagagacagctgcaccgacttggagctctttgagaatgggacgttgctgtggacacccaagtcgctggagccattcactctggagattctagcaagaagtgccaagattggcttggcatctgcactccagcccaggactgtggtctgccattgcaatgcagagagccagtgtttgtacaatcagaccagcagggtgggcaactcctccctggaggtggctggctgcaagtgtgacgggggcaccttcggccgctactgcgagggctccgaggatgcctgtgaggagccgtgcttcccgagtgtccactgcgttcctgggaagggctgcgaggcctgccctccaaacctgactggggatgggcggcactgtgcggctctggggagctctttcctgtgtcagaaccagtcctgccctgtgaattactgctacaatcaaggccactgctacatctcccagactctgggctgtcagcccatgtgcacctgccccccagccttcactgacagccgctgcttcctggctgggaacaacttcagtccaactgtcaacctagaacttcccttaagagtcatccagctcttgctcagtgaagaggaaaatgcctccatggcagaagtcaacgcctcggtggcatacagactggggaccctggacatgcgggcctttctccgcaacagccaagtggaacgaatcgattctgcagcaccggcctcgggaagccccatccaacactggatggtcatctcggagttccagtaccgccctcggggcccggtcattgacttcctgaacaaccagctgctggccgcggtggtggaggcgttcttataccacgttccacggaggagtgaggagcccaggaacgacgtggtcttccagcccatctccggggaagacgtgcgcgatgtgacagccctgaacgtgagcacgctgaaggcttacttcagatgcgatggctacaagggctacgacctggtctacagcccccagagcggcttcacctgcgtgtccccgtgcagtaggggctactgtgaccatggaggccagtgccagcacctgcccagtgggccccgctgcagctgtgtgtccttctccatctacacggcctggggcgagcactgtgagcacctgagcatgaaactcgacgcgttcttcggcatcttctttggggccctgggcggcctcttgctgctgggggtcgggacgttcgtggtcctgcgcttctggggttgctccggggccaggttctcctatttcctgaactcagctgaggccttgccttgaaggggcagctgtggcctaggctacctcaagactcacctcatccttaccgcacatttaaggcgccattgcttttgggagactggaaaagggaaggtgactgaaggctgtcaggattctt

SEQ ID NO: 155659 - DNA, 16169 bp, Homo sapiens
  Payload ID: 10597
  Gene Symbol: MUC4
  Gene Name: mucin 4, cell surface associated
  ENST ID: ENST00000470451
  CDS Start-End: 73-13407
gtctgctcctcacactgcagctgctgggccgtggagcttccccagggagccagggggacttttgccgcagccatgaagggggcacgctggaggagggtcccctgggtgtccctgagctgcctgtgtctctgcctccttccgcatgtggtcccaggaaccacagaggacacattaataactggaagtaaaactgctgccccagtcacctcaacaggctcaacaacagcgacactagagggacaatcaactgcagcttcttcaaggacctctaatcaggacatatcagcttcatctcagaaccaccagactaagagcacggagaccaccagcaaagctcaaaccgacaccctcacgcagatgatgacatcaactcttttttcttccccaagtgtacacaatgtgatggagacagctcctccagatgaaatgaccacatcatttccctccagtgtcaccaacacactcatgatgacatcaaagactataacaatgacaacctccacagactccactcttggaaacacagaagagacatcaacagcaggaactgaaagttctaccccagtgacctcagcagtctcaataacagctggacaggaaggacaatcacgaacaacttcctggaggacctctatccaagacacatcagcttcttctcagaaccactggactcggagcacgcagaccaccagggaatctcaaaccagcaccctaacacacagaaccacttcaactccttctttctctccaagtgtacacaatgtgacagggactgtttctcagaagacatctccttcaggtgaaacagctacctcatccctctgtagtgtcacaaacacatccatgatgacatcagagaagataacagtgacaacctccacaggctccactcttggaaacccaggggagacatcatcagtacctgttactggaagtcttatgccagtcacctcagcagccttagtaacatttgatccagaaggacaatcaccagcaactttctcaaggacttctactcaggacacaacagctttttctaagaaccaccagactcagagcgtggagaccaccagagtatctcaaatcaacaccctcaacaccctcacaccggttacaacatcaactgttttatcctcaccaagtggattcaacccaagtggaacagtttctcaggagacattcccttctggtgaaacaaccacctcatccccttccagtgtcagcaatacattcctggtaacatcaaaggtgttcagaatgccaacctccagagactctactcttggaaacacagaggagacatcactatctgtaagtggaaccatttctgcaatcacttccaaagtttcaaccatatggtggtcagacactctgtcaacagcactctcccccagttctctacctccaaaaatatccacagctttccacacccagcagagtgaaggtgcagagaccacaggacggcctcatgagaggagctcattctctccaggtgtgtctcaagaaatatttactctacatgaaacaacaacatggccttcctcattctccagcaaaggccacacaacttggtcacaaacagaactgccctcaacatcaacaggtgctgccactaggcttgtcacaggaaatccatctacagggacagctggcactattccaagggtcccctctaaggtctcagcaataggggaaccaggagagcccaccacatactcctcccacagcacaactctcccaaaaacaacaggggcaggcgcccagacacaatggacacaagaaacggggaccactggagaggctcttctcagcagcccaagctacagtgtgactcagatgataaaaacggccacatccccatcttcttcacctatgctggatagacacacatcccaacaaattacaacggcaccatcaacaaatcattcaacaatacattccacaagcacctctcctcaggaatcaccagctgtttcccaaaggggtcacactcaagccccgcagaccacacaagaatcacaaaccacgaggtccgtctcccccatgactgacaccaagacagtcaccaccccaggttcttccttcacagccagtgggcactcgccctcagaaattgttcctcaggacgcacccaccataagtgcagcaacaacctttgccccagctcccaccggggatggtcacacaacccaggccccgaccacagcactgcaggcagcacccagcagccatgatgccaccctggggccctcaggaggcacgtcactttccaaaacaggtgcccttactctggccaactctgtagtgtcaacaccagggggcccagaaggacaatggacatcagcctctgccagcacctcacctgacacagcagcagccatgacccatacccaccaggctgagagcacagaggcctctggacaaacacagaccagcgaaccggcctcctcagggtcacgaaccacctcagcgggcacagctaccccttcctcatccggggcgagtggcacaacaccttcaggaagcgaaggaatatccacctcaggagagacgacaaggttttcatcaaacccctccagggacagtcacacaacccagtcaacaaccgaattgctgtccgcctcagccagtcatggtgccatcccagtaagcacaggaatggcgtcttcgatcgtccccggcacctttcatcccaccctctctgaggcctccactgcagggagaccgacaggacagtcaagcccaacttctcccagtgcctctcctcaggagacagccgccatttcccggatggcccagactcagaggacaagaaccagcagagggtctgacactatcagcctggcgtcccaggcaaccgacaccttctcaacagtcccacccacacctccatcgatcacatccactgggcttacatctccacaaaccgagacccacactctgtcaccttcagggtctggtaaaaccttcaccacggccctcatcagcaacgccacccctcttcctgtcacctacgcttcctcggcatccacaggtcacaccacccctcttcatgtcaccgatgcttcctcagtatccacaggtcacgccacccctcttcctgtcaccagcccttcctcagtatccacaggtcacaccacccctcttcctgtcaccgacacttcctcagaatccacaggtcacgtcacccctcttcctgtcaccagcttttcctcagcatccacaggtgacagcacccctcttcctgtcactgacacttcctcagcatccacaggtcacgtcacccctcttcctgtcaccagcctttcctcagcatccacaggtgacaccacccctcttcctgtcactgacacttcctcagcatccacaggtcacgccacctctcttcctgtcaccgacacttcctcagtatccacaggtcacaccacccctcttcctgtcaccgacacttcctcagcatccacaggtcacgccacctctcttcctgtcaccgacacttcctcagtatccacaggtcacaccacccctcttcatgtcactgatgcttcctcagcatccacaggtcaggccacccctcttcctgtcaccagcctttcctcagtatccacaggtgacaccacgcctcttcctgtcactagcccttcctcagcatccacaggtcacgccacccctcttcttgtcaccgacacttcctcagcatccacaggacacgccacccctcttcctgtcaccgacgcttcctcagtgtccacagatcacgccacctctcttcctgtaaccatcccttccgcagcatccacaggtcacaccacccctcttcctgtcaccgacacttcctcagcatccacaggtcaggccacctctcttcttgtcaccgacacttcctcagtatccacaggtgacaccacgcctcttcctgtcactagcacttcctcagcatccacaggtcacgtcactcctcttcatgtcaccagcccttcctcagcatccacaggtcacgccacccctcttcctgtcaccagcctttcctcagcatccacaggtgacaccatgcctcttcctgtcactagcccttcctcagcatccacaggtgacaccacccctcttcctgtcaccgacgcttcctcagtatccacaggtcacaccacccctcttcatgtcactgatgcttcctcagcatccacaggtcaggccacccctcttcctgtcaccagcctttcctcagtatccacaggtgacaccacgcctcttcctgtcactagcccttcctcagcatccacaggtcacgccacccctcttcttgtcaccgacacttcctcagcatccacaggacacgccacccctcttcctgtcaccgacgcttcctcagtgtccacagatcacgccacctctcttcctgtaaccatcccttccgcagcatccacaggtcacaccacccctcttcctgtcaccgacacttcctcagcatccacaggtcaggccacctctcttcttgtcaccgacacttcctcagtatccacaggtgacaccacgcctcttcctgtcactagcacttcctcagcatccacaggtcacgtcactcctcttcatgtcaccagcccttcctcagcatccacaggtcacgccacccctcttcctgtcaccagcctttcctcagcatccacaggtgacaccatgcctcttcctgtcactagcccttcctcagcatccacaggtgacaccacccctcttcctgtcaccgacgcttcctcagtatccacaggtcacaccacccctcttcctgtcaccagcccttcctcagcatctacaggtcacaccacccctcttcctgtcaccgacacttcctcagcatccaaaggtgacaccacccctcttcctgtcaccagcccttcctcagcatctacaggtcacaccacccctcttcctgtcaccgacacttcctcagcatccacaggtgacaccacccctcttcctgtcaccaatgcttcctcattatccacaggtcacgccacccctcttcatgtcaccagcccttcctcagcatccacaggtcacgccacccctcttcctgtcaccagcacttcctcagcatccaccggtcacgccacccctcttcctgtcaccggcctttcctcagctaccacagatgacaccacccgtcttcctgtcaccgacgtttcctcggcatccacaggtcaggccacccctcttcctgtcaccagcctttcctcagtatccacaggtgacaccacgcctcttcctgtcactagcccttcctcagcatccacaggtcacgccagccctcttcttgtcactgacgcttcctcagcatccacaggtcaggccacccctcttcctgtcaccgacacttcctcagtatccacagctcacgccaccccacttcctgtcaccggcctttcttcagcttccacagatgacaccacccgtcttcctgtcaccgacgtttcctcggcatccacaggtcaggccatccctcttcctgtcaccagcccttcctcagcatccacaggtgacaccacccctcttcctgtcaccgacgcttcctcagcatccacaggtgacaccacctctcttcctgtcaccatcccttcctcagcatcttcaggtcacaccacctctcttcctgtcaccgacgcttcctcagtgtccacaggtcacgccacctctcttcttgtcaccgacgcttcctcagtatccacaggtgacaccacccctcttcctgtcaccgacactaactcagcatccacaggtgacaccacccctcttcatgtcaccgacgcttcctcagtatccacaggtcacgccacctctcttcctgtcaccagcctttcctcagcatccacaggtgacaccacgcctcttcctgtcactagcccttcctcagcatcctcaggtcacaccacccctcttcctgtcaccgacgcttcctcagtacccacaggtcacgccacctctcttcctgtcaccgacgcttcctcagtgtccacaggtcacgccacccctcttcctgtcaccgacgcttcctcagtgtccacaggtcatgccacccctcttccggtcaccgacacttcctcagtatctacaggacaggccacccctcttcctgtcaccagcctttcctcagcatccactggtgacaccacgccgcttcctgtcaccgatacttcctcagcatccacaggtcaggacacccctcttcctgtcaccagcctttcctcagtatccacaggtgacaccacgcctcttcctgtcactaacccttcctcagcatccacaggtcacgccacccctcttcttgtcaccgacgcttcctcaatatccacaggtcacgccacctctcttcttgtcaccgacgcttcctcagtatccacaggtcacgccaccgctcttcatgacaccgatgcttcctcattatccacaggggacaccacccctcttcctgtcaccagcccttcctcaacatccacaggtgacaccacccctcttcctgtcaccgaaacttcctcagtatccacaggtcacgccacctctcttcctgtcaccgacacttcctcagcatccacaggtcacgccacctctcttcctgtcaccgacacttcctcagcatccacaggtcacgccacccctcttcctgtcaccgacacttcctcagcatccacaggtcaggccacccctcttcctgtcaccagcccttcctcagcatccacaggtcacgccatccctcttcttgtcaccgacacttcctcagcatccacaggacaggccacccctcttcctgtcaccagcctttcctcagcatccacaggtgacaccacccctcttcctgtcaccgacgcttcctcagtgtccacaggtcacgccacctctcttcctgtcaccagcctttcctcagtatccacaggtgacaccactcctcttcctgtcactagcccttcctcagcatccacaggtcacgccacccctcttcatgtcaccgacgcttcctcagcatccacaggtcacgccacccctcttcctgtcaccagcctttcctcagcatccacaggtgacaccacgcctcttcctgtcactagcccttcctcagcatccacaggtcacgccacccctcttcatgtcaccgacgcttcctcagtatccacaggtgacaccacccctcttcctgtcaccagctcttcctcagcatcctcaggtcacaccacccctcttcctgtcaccgacgcttcctcagcatccacaggtgacaccacccctcttcctgtcaccgacacttcctcagcatccacaggtcacgccacccatcttcctgtcaccggcctttcctcagcttccacaggtgacaccacccgtcttcctgtcaccaacgtttcctcggcatccacaggtcatgccacccctcttcctgtcaccagcacttcctcagcatccacaggtgacaccacccctcttcctggcaccgacacttcctcagtatccacaggtcacaccacccctcttcttgtcaccgacgcttcgtcagtatccacaggtgacaccacccgtcttcctgtcaccagcccttcctcagcatctacaggtcacaccacccctctacctgtcaccgacactccctcagcatccacaggtgacaccacccctcttcctgtcaccaatgcttcctcattatccacacgtcacgccacctctcttcatgtcaccagcccttcctcagcatccacaggtcacgccacctctcttcctgtcaccgacacttccgcagcatccacaggtcacgccacccctcttcctgtcaccagcacttcctcagcatccacaggtgacaccacccctcttcctgtcaccgacacttactcagcatccacaggtcaggccacccctcttcctgtcaccagcctttcctcagtatccacaggtgacaccacgcctcttcctgtcactagcccttcctcagcatccacaggtcacgccactcctcttcttgtcaccgacgcttcctcagcatccacaggtcaggccacccctcttcctgtcaccagcctttcctcagtatccacaggtgacaccacgcctcttcctgtcactagcccttcctcagcatccaccggtcatgccacctctcttcctgtcaccgacacttcctcagcatccacaggtgacaccacctctcttcctgtcaccgacacttcctcagcatacacaggtgacaccacctctcttcctgtcaccgacacttcctcatcatccacaggtgacaccacccctcttcttgtcaccgagacttcctcagtatccacaggtgacaccacccctcttcctgtcaccgacacttcctcagcatccacaggtcacgccacccctcttcctgtcaccaacacttcctcagtatccacaggtcacgccacccctcttcatgtcaccagcccttcctcagcatccacaggtcacaccacccctcttcctgtcaccgacgcttcgtcagtgtccacaggtcacgccacctctcttcctgtcaccgacgcttcctcagtgttcacaggtcatgccacctctcttcctgtcaccatcccttcctcagcatcctcaggtcacaccacccctcttcctgtcaccgacgcttcctcagtgtccacaggtcacgccacctctcttcctgtcaccgacgcttcctcagtgtccacaggtcatgccacccctcttcctgtcaccgacgcttcctcagtgtccacaggtcacgctacccctcttcctctcaccagcctttcctcagtatccacaggtgacaccacgcctcttcctgtcaccgacacttcctcagcatccacaggtcaggccacccctcttcctgtcaccagcctttcctcagtatccacaggtgacaccacccctcttcctgtcaccgacacttcctcagcatccacaggtcacgccacctctcttcctgtcaccgacacttcctcagcatccacaggtcacgccacccctcttcctgacaccgacacttcctcagcatccacaggtcacgccacccttcttcctgtcaccgacacttcctcagcatccataggtcacgccacctctcttcctgtcaccgacacttcctcaatatccacaggtcacgccacccctcttcatgtcaccagcccttcctcagcatccaccggtcacgccaccccgcttcctgtcaccgacacttcctcagcatccacaggtcacgccaaccctcttcatgtcaccagcccttcctcagcatccaccggtcacgccaccccgcttcctgtcaccgacacttcctcagcatccacaggtcacgccacccctcttcctgtcaccagcctttcctcagtatccacaggtgacaccacgcctcttcctgtcactagcccttcctcagcatccacaggtcacaccacccctcttcctgtcaccgacacttcctcagcatccacaggtcaggccaccgctcttcctgtcaccagcacttcctcagcatccacaggtgacaccacccctcttcctgtcaccgacacttcctcagcatccacaggtcaggccacccctcttcctgtcaccagcctttcctcagtatccacaggtgacaccacgcctcttcctgtcactagcccttcctcagcatccacaggtcacgccactcctcttcttgtcaccgacgcttcctcagcatccacaggtcaggccacccctcttcctgtcaccagcctttcctcagtatccacaggtgacaccacgcctcttcctgtcactagcccttcctcagcatccaccggtcatgccacctctcttcctgtcaccgacacttcctcagcatccacaggtgacaccacctctcttcctgtcaccgacacttcctcagcatacacaggtgacaccacctctcttcctgtcaccgacacttcctcatcatccacaggtgacaccacccctcttcttgtcaccgagacttcctcagtatccacaggtcacgccactcctcttcttgtcaccgacgcttcctcagcatccacaggtcacgccacccctcttcatgtcaccagcccttcctcagcatccacaggtgacaccacccctgtgcctgtcaccgacacttcctcagtatccacaggtcacgccacccctcttcctgtcaccggcctttcctcagcttccacaggtgacaccacccgtcttcctgtcaccgacatttcctcggcatccacaggtcaggccacccctcttcctgtcaccaacacttcctcagtatccacaggtgacaccatgcctcttcctgtcactagcccttcctcagcatccacaggtcacgccacccctcttcctgtcaccagcacttcctcagcatccaccggtcacgccacccctgttcctgtcaccagcacttcctcagcatctacaggtcacaccacccctcttcctgtcaccgacacttcctcagcatccacaggtgacaccacccctcttcctgtcaccagcccttcctcagcatctacaggtcacaccacccctcttcatgtcaccatcccttcctcagcatccacaggtgacaccagcactcttcctgtcaccggcgcttcctcagcatccaccggtcacgccacccctcttcctgtcaccgacacttcctcagtatccaccggtcacgccacgcctcttcctgtcaccagcctttcctcagtatccacaggtgacaccacccctcttcctgtcaccgacgcttcctcggcatccacaggtcaggccacccctcttcctgtcaccagcctttcctcagtatccacaggtgacaccacccctcttcttgtcaccgacgcttcctcagtatccacaggtcacgccacccctcttcctgtcaccgacacttcctcagcatccacaggtgacaccacccgtcttcctgtcacggacacttcctcagcatccacaggtcaggccacccctcttcctgtcaccagcctttcctcagtatccacaggtgacaccacccctcttcttgtcaccgacgcttcctcagtatccacaggtcacgccacccctcttcctgtcaccgacacttcctcagcatccacaggtgacaccacccgtcttcctgtcacggacacttcctcagcatccacaggtcaggccacccctcttcctgtcaccatcccttcctcatcatcctcaggtcacaccacccctcttcctgtcaccagcacttcctcagtatctacaggtcacgtcacccctcttcatgtcaccagcccttcctcagcatccacaggtcacgtcacccctcttcctgtcaccagcacttcctcagcatccacaggtcacgccacccctcttcttgtcaccgacgcttcctcagtgtccacaggtcacgccacgcctcttcctgtcaccgacgcttcctcagcatccacaggtgacaccacccctcttcctgtcaccgacacttcctcagcatccacaggtcaggccacccctcttcctgtcaccagcctttcctcagtatccacaggtgacaccacccctcttcctgtcaccgacgcttcctcagcatccacaggtcacgccacccctcttcctgtcaccatcccttcctcagtatccacaggtgacaccatgcctcttcctgtcactagcccttcctcagcatccacaggtcacgccacccctcttcctgttaccggcctttcctcagcttccacaggtgacaccacccctcttcctgtcaccgacacttcctcagcatccacacgtcacgccacccctcttcctgtcaccgacacttcctcagcttccacagatgacaccacccgtcttcctgtcaccgacgtttcctcggcatccacaggacatgccacccctcttcctgtcaccagcacttcctcagcatccacaggtgacaccacccctcttcctgtcaccgacacttcctcagtatccacaggtcacgccacctctcttcctgtcaccagccgttcctcagcatccacaggtcacgccaccccccttcctgtcaccgacacttcctcagtatccacaggtcacgccacccctcttcctgtcaccagcacttcctcagtatctacaggtcacgccacccctcttcctgtcaccagcccttcctcagcatccacaggtcacgccacccctgttcctgtcaccagcacttcctcagcatccacaggtgacaccacccctcttcctgtcaccaatgcttcctcattatccacaggtcacgccacccctcttcatgtcaccagcccttcctcagcatccagaggtgacaccagcactcttcctgtcaccgatgcttcctcagcatccaccggtcacgccacccctcttcctctcaccagcctttcctcagtatccacaggtgacaccacgcctcttcctgtcaccgacacttcctctgcatccacaggtcaggccacccctcttcctgtcaccagcctttcctcagtatccacaggtgacaccacgcctcttcctgtcaccatcccttcctcagcatcctcaggtcacaccacctctcttcctgtcaccgacgcttcctcagtgtccacaggtcacggcacccctcttcctgtcaccagcacttcctcagcatccacaggtgacaccacccctcttcctgtcaccgacacttcctcagcatccacaggtcacgccacccctcttcctgtcaccgacacttcctcagcatccacaggtcacgccacccctcttcctgtcaccagcctttcctcagtatccacaggtcacgccacccctcttgctgtcagcagtgctacctcagcttccacagtatcctcggactcccctctgaagatggaaacaccaggaatgacaacaccgtcactgaagacagacggtgggagacgcacagccacatcaccaccccccacaacctcccagaccatcatttccaccattcccagcactgccatgcacacccgctccacagctgcccccatccccatcctgcctgagagaggagtttccctcttcccctatggggcaggcgccggggacctggagttcgtcaggaggaccgtggacttcacctccccactcttcaagccggcgactggcttcccccttggctcctctctccgtgattccctctacgcttcacaggccgggaccctgtggccctggtggctccgttctgggacgatgctgacttctccactggtcgggggaccacattttatcagagcaacacctaccaagccatcctctccacggacgggagcaggtcctatgccctgtttctctaccagagcggtgggatgcagtgggacgtggcccagcgctcagtggagatggctatttcgaaaacagcccactgatgtcccagccagtgtgggagaggtatcgccctgatagattcctgaattccaactcaggcctccaagggctgcagttctacaggctacaccgggaagaaaggcccaactaccgtctcgagtgcctgcagtggctgaagagccagcctcggtggcccagctggggctggaaccaggtctcctgcccttgttcctggcagcagggacgacgggacttacgattccaacccgtcagcataggtcgctggggcctcggcagtaggcagctgtgcagcttcacctcttggcgaggaggcgtgtgctgcagctacgggccctggggagagtttcgtgaaggctggcacgtgcagcgtccttggcagttggcccaggaactggagccacagagctggtgctgccgctggaatgacaagccctacctctgtgccctgtaccagcagaggcggccccacgtgggctgtgctacatacaggcccccacagcccgcctggatgttcggggacccccacatcaccaccttggatggtgtcagttacaccttcaatgggctgggggacttcctgctggtcggggcccaagacgggaactcctccttcctgcttcagggccgcaccgcccagactggctcagcccaggccaccaacttcatcgcctttgcggctcagtaccgctccagcagcctgggccccgtcacggtccaatggctccttgagcctcacgacgcaatccgtgtcctgctggataaccagactgtgacatttcagcctgaccatgaagacggcggaggccaggagacgttcaacgccaccggagtcctcctgagccgcaacggctctgaggtctcggccagcttcgacggctgggccaccgtctcggtgatcgcgctctccaacatcctccacgcctccgccagcctcccgcccgagtaccagaaccgcacggaggggctcctgggggtctggaataacaatccagaggacgacttcaggatgcccaatggctccaccattcccccagggagccctgaggagatgcttttccactttggaatgacctggcagatcaacgggacaggcctccttggcaagaggaatgaccagctgccttccaacttcacccctgttttctactcacaactgcaaaaaaacagctcctgggctgaacatttgatctccaactgtgacggagatagctcatgcatctatgacaccctggccctgcgcaacgcaagcatcggacttcacacgagggaagtcagtaaaaactacgagcaggcgaacgccaccctcaatcagtacccgccctccatcaatggtggtcgtgtgattgaagcctacaaggggcagaccacgctgattcagtacaccagcaatgctgaggatgccaacttcacgctcagagacagctgcaccgacttggagctctttgagaatgggacgttgctgtggacacccaagtcgctggagccattcactctggagattctagcaagaagtgccaagattggcttggcatctgcactccagcccaggactgtggtctgccattgcaatgcagagagccagtgtttgtacaatcagaccagcagggtgggcaactcctccctggaggtggctggctgcaagtgtgacgggggcaccttcggccgctactgcgagggctccgaggatgcctgtgaggagccgtgcttcccgagtgtccactgcgttcctgggaagggctgcgaggcctgccctccaaacctgactggggatgggcggcactgtgcggctctggggagctctttcctgtgtcagaaccagtcctgccctgtgaattactgctacaatcaaggccactgctacatctcccagactctgggctgtcagcccatgtgcacctgccccccagccttcactgacagccgctgcttcctggctgggaacaacttcagtccaactgtcaacctagaacttcccttaagagtcatccagctcttgctcagtgaagaggaaaatgcctccatggcagaagtcaacgcctcggtggcatacagactggggaccctggacatgcgggcctttctccgcaacagccaagtggaacgaatcgattctgcagcaccggcctcgggaagccccatccaacactggatggtcatctcggagttccagtaccgccctcggggcccggtcattgacttcctgaacaaccagctgctggccgcggtggtggaggcgttcttataccacgttccacggaggagtgaggagcccaggaacgacgtggtcttccagcccatctccggggaagacgtgcgcgatgtgacagccctgaacgtgagcacgctgaaggcttacttcagatgcgatggctacaagggctacgacctggtctacagcccccagagcggcttcacctgcgtgtccccgtgcagtaggggctactgtgaccatggaggccagtgccagcacctgcccagtgggccccgctgcagctgtgtgtccttctccatctacacggcctggggcgagcactgtgagcacctgagcatgaaactcgacgcgttcttcggcatcttctttggggccctgggcggcctcttgctgctgggggtcgggacgttcgtggtcctgcgcttctggggttgctccggggccaggttctcctatttcctgaactcagctgaggccttgccttgaaggggcagctgtggcctaggctacctcaagactcacctcatccttaccgcacatttaaggcgccattgcttttgggagactggaaaagggaaggtgactgaaggctgtcaggattctt

SEQ ID NO: 155660 - DNA, 1812 bp, Homo sapiens
  Payload ID: 10597
  Gene Symbol: MUC4
  Gene Name: mucin 4, cell surface associated
  ENST ID: ENST00000618211
  CDS Start-End: 1-1812
ggtcacgccacccctcttcttgtcaccgacgcttcctcaatatccacaggtcacgccacctctcttcttgtcaccgacgcttcctcagtatccacaggtcacgccaccgctcttcatgacaccgatgcttcctcattatccacaggggacaccacccctcttcctgtcaccagcccttcctcaacatccacaggtgacaccacccctcttcctgtcaccgaaacttcctcagtatccacaggtcacgccacctctcttcctgtcaccgacacttcctcagcatccacaggtcacgccacctctcttcctgtcaccgacacttcctcagcatccacaggtcacgccacccctcttcctgtcaccgacacttcctcagcatccacaggtcaggccacccctcttcctgtcaccagcccttcctcagcatccacaggtcacgccatccctcttcttgtcaccgacacttcctcagcatccacaggacaggccacccctcttcctgtcaccagcctttcctcagcatccacaggtgacaccacccctcttcctgtcaccgacgcttcctcagtatccacaggtgacaccactcctcttcctgtcactagcccttcctcagcatccacaggtcacgccacccctcttcatgtcaccgacgcttcctcagcatccacaggtcacgccacccctcttcctgtcaccagcctttcctcagcatccacaggtgacaccacgcctcttcctgtcactagcccttcctcagcatccacaggtcacgccacccctcttcatgtcaccgacgcttcctcagtatccacaggtgacaccacccctcttcctgtcaccagctcttcctcagcatcctcaggtcacaccacccctcttcctgtcaccgacgcttcctcagcatccacaggtgacaccacccctcttcctgtcaccgacacttcctcagcatccacaggtcacgccacccatcttcctgtcaccggcctttcctcagcttccacaggtgacaccacccgtcttcctgtcaccaacgtttcctcggcatccacaggtcatgccacccctcttcctgtcaccagcacttcctcagcatccacaggtgacaccacccctcttcctggcaccgacacttcctcagtatccacaggtcacaccacccctcttcttgtcaccgacgcttcgtcagtatccacaggtgacaccacccgtcttcctgtcaccagcccttcctcagcatctacaggtcacaccacccctctacctgtcaccgacactccctcagcatccacaggtgacaccacccctcttcctgtcaccaatgcttcctcattatccacacgtcacgccacctctcttcatgtcaccagcccttcctcagcatccacaggtcacgccacctctcttcctgtcaccgacacttccgcagcatccacaggtcacgccacccctcttcctgtcaccagcacttcctcagcatccacaggtgacaccacccctcttcctgtcaccgacacttactcagcatccacaggtcaggccacccctcttcctgtcaccagcctttcctcagtatccacaggtgacaccacgcctcttcctgtcactagcccttcctcagcatccacaggtcacgccactcctcttcttgtcaccgacgcttcctcagcatccacaggtcaggccacccctcttcctgtcaccagcctttcctcagtatccacaggtgacaccacgcctcttcctgtcactagcccttcctcagcatccaccggtcatgccacctctcttcctgtcaccgacacttcc

SEQ ID NO: 155661 - DNA, 16352 bp, Homo sapiens
  Payload ID: 10597
  Gene Symbol: MUC4
  Gene Name: mucin 4, cell surface associated
  ENST ID: ENST00000617794
  CDS Start-End: 1-15945
tctctgcctccttccgcatgtggtcccagggtgatggagacagctcctccagatgaaatgaccacatcatttccctccagtgtcaccaacacactcatgatgacatcaaagactataacaatgacaacctccacagactccactcttggaaacacagaagagacatcaacagcaggaactgaaagttctaccccagtgacctcagcagtctcaataacagctggacaggaaggacaatcacgaacaacttcctggaggacctctatccaagacacatcagcttcttctcagaaccactggactcggagcacgcagaccaccagggaatctcaaaccagcaccctaacacacagaaccacttcaactccttctttctctccaagtgtacacaatgtgacagggactgtttctcagaagacatctccttcaggtgaaacagctacctcatccctctgtagtgtcacaaacacatccatgatgacatcagagaagataacagtgacaacctccacaggctccactcttggaaacccaggggagacatcatcagtacctgttactggaagtcttatgccagtcacctcagcagccttagtaacagttgatccagaaggacaatcaccagtaactttctcaaggacttctactcaggacacaacagctttttctaagaaccaccagactcagagcgtggagaccaccagagtatctcaaatcaacaccctcaacaccctcacaccggttacaacatcaactgttttatcctcaccaagtggattcaacccaagtggaacagtttctcaggagacattcccttctggtgaaacaaccatctcatccccttccagtgtcagcaatacattcctggtaacatcaaaggtgttcagaatgccaatctccagagactctactcttggaaacacagaggagacatcactatctgtaagtggaaccatttctgcaatcacttccaaagtttcaaccatatggtggtcagacactctgtcaacagcactctcccccagttctctacctccaaaaatatccacagctttccacacccagcagagtgaaggtgcagagaccacaggacggcctcatgagaggagctcattctctccaggtgtgtctcaagaaatatttactctacatgaaacaacaacatggccttcctcattctccagcaaaggccacacaacttggtcacaaacagaactgccctcaacatcaacaggtgctgccactaggcttgtcacaggaaatccatctacaggggcagctggcactattccaagggtcccctctaaggtctcagcaataggggaaccaggagagcccaccacatactcctcccacagcacaactctcccaaaaacaacaggggcaggcgcccagacacaatggacacaagaaacggggaccactggagaggctcttctcagcagcccaagctacagtgtgactcagatgataaaaacggccacatccccatcttcttcacctatgctggatagacacacatcacaacaaattacaacggcaccatcaacaaatcattcaacaatacattccacaagcacctctcctcaggaatcaccagctgtttcccaaaggggtcacactcaagccccgcagaccacacaagaatcacaaaccacgaggtccgtctcccccatgactgacaccaagacagtcaccaccccaggttcttccttcacagccagtgggcactcgccctcagaaattgttcctcaggacgcacccaccataagtgcagcaacaacctttgccccagctcccaccggggatggtcacacaacccaggccccgaccacagcactgcaggcagcacccagcagccatgatgccaccctggggccctcaggaggcacgtcactttccaaaacaggtgcccttactctggccaactctgtagtgtcaacaccagggggcccagaaggacaatggacatcagcctctgccagcacctcacctgacacagcagcagccatgacccatacccaccaggctgagagcacagaggcctctggacaaacacagaccagcgaaccggcctcctcagggtcacgaaccacctcagcgggcacagctaccccttcctcatccggggcgagtggcacaacaccttcaggaagcgaaggaatatccacctcaggagagacgacaaggttttcatcaaacccctccagggacagtcacacaacccagtcaacaaccgaattgctgtccgcctcagccagtcatggtgccatcccagtaagcacaggaatggcgtcttcgatcgtccccggcacctttcatcccaccctctctgaggcctccactgcagggagaccgacaggacagtcaagcccaacttctcccagtgcctctcctcaggagacagccgccatttcccggatggcccagactcagaggacaagaaccagcagagggtctgacactatcagcctggcgtcccaggcaaccgacaccttctcaacagtcccacccacacctccatcgatcacatccagtgggcttacatctccacaaacccagacccacactctgtcaccttcagggtctggtaaaaccttcaccacggccctcatcagcaacgccacccctcttcctgtcacctacgcttcctcggcatccacaggtcacaccacccctcttcatgtcaccgatgcttcctcagtatccacaggtcacgccacccctcttcctgtcaccagcccttcctcagtatccacaggtcacaccacccctcttcctgtcaccgacacttcctcagaatccacaggtcatgtcacccctcttcctgtcaccagcctttcctcagcatccacaggtgacagcacccctcttcctgtcactgacacttcctcagcatccacaggtcacgtcacccctcttcctgtcaccagcctttcctcagcatccacaggtgacaccacccctcttcctgtcactgacacttcctcagcatccacaggtcacgccacctctcttcctgtcaccgacacttcctcagtatccacaggtcacaccacccctcttcctgtcaccgacacttcctcagcatccacaggtcacgccacctctcttcctgtcaccgacacttcctcagtatccacaggtgacaccacccctcttcatgtcaccgacgcttcctcagcatccacaggtcaggacacccctcttcctgtcaccagcctttcctcagtatccacaggtgacaccacgcctcttcctgtcactagcccttcctcagcatccacaggtcacgccacccctcttcttgtcaccgacgcttcctcagtatccacaggtcacgccacctctcttcttgtcaccgacgcttcctcagtatccacaggtcacgccaccgctcttcatgtcaccagcccttcctcagcatccacaggtgacaccacccctcttcctgtcaccgacacttcctcagcatccacaggtcacgccacctctcttcctgtcaccgacacttcctcagcatccacaggtcacgccacccctcttcctgtcaccgacacttcctcagcatccacaggtcaggccacccctcttcctgtcaccggcccttcctcagcatccacaggtcacgccacctctcttcctgtcaccagcctttcctcagtatccacaggtgacaccacccctcttcctgtcaccagcccttcctcagcatcctcaggtcacaccacccctcttcctgtcaccgacgcttcctcagtatccacaggtcacaccacccctcttcctgtcaccgacgcttcctcagcatccacaggtcatgccacccctcttcctgtcaccagcacttcctcagcatccacaggtgacaccacccctcttcctgtcaccagcccttcctcagcatccacaggtcacgccacctctcttcctgtcaccgacacttcctcagtatccacaggtcacgccacctctcttcctgtcaccgacgcttcctcagtgttcacaggtcacgccacctcgcttcctgtcaccatcccttcctcagcatcctcaggtcacaccacccctcttcctgtcaccgacgcttcctcagtgtccacaggtcacgccacctctcttcctgtcaccgacgcttcctcagtatccacaggtgacaccacgcctcttcctgtcaccgacacttcctcagcatccacaggtcacgccacccctcttcatgtcaccagcccttcctcagcatccacaggtcacgccacccctcttcctgtcaccagcctttcctcagtatccacaggtgacaccacgcctcttcctgtcactagcccttcctcagcatccacaggtcacaccacccctcttcctgtcaccgacacttcctcagcatccacaggtcaggccaccgctcttcctgtcaccagcacttcctcagcatccacaggtgacaccacccctcttcctgttaccgacacttcctcagcatccacaggtgacaccacgcctcttcctgtcactagcccttcctcagcatccacaggtcacgccacccctcttcctgtcaccgacacttcctcagcatacacaggtgacaccacctctcttcctgtcaccgacacttcctcatcatccacaggtcacgccacccctcttcatgtcaccagcccttcctcagcatccacaggtcaggccacccctcttcctgtcaccaacacttcctcagcatccacaggtcacgccacccctcttcctgtcaccggcctttcctcagcttccacaggtgacaccacccgtcttcctgtcaccgacatttcctcggcatccacaggtcaggccacccctcttcctgtcaccaacacttcctcagtatccacaggtgacaccatgcctcttcctgtcactagcccttcctcagcatccacaggtcacgccacccctcttcctgtcaccgacgcttcctcggcatccaccggtcacgccacccctcttcctgtcaccgacacttcctcagtatccacaggtcacgccacccctcttcctctcaccagcctttcctcagtatccacaggtgacaccacccctcttcctgtcaccgacgcttcctcggcatccaccggtcacgccacccctcttcctgtcaccagcctttcctcagtatccacaggtgacaccacccctcttcctgtcaccgacgcttcctcggcatccacaggtgacaccacgcctcttcctgtcaccatcccttcctcagcatcctcaggtcacaccacctctcttcctgtcaccgacacttcctcagtatccacaggtgacaccacccctcttcttgtcaccgacgcttcctcagtatccacaggtcacgccacccctcttcctgtcaccgacacttcctcagcatccacaggtgacaccacccgtcttcctgtcacagacacttcctcagcatccacaggtcaggccacccctcttcctgtcaccagcctttcctcagtatccacaggtgacaccacccctcttcttgtcaccagcacttcctcagcatccacaggtcacgccacctctcttcctgtcaccgacacttcctcagtatccacaggtcacgccacctctcttcctgtcaccgacacttcctcagtatccacaggtcacgccacccctcttcctgtcaccgacgcttcctcagtgtccacaggtcacgccacgcctcttcctgtcaccgacacttcctcagcatccacaggtcaggccacccctcttcctgtcaccagcctttcctcagtatccacaggtgacaccatgcctcttcctgtcactgatgcttcctcagcatccacaggtcaggccacccttcttcctgtcaccagcctttcctcagtatccacaggtgacaccacgcctcttcctgtcactagcccttcctcagcatccacaggtcacgccacccctcttcttgtcaccgacacttcctcagcatccacaggacacgccacccctcttcctgtcacggacgcttcctcagtgtccacaggtcacgccacctctcttcctgtcaccgacacttcctcagtatccacaggtgacaccacgcctcttcctgtcactagcccttcctcagcatccacaggtgacaccacccctcttcctgtcaccgacgcttcctcagtatccacaggtcacaccacccctcttcctgtcaccgacacttcctcagcatccacaggtcacgccacccctcttcatgtcaccagcccttcctcagcatccacaggtcacgccacccctcttcctgtcaccagcacttcctcagcatccaccggtcacgccacctctcttcctgtcaccagcacttcctcagcatccaccggtcacgccacccctcttcctgtcaccgacaattcctcagtatccacaggtcacgccacccctcttcctgtcaccggcctttcctcagctaccacagatgacaccacccgtcttcctgtcaccgacgtttcctcggcatccacaggtcaggccacccctcttcctgtcaccagcctttcctcagtatccacaggtgacaccacgcctcttcctgtcactagcccttcctcagcatccacaggtcacgccagccctcttcttgtcactgacgcttcctcagcatccacaggtcaggccacccctcttcctgtcaccagcccttcctcagcatccacaggtgacaccacccctcttcctgtcaccgacgcttcctcagcatccacaggtcacgccacctctcttcttgtcaccgacgcttcctcagtatccacaggtgacaccacccctcttcctgtcaccgacactaactcagcatccacaggtgacaccacccctcttcatgtcaccgacgcttcctcagtatccacaggtgacaccacccctcttcctgtcaccgacacttcctcagcatccacaggtcacgccacccatcttcctgtcaccggcctttcctcagcttccacaggtgacaccacccgtcttcctgtcaccaacgtttcctcggcatccacaggtcatgccacccctcttcctgtcaccagcacttcctcagcatccacaggtgacaccacccctcttcctggcaccgacacttcctcagtatccacaggtcacaccacccctcttcttgtcaccgacgcttcgtcagtatccacaggtgacaccacccgtcttcctgtcaccagcccttcctcagcatctacaggtcacaccacccctcttcctgtcaccgacacttcctcagcatccacaggtgacaccacccctcttcctgtcaccaatgcttcctcattatccacaggtcacgccacccctcttcatgtcaccagcccttcctcagcatccacaggtcacgccacccctcttcctgtcaccagcacttcctcagcatccaccggtcacgccacccctcttcctgtcaccagcacttcctcagcatccacagatgacaccacccgtcttcctgtcaccgacgtgtcctcggcatccacaggtcaggccacccctcttcctgtcaccagcctttcctcagtatccacaggtgacaccacgcctcttcctgtcactagcccttcctcagcatccacaggtcacgccagccctcttcttgtcactgacgcttcctcagcatccacaggtcaggccacccctcttcctgtcaccggcctttcctcagcttccacagatgacaccacccgtcttcctgtcaccagcccttcctcagcatccacaggtgacaccacccctcttcctgtcaccgacgcttcctcagcatccacaggtgacaccacctctcttcctgtcaccatcccttcctcagcatcttcaggtcacaccacctctcttcctgtcaccgacgcttcctcagtgtccacaggtcacgccacctctcttcttgtcaccgacgcttcctcagtatccacaggtgacaccacccctcttcctgtcaccgacactaactcagcatccacaggtgacaccacccctcttcatgtcaccgacgcttcctcagtatccacaggtcacgccacctctcttcctgtcaccagcctttcctcagcatccacaggtgacaccacgcctcttcctgtcactagcccttcctcagcatcctcaggtcacaccacctctcttcctgtcaccgacgcttcctcagtgtccacaggtcacgccacctctcttcctgtcaccatcccttcctcagcatcctcaggtcacaccacccctcttcctgtcaccgacgcttcctcagtacccacaggtcacgccacctctcttcctgtcaccgacgcttcctcagtgtccacaggtcacgccacccctcttcctgtcaccgacgcttcctcagtgtccacaggtcatgccacccctcttcctgtcaccagcctttcctcagcatcatccactggtgacaccacgccgcttcctgtcactgatacttcctcagcatccacaggtcaggacacccctcttcctgtcaccagccttttctcagtatccacaggtgacaccacgcctcttcctgtcaccgacgcttcctcagtatccacaggtcacgccacctctcttcttgtcaccgacgcttcctcagcatccacaggtgacaccacccctcttcctgtcaccgacacttcctcagtatccacaggtcacgccacctctcttcctgtcactgacacttcctcagcatccacaggtcacgccacctctcttcctgtcaccgacacttcctcagcatccacaggtcaggccacccctcttcctgtcaccagcccttcctcagcatccacaggtcacgccatccctcttcttgtcaccgacacttcctcagcatccacaggacaggccacccctcttcctgtcaccagcctttcctcagcatccacaggtgacaccacccctcttcctgtcaccgatgcttcctcagtgtccacaggtcacgccacctctcttcctgtcaccagcctttcctcagtatccacaggtgacaccacccctcttcctgtcactagcccttcctcagcatccacaggtcacgccacccctcttcatgtcaccagcccttcctcagcatccacaggtcacgccacccctcttcctgtcaccagcctttcctcagcatccacaggtgacaccacgcctcttcctgtcactagcccttcctcagcatccacaggtcacgccacccctcttcatgtcaccgacgcttcctcagtatccacaggtgacaccacccctcttcctgtcaccagcccttcctcagcatcctcaggtcacaccacccctcttcctgtcaccgacgcttcctcagcatccacaggtcatgccacccctcttcctgtcaccagcacttcctcagcatccacaggtgacaccacccctcttcctgtcaccagcccttcctcagcatctacaggtcacaccacccctctacctgtcaccgacactccctcagcatccacaggtgacaccacccctcttcctgtcaccgacacttccgcagcatccacaggtcacgccacccctcttcctgtcaccagcacttcctcagcatccacaggtgacaccacccctcttcctgtcaccgacacttcctcagcatccacaggtcacgccacccctcttcctgtcaccaacacttcctcagtatccacaggtcacgccacccctcttcatgtcaccagcccttcctcagcatccacaggtcacaccacccctcttcctgtcaccgacgcttcgtcagtgtccacaggtcacgccacctctcttcctgtcaccgacgcttcctcagtgtccacaggtcacgccacccctcttcctgtcaccgacgcttcctcagtgtccacaggtcacgctacccctcttcctctcaccagcctttcctcagtatccacaggtgacaccacgcctcttcctgtcaccgacacttcctcagcatccacaggtcaggccacccctcttcctgtcaccagcctttcctcagtatccacaggtgacaccacccctcttcctgtcaccgacacttcctcagcatccacaggtcacgccacctctcttcctgtcaccgacacttcctcagcatccacaggtcacgccacccctcttcctgtcaccgacacttcctcaatatccacaggtcacgccacccctcttcatgtcaccagcccttcctcagcatccaccggtcacgccaccccgcttcctgtcaccgacacttcctcagcatccacaggtcacgccacccctcttcctgtcaccagcctttcctcagtatccacaggtgacaccacgcctcttcctgtcactagcccttcctcagcatccacaggtcacgccactcctcttcttgtcaccgacgcttcctcagcatccacaggtcaggccacccctcttcctgtcaccagcctttcctcagtatccacaggtgacaccacgcctcttcctgtcactagcccttcctcagcatccaccggtcatgccacctctcttcctgtcaccgacacttcctcagcatccacaggtgacaccacctctcttcctgtcaccgacacttcctcagcatacacaggtgacaccacctctcttcctgtcaccgacacttcctcatcatccacaggtgacaccacccctcttcttgtcaccgagacttcctcagcatccacaggtgacaccacccctgtgcctgtcaccgacacttcctcagtatccacaggtcacgccacccctcttcctgtcaccggcctttcctcagcttccacaggtgacaccacccgtcttcctgtcaccgacatttcctcggcatccacaggtcaggccacccctcttcctgtcaccaacacttcctcagtatccacaggtgacaccatgcctcttcctgtcactagcccttcctcagcatccacaggtcacgccacccctcttcctgtcaccagcacttcctcagcatccaccggtcacgccacccctgttcctgtcaccagcacttccttagcatccacaggtcacaccacccctcttcctgtcaccagcccttcctcagcatctacaggtcacaccacccctcttcctgtcaccgacacttcctcagcatccacaggtgacaccacccctcttcctgtcaccaatgcttcctcattatccacaggacacaccacccctcttcatgtcaccatcccttcctcagcatccacaggtgacaccagcactcttcctgtcaccggcgcttcctcagcatccaccggtcacgccacccctcttcctgtcaccgacacttcctcagtatccacaggtcacgccacccctcttcctgtcaccagcttttcctcagtatccacaggtgacaccacccctcttcctgtcaccgacgcttcctcggcatccaccggtcacgccacccctcttcctgtcaccgacacttcctcagcatccacaggtgacaccacccctcttcctgtcaccgacgcttcctcggcatccacaggtcaggccacccctcttcctgtcaccagcctttcctcagtatcaacaggtgacaccacgcctcttcctgtcaccatcccttcctcagcatcctcaggtcacaccacctctcttcctgtcagcgacacttcctcagcatccacaggtcaggccacccctcttcctgtcaccagcctttcctcagtatccacaggtgacaccacccctcttcttgtcaccgacgcttcctcagtatccacaggtcacgccacccctcttcctgtcaccgacacttcctcagcatccacaggtgacaccacccgtcttcctgtcacggacacttcctcagcatccacaggtcaggccacccctcttcctgtcaccagcctttcctcagtatccacaggtgacaccacccctcttcttgtcaccaacacttcctcagtatccacaggtcacgccacctctcttcctgtcaccatcccttcctcatcatcctcaggtcacaccacccctcttcctgtcaccagcacttcctcagtatctacaggtcacgtcacccctcttcatgtcaccagcccttcctcatcatccacaggtcaggccacccctcttcctgtcaccagcacttcctcagtatctacaggtcacgtcacccctcttcatgtcaccagcccttcctcagcatccacaggtcacgccacccctcttcctgtcaccagcacttcctcagcatccacaggtcacgccacccctcttcctgtcaccgacgcttcctcagtgtccacaggtcacgccacgcctcttcctgtcaccgacacttcctcagcatccacaggtgacaccacccctcttcctgtcaccgacacttcctcagcatccacaggtcaggccacccctcttcctgtcaccagcctttcctcagtatccacaggtcacgccacccctcttgctgtcagcagtgctacctcagcttccacagtatcctcggactcccctctgaagatggaaacatcaggaatgacaacaccgtcactgaagacagacggtgggagacgcacagccacatcaccaccccccacaacctcccagaccatcatttccaccattcccagcactgccatgcacacccgctccacagctgcccccatccccatcctgcctgagagaggagtttccctcttcccctatggggcagacgccggggacctggagttcgtcaggaggaccgtggacttcacctccccactcttcaagccggcgactggcttcccccttggctcctctctccgtgattccctctacttcacagacaatggccagatcatcttcccagagtcagactaccagattttctcctaccccaacccactcccaacaggcttcacaggccgggaccctgtggccctggtggctccgttctgggacgatgctgacttctccactggtcgggggaccacattttatcaggaatacgagacgttctatggtgaacacagcctgctagtccagcaggccgagtcttggattagaaagatgacaaacaacgggggctacaaggccaggtgggccctaaaggtcacgtgggtcaatgcccacgcctatcctgcccagtggaccctcgggagcaacacctaccaagccatcctctccacggacgggagcaggtcctatgccctgtttctctaccagagcggtgggatgcagtgggacgtggcccagcgctcaggcaacccggtgctcatgggcttctctagtggagatggctatttcgaaaacagcccactgatgtcccagccagtgtgggagaggtatcgccctgatagattcctgaattccaactcaggcctccaagggctgcagttctacaggctacaccgggaagaaaggcccaactaccgtctcgagtgcctgcagtggctgaagagccagcctcggtggcccagctggggctggaaccaggtctcctgcccttgttcctggcagcagggacgacgggacttacgattccaacccgtcagcataggtcgctggggcctcggcagtaggcagctgtgcagcttcacctcttggcgaggaggcgtgtgctgcagctacgggccctggggagagtttcgtgaaggctggcacgtgcagcgtccttggcagttggcccaggaactggagccacagagctggtgctgccgctggaatgacaagccctacctctgtgccctgtaccagcagaggcggccccacgtgggctgtgctacatacaggcccccacagcccgcctggatgttcggggacccccacatcaccaccttggatggtgtcagttacaccttcaatgggctgggggacttcctgctggtcggggcccaagacgggaactcctccttcctgcttcagggccgcaccgcccagactggctcagcccaggccaccaacttcatcgcctttgcggctcagtaccgctccagcagcctgggccccgtcacggtccaatggctccttgagcctcacgacgcaatccgtgtcctgctggataaccagactgtgacatttcagcctgaccatgaagacggcggaggccaggagacgttcaacgccaccggagtcctcctgagccgcaacggctctgaggtctcggccagcttcgacggctgggccaccgtctcggtgatcgcgctctccaacatcctccacgcctccgccagcctcccgcccgagtaccagaaccgcacggaggggctcctgggggtctggaataacaatccagaggacgacttcaggatgcccaatggctccaccattcccccagggagccctgaggagatgcttttccactttggaatgacctggcagatcaacgggacaggcctccttggcaagaggaatgaccagctgccttccaacttcacccctgttttctactcacaactgcaaaaaaacagctcctgggctgaacatttgatctccaactgtgacggagatagctcatgcatctatgacaccctggccctgcgcaacgcaagcatcggacttcacacgagggaagtcagtaaaaactacgagcaggcgaacgccaccctcaatcagtacccgccctccatcaatggtggtcgtgtgattgaagcctacaaggggcagaccacgctgattcagtacaccagcaatgctgaggatgccaacttcacgctcagagacagctgcaccgacttggagctctttgagaatgggacgttgctgtggacacccaagtcgctggagccattcactctggagattctagcaagaagtgccaagattggcttggcatctgcactccagcccaggactgtggtctgccattgcaatgcagagagccagtgtttgtacaatcagaccagcagggtgggcaactcctccctggaggtggctggctgcaagtgtgacgggggcaccttcggccgctactgcgagggctccgaggatgcctgtgaggagccgtgcttcccgagtgtccactgcgttcctgggaagggctgcgaggcctgccctccaaacctgactggggatgggcggcactgtgcggctctggggagctctttcctgtgtcagaaccagtcctgccctgtgaattactgctacaatcaaggccactgctacatctcccagactctgggctgtcagcccatgtgcacctgccccccagccttcactgacagccgctgcttcctggctgggaacaacttcagtccaactgtcaacctagaacttcccttaagagtcatccagctcttgctcagtgaagaggaaaatgcctccatggcagaagtcaacgcctcggtggcatacagactggggaccctggacatgcgggcctttctccgcaacagccaagtggaacgaatcgattctgcagcaccggcctcgggaagccccatccaacactggatggtcatctcggagttccagtaccgccctcggggcccggtcattgacttcctgaacaaccagctgctggccgcggtggtggaggcgttcttataccacgttccacggaggagtgaggagcccaggaacgacgtggtcttccagcccatctccggggaagacgtgcgcgatgtgacagccctgaacgtgagcacgctgaaggcttacttcagatgcgatggctacaagggctacgacctggtctacagcccccagagcggcttcacctgcgtgtccccgtgcagtaggggctactgtgaccatggaggccagtgccagcacctgcccagtgggccccgctgcagctgtgtgtccttctccatctacacggcctggggcgagcactgtgagcacctgagcatgaaactcgacgcgttcttcggcatcttctttggggccctgggcggcctcttgctgctgggggtcgggacgttcgtggtcctgcgcttctggggttgctccggggccaggttctcctatttcctgaactcagctgaggccttgccttgaaggggcagctgtggcctaggctacctcaagactcacctcatccttaccgcacatttaaggcgccattgcttttgggagactggaaaagggaaggtgactgaaggctgtcaggattcttcaaggagaatgaatactgggaatcaagacaagactataccttatccataggcgcaggtgcacagggggaggccataaagatcaaacatgcatggatgggtcctcacgcagacacacccacagaaggacactagcctgtgcacgcgcgcgtgcacacacacacacacacacacgagttcataatgtggtgatggccctaagttaagcaaaatgcttctgcacacaaaactctctggtttacttcaaattaactctatttaaataaagtctctctgactttttgtgtctcc

SEQ ID NO: 155662 - DNA, 6550 bp, Homo sapiens
  Payload ID: 10597
  Gene Symbol: MUC4
  Gene Name: mucin 4, cell surface associated
  ENST ID: ENST00000617663
  CDS Start-End: 1-6432
ccaggaaccacagaggacacattaataactggaagtaaaactcctgccccagtcacctcaacaggctcaacaacagcgacactagagggacaatcaactgcagcttcttcaaggacctctaatcaggacatatcagcttcatctcagaaccaccagactaagagcacggagaccaccagcaaagctcaaaccgacaccctcacgcagatgatgacatcaactcttttttcttccccaagtgtacacaatgtgatggagactgttacgcaggagacagctcctccagatgaaatgaccacatcatttccctccagtgtcaccaacacactcatgatgacatcaaagactataacaatgacaacctccacagactccactcttggaaacacagaagagacatcaacagcaggaactgaaagttctaccccagtgacctcagcagtctcaataacagctggacaggaaggacaatcacgaacaacttcctggaggacctctatccaagacacatcagcttcttctcagaaccactggactcggagcacgcagaccaccagggaatctcaaaccagcaccctaacacacagaaccacttcaactccttctttctctccaagtgtacacaatgtgacagggactgtttctcagaagacatctccttcaggtgaaacagctacctcatccctctgtagtgtcacaaacacatccatgatgacatcagagaagataacagtgacaacctccacaggctccactcttggaaacccaggggagacatcatcagtacctgttactggaagtcttatgccagtcacctcagcagccttagtaacagttgatccagaaggacaatcaccagtaactttctcaaggacttctactcaggacacaacagctttttctaagaaccaccagactcagagcgtggagaccaccagagtatctcaaatcaacaccctcaacaccctcacaccggttacaacatcaactgttttatcctcaccaagtggattcaacccaagtggaacagtttctcaggagacattcccttctggtgaaacaaccatctcatccccttccagtgtcagcaatacattcctggtaacatcaaaggtgttcagaatgccaatctccagagactctactcttggaaacacagaggagacatcactatctgtaagtggaaccatttctgcaatcacttccaaagtttcaaccatatggtggtcagacactctgtcaacagcactctcccccagttctctacctccaaaaatatccacagctttccacacccagcagagtgaaggtgcagagaccacaggacggcctcatgagaggagctcattctctccaggtgtgtctcaagaaatatttactctacatgaaacaacaacatggccttcctcattctccagcaaaggccacacaacttggtcacaaacagaactgccctcaacatcaacaggtgctgccactaggcttgtcacaggaaatccatctacaggggcagctggcactattccaagggtcccctctaaggtctcagcaataggggaaccaggagagcccaccacatactcctcccacagcacaactctcccaaaaacaacaggggcaggcgcccagacacaatggacacaagaaacggggaccactggagaggctcttctcagcagcccaagctacagtgtgactcagatgataaaaacggccacatccccatcttcttcacctatgctggatagacacacatcacaacaaattacaacggcaccatcaacaaatcattcaacaatacattccacaagcacctctcctcaggaatcaccagctgtttcccaaaggggtcacactcaagccccgcagaccacacaagaatcacaaaccacgaggtccgtctcccccatgactgacaccaagacagtcaccaccccaggttcttccttcacagccagtgggcactcgccctcagaaattgttcctcaggacgcacccaccataagtgcagcaacaacctttgccccagctcccaccggggatggtcacacaacccaggccccgaccacagcactgcaggcagcacccagcagccatgatgccaccctggggccctcaggaggcacgtcactttccaaaacaggtgcccttactctggccaactctgtagtgtcaacaccagggggcccagaaggacaatggacatcagcctctgccagcacctcacctgacacagcagcagccatgacccatacccaccaggctgagagcacagaggcctctggacaaacacagaccagcgaaccggcctcctcagggtcacgaaccacctcagcgggcacagctaccccttcctcatccggggcgagtggcacaacaccttcaggaagcgaaggaatatccacctcaggagagacgacaaggttttcatcaaacccctccagggacagtcacacaacccagtcaacaaccgaattgctgtccgcctcagccagtcatggtgccatcccagtaagcacaggaatggcgtcttcgatcgtccccggcacctttcatcccaccctctctgaggcctccactgcagggagaccgacaggacagtcaagcccaacttctcccagtgcctctcctcaggagacagccgccatttcccggatggcccagactcagaggacaagaaccagcagagggtctgacactatcagcctggcgtcccaggcaaccgacaccttctcaacagtcccacccacacctccatcgatcacatccagtgggcttacatctccacaaacccagacccacactctgtcaccttcagggtctggtaaaaccttcaccacggccctcatcagcaacgccacccctcttcctgtcacctacgcttcctcggcatccacaggtcacgccacccctcttgctgtcagcagtgctacctcagcttccacagtatcctcggactcccctctgaagatggaaacatcaggaatgacaacaccgtcactgaagacagacggtgggagacgcacagccacatcaccaccccccacaacctcccagaccatcatttccaccattcccagcactgccatgcacacccgctccacagctgcccccatccccatcctgcctgagagaggagtttccctcttcccctatggggcagacgccggggacctggagttcgtcaggaggaccgtggacttcacctccccactcttcaagccggcgactggcttcccccttggctcctctctccgtgattccctctacttcacagacaatggccagatcatcttcccagagtcagactaccagattttctcctaccccaacccactcccaacaggcttcacaggccgggaccctgtggccctggtggctccgttctgggacgatgctgacttctccactggtcgggggaccacattttatcaggaatacgagacgttctatggtgaacacagcctgctagtccagcaggccgagtcttggattagaaagatgacaaacaacgggggctacaaggccaggtgggccctaaaggtcacgtgggtcaatgcccacgcctatcctgcccagtggaccctcgggagcaacacctaccaagccatcctctccacggacgggagcaggtcctatgccctgtttctctaccagagcggtgggatgcagtgggacgtggcccagcgctcaggcaacccggtgctcatgggcttctctagtggagatggctatttcgaaaacagcccactgatgtcccagccagtgtgggagaggtatcgccctgatagattcctgaattccaactcaggcctccaagggctgcagttctacaggctacaccgggaagaaaggcccaactaccgtctcgagtgcctgcagtggctgaagagccagcctcggtggcccagctggggctggaaccaggtctcctgcccttgttcctggcagcagggacgacgggacttacgattccaacccgtcagcataggtcgctggggcctcggcagtaggcagctgtgcagcttcacctcttggcgaggaggcgtgtgctgcagctacgggccctggggagagtttcgtgaaggctggcacgtgcagcgtccttggcagttggcccaggaactggagccacagagctggtgctgccgctggaatgacaagccctacctctgtgccctgtaccagcagaggcggccccacgtgggctgtgctacatacaggcccccacagcccgcctggatgttcggggacccccacatcaccaccttggatggtgtcagttacaccttcaatgggctgggggacttcctgctggtcggggcccaagacgggaactcctccttcctgcttcagggccgcaccgcccagactggctcagcccaggccaccaacttcatcgcctttgcggctcagtaccgctccagcagcctgggccccgtcacggtccaatggctccttgagcctcacgacgcaatccgtgtcctgctggataaccagactgtgacatttcagcctgaccatgaagacggcggaggccaggagacgttcaacgccaccggagtcctcctgagccgcaacggctctgaggtctcggccagcttcgacggctgggccaccgtctcggtgatcgcgctctccaacatcctccacgcctccgccagcctcccgcccgagtaccagaaccgcacggaggggctcctgggggtctggaataacaatccagaggacgacttcaggatgcccaatggctccaccattcccccagggagccctgaggagatgcttttccactttggaatgacctggcagatcaacgggacaggcctccttggcaagaggaatgaccagctgccttccaacttcacccctgttttctactcacaactgcaaaaaaacagctcctgggctgaacatttgatctccaactgtgacggagatagctcatgcatctatgacaccctggccctgcgcaacgcaagcatcggacttcacacgagggaagtcagtaaaaactacgagcaggcgaacgccaccctcaatcagtacccgccctccatcaatggtggtcgtgtgattgaagcctacaaggggcagaccacgctgattcagtacaccagcaatgctgaggatgccaacttcacgctcagagacagctgcaccgacttggagctctttgagaatgggacgttgctgtggacacccaagtcgctggagccattcactctggagattctagcaagaagtgccaagattggcttggcatctgcactccagcccaggactgtggtctgccattgcaatgcagagagccagtgtttgtacaatcagaccagcagggtgggcaactcctccctggaggtggctggctgcaagtgtgacgggggcaccttcggccgctactgcgagggctccgaggatgcctgtgaggagccgtgcttcccgagtgtccactgcgttcctgggaagggctgcgaggcctgccctccaaacctgactggggatgggcggcactgtgcggctctggggagctctttcctgtgtcagaaccagtcctgccctgtgaattactgctacaatcaaggccactgctacatctcccagactctgggctgtcagcccatgtgcacctgccccccagccttcactgacagccgctgcttcctggctgggaacaacttcagtccaactgtcaacctagaacttcccttaagagtcatccagctcttgctcagtgaagaggaaaatgcctccatggcagaagtcaacgcctcggtggcatacagactggggaccctggacatgcgggcctttctccgcaacagccaagtggaacgaatcgattctgcagcaccggcctcgggaagccccatccaacactggatggtcatctcggagttccagtaccgccctcggggcccggtcattgacttcctgaacaaccagctgctggccgcggtggtggaggcgttcttataccacgttccacggaggagtgaggagcccaggaacgacgtggtcttccagcccatctccggggaagacgtgcgcgatgtgacagccctgaacgtgagcacgctgaaggcttacttcagatgcgatggctacaagggctacgacctggtctacagcccccagagcggcttcacctgcgtgtccccgtgcagtaggggctactgtgaccatggaggccagtgccagcacctgcccagtgggccccgctgcagctgtgtgtccttctccatctacacggcctggggcgagcactgtgagcacctgagcatgaaactcgacgcgttcttcggcatcttctttggggccctgggcggcctcttgctgctgggggtcgggacgttcgtggtcctgcgcttctggggttgctccggggccaggttctcctatttcctgaactcagctgaggccttgccttgaaggggcagctgtggcctaggctacctcaagactcacctcatccttaccgcacatttaaggcgccattgcttttgggagactggaaaagggaaggtgactgaaggctgtcaggattctt

SEQ ID NO: 155663 - DNA, 3860 bp, Homo sapiens
  Payload ID: 10597
  Gene Symbol: MUC4
  Gene Name: mucin 4, cell surface associated
  ENST ID: ENST00000612476
  CDS Start-End: 1-3449
gaatgacaacaccgtcactgaagacagacggtgggagacgcacagccacatcaccaccccccacaacctcccagaccatcatttccaccattcccagcactgccatgcacacccgctccacagctgcccccatccccatcctgcctgagagaggagtttccctcttcccctatggggcaggcgccggggacctggagttcgtcaggaggaccgtggacttcacctccccactcttcaagccggcgactggcttcccccttggctcctctctccgtgattccctctacttcacagacaatggccagatcatcttcccagagtcagactaccagattttctcctaccccaacccactcccaacaggcttcacaggccgggaccctgtggccctggtggctccgttctgggacgatgctgacttctccactggtcgggggaccacattttatcaggaatacgagacgttctatggtgaacacagcctgctagtccagcaggccgagtcttggattagaaagatgacaaacaacgggggctacaaggccaggtgggccctaaaggtcacgtgggtcaatgcccacgcctatcctgcccagtggaccctcgggagcaacacctaccaagccatcctctccacggacgggagcaggtcctatgccctgtttctctaccagagcggtgggatgcagtgggacgtggcccagcgctcaggcaacccggtgctcatgggcttctctagtggagatggctatttcgaaaacagcccactgatgtcccagccagtgtgggagaggtatcgccctgatagattcctgaattccaactcaggcctccaagggctgcagttctacaggctacaccgggaagaaaggcccaactaccgtctcgagtgcctgcagtggctgaagagccagcctcggtggcccagctggggctggaaccaggtctcctgcccttgttcctggcagcagggacgacgggacttacgattccaacccgtcagcataggtcgctggggcctcggcagtaggcagctgtgcagcttcacctcttggcgaggaggcgtgtgctgcagctacgggccctggggagagtttcgtgaaggctggcacgtgcagcgtccttggcagttggcccaggaactggagccacagagctggtgctgccgctggaatgacaagccctacctctgtgccctgtaccagcagaggcggccccacgtgggctgtgctacatacaggcccccacagcccgcctggatgttcggggacccccacatcaccaccttggatggtgtcagttacaccttcaatgggctgggggacttcctgctggtcggggcccaagacgggaactcctccttcctgcttcagggccgcaccgcccagactggctcagcccaggccaccaacttcatcgcctttgcggctcagtaccgctccagcagcctgggccccgtcacggtccaatggctccttgagcctcacgacgcaatccgtgtcctgctggataaccagactgtgacatttcagcctgaccatgaagacggcggaggccaggagacgttcaacgccaccggagtcctcctgagccgcaacggctctgaggtctcggccagcttcgacggctgggccaccgtctcggtgatcgcgctctccaacatcctccacgcctccgccagcctcccgcccgagtaccagaaccgcacggaggggctcctgggggtctggaataacaatccagaggacgacttcaggatgcccaatggctccaccattcccccagggagccctgaggagatgcttttccactttggaatgacctggcagatcaacgggacaggcctccttggcaagaggaatgaccagctgccttccaacttcacccctgttttctactcacaactgcaaaaaaacagctcctgggctgaacatttgatctccaactgtgacggagatagctcatgcatctatgacaccctggccctgcgcaacgcaagcatcggacttcacacgagggaagtcagtaaaaactacgagcaggcgaacgccaccctcaatcagtacccgccctccatcaatggtggtcgtgtgattgaagcctacaaggggcagaccacgctgattcagtacaccagcaatgctgaggatgccaacttcacgctcagagacagctgcaccgacttggagctctttgagaatgggacgttgctgtggacacccaagtcgctggagccattcactctggagattctagcaagaagtgccaagattggcttggcatctgcactccagcccaggactgtggtctgccattgcaatgcagagagccagtgtttgtacaatcagaccagcagggtgggcaactcctccctggaggtggctggctgcaagtgtgacgggggcaccttcggccgctactgcgagggctccgaggatgcctgtgaggagccgtgcttcccgagtgtccactgcgttcctgggaagggctgcgaggcctgccctccaaacctgactggggatgggcggcactgtgcggctctggggagctctttcctgtgtcagaaccagtcctgccctgtgaattactgctacaatcaaggccactgctacatctcccagactctgggctgtcagcccatgtgcacctgccccccagccttcactgacagccgctgcttcctggctgggaacaacttcagtccaactgtcaacctagaacttcccttaagagtcatccagctcttgctcagtgaagaggaaaatgcctccatggcagaagtcaacgcctcggtggcatacagactggggaccctggacatgcgggcctttctccgcaacagccaagtggaacgaatcgattctgcagcaccggcctcgggaagccccatccaacactggatggtcatctcggagttccagtaccgccctcggggcccggtcattgacttcctgaacaaccagctgctggccgcggtggtggaggcgttcttataccacgttccacggaggagtgaggagcccaggaacgacgtggtcttccagcccatctccggggaagacgtgcgcgatgtgacagccctgaacgtgagcacgctgaaggcttacttcagatgcgatggctacaagggctacgacctggtctacagcccccagagcggcttcacctgcgtgtccccgtgcagtaggggctactgtgaccatggaggccagtgccagcacctgcccagtgggccccgctgcagctgtgtgtccttctccatctacacggcctggggcgagcactgtgagcacctgagcatgaaactcgacgcgttcttcggcatcttctttggggccctgggcggcctcttgctgctgggggtcgggacgttcgtggtcctgcgcttctggggttgctccggggccaggttctcctatttcctgaactcagctgaggccttgccttgaaggggcagctgtggcctaggctacctcaagactcacctcatccttaccgcacatttaaggcgccattgcttttgggagactggaaaagggaaggtgactgaaggctgtcaggattcttcaaggagaatgaatactgggaatcaagacaagactataccttatccataggcgcaggtgcacagggggaggccataaagatcaaacatgcatggatgggtcctcacgcagacacacccacagaaggacactagcctgtgcacgcgcgcgtgcacacacacacacacacacacgagttcataatgtggtgatggccctaagttaagcaaaatgcttctgcacacaaaactctctggtttacttcaaattaactctatttaaataaagtctctctgactttttgtgtctccaaaa

SEQ ID NO: 155664 - DNA, 16568 bp, Homo sapiens
  Payload ID: 10597
  Gene Symbol: MUC4
  Gene Name: mucin 4, cell surface associated
  ENST ID: ENST00000621966
  CDS Start-End: 1-16157
gaaccacagaggacacattaataactggaagtaaaactgctgccccagtcacctcaacaggctcaacaacagcgacactagagggacaatcaactgcagcttcttcaaggacctctaatcaggacatatcagcttcatctcagaaccaccagactaagagcacggagaccaccagcaaagctcaaaccgacaccctcacgcagatgatgacatcaactcttttttcttccccaagtgtacacaatgtgatggagacagctcctccagatgaaatgaccacatcatttccctccagtgtcaccaacacactcatgatgacatcaaagactataacaatgacaacctccacagactccactcttggaaacacagaagagacatcaacagcaggaactgaaagttctaccccagtgacctcagcagtctcaataacagctggacaggaaggacaatcacgaacaacttcctggaggacctctatccaagacacatcagcttcttctcagaaccactggactcggagcacgcagaccaccagggaatctcaaaccagcaccctaacacacagaaccacttcaactccttctttctctccaagtgtacacaatgtgacagggactgtttctcagaagacatctccttcaggtgaaacagctacctcatccctctgtagtgtcacaaacacatccatgatgacatcagagaagataacagtgacaacctccacaggctccactcttggaaacccaggggagacatcatcagtacctgttactggaagtcttatgccagtcacctcagcagccttagtaacatttgatccagaaggacaatcaccagcaactttctcaaggacttctactcaggacacaacagctttttctaagaaccaccagactcagagcgtggagaccaccagagtatctcaaatcaacaccctcaacaccctcacaccggttacaacatcaactgttttatcctcaccaagtggattcaacccaagtggaacagtttctcaggagacattcccttctggtgaaacaaccacctcatccccttccagtgtcagcaatacattcctggtaacatcaaaggtgttcagaatgccaacctccagagactctactcttggaaacacagaggagacatcactatctgtaagtggaaccatttctgcaatcacttccaaagtttcaaccatatggtggtcagacactctgtcaacagcactctcccccagttctctacctccaaaaatatccacagctttccacacccagcagagtgaaggtgcagagaccacaggacggcctcatgagaggagctcattctctccaggtgtgtctcaagaaatatttactctacatgaaacaacaacatggccttcctcattctccagcaaaggccacacaacttggtcacaaacagaactgccctcaacatcaacaggtgctgccactaggcttgtcacaggaaatccatctacagggacagctggcactattccaagggtcccctctaaggtctcagcaataggggaaccaggagagcccaccacatactcctcccacagcacaactctcccaaaaacaacaggggcaggcgcccagacacaatggacacaagaaacggggaccactggagaggctcttctcagcagcccaagctacagtgtgactcagatgataaaaacggccacatccccatcttcttcacctatgctggatagacacacatcccaacaaattacaacggcaccatcaacaaatcattcaacaatacattccacaagcacctctcctcaggaatcaccagctgtttcccaaaggggtcacactcaagccccgcagaccacacaagaatcacaaaccacgaggtccgtctcccccatgactgacaccaagacagtcaccaccccaggttcttccttcacagccagtgggcactcgccctcagaaattgttcctcaggacgcacccaccataagtgcagcaacaacctttgccccagctcccaccggggatggtcacacaacccaggccccgaccacagcactgcaggcagcacccagcagccatgatgccaccctggggccctcaggaggcacgtcactttccaaaacaggtgcccttactctggccaactctgtagtgtcaacaccagggggcccagaaggacaatggacatcagcctctgccagcacctcacctgacacagcagcagccatgacccatacccaccaggctgagagcacagaggcctctggacaaacacagaccagcgaaccggcctcctcagggtcacgaaccacctcagcgggcacagctaccccttcctcatccggggcgagtggcacaacaccttcaggaagcgaaggaatatccacctcaggagagacgacaaggttttcatcaaacccctccagggacagtcacacaacccagtcaacaaccgaattgctgtccgcctcagccagtcatggtgccatcccagtaagcacaggaatggcgtcttcgatcgtccccggcacctttcatcccaccctctctgaggcctccactgcagggagaccgacaggacagtcaagcccaacttctcccagtgcctctcctcaggagacagccgccatttcccggatggcccagactcagaggacaagaaccagcagagggtctgacactatcagcctggcgtcccaggcaaccgacaccttctcaacagtcccacccacacctccatcgatcacatccactgggcttacatctccacaaaccgagacccacactctgtcaccttcagggtctggtaaaaccttcaccacggccctcatcagcaacgccacccctcttcctgtcacctacgcttcctcggcatccacaggtcacaccacccctcttcatgtcaccgatgcttcctcagtatccacaggtcacgccacccctcttcctgtcaccagcccttcctcagtatccacaggtcacaccacccctcttcctgtcaccgacacttcctcagaatccacaggtcacgtcacccctcttcctgtcaccagcttttcctcagcatccacaggtgacagcacccctcttcctgtcactgacacttcctcagcatccacaggtcacgtcacccctcttcctgtcaccagcctttcctcagcatccacaggtgacaccacccctcttcctgtcactgacacttcctcagcatccacaggtcacgccacctctcttcctgtcaccgacacttcctcagtatccacaggtcacaccacccctcttcctgtcaccgacacttcctcagcatccacaggtcacgccacctctcttcctgtcaccgacacttcctcagtatccacaggtcacaccacccctcttcatgtcactgatgcttcctcagcatccacaggtcaggccacccctcttcctgtcaccagcctttcctcagtatccacaggtgacaccacgcctcttcctgtcactagcccttcctcagcatccacaggtcacgccacccctcttcttgtcaccgacacttcctcagcatccacaggacacgccacccctcttcctgtcaccgacgcttcctcagtgtccacagatcacgccacctctcttcctgtaaccatcccttccgcagcatccacaggtcacaccacccctcttcctgtcaccgacacttcctcagcatccacaggtcaggccacctctcttcttgtcaccgacacttcctcagtatccacaggtgacaccacgcctcttcctgtcactagcacttcctcagcatccacaggtcacgtcactcctcttcatgtcaccagcccttcctcagcatccacaggtcacgccacccctcttcctgtcaccagcctttcctcagcatccacaggtgacaccatgcctcttcctgtcactagcccttcctcagcatccacaggtgacaccacccctcttcctgtcaccgacgcttcctcagtatccacaggtcacaccacccctcttcatgtcactgatgcttcctcagcatccacaggtcaggccacccctcttcctgtcaccagcctttcctcagtatccacaggtgacaccacgcctcttcctgtcactagcccttcctcagcatccacaggtcacgccacccctcttcttgtcaccgacacttcctcagcatccacaggacacgccacccctcttcctgtcaccgacgcttcctcagtgtccacagatcacgccacctctcttcctgtaaccatcccttccgcagcatccacaggtcacaccacccctcttcctgtcaccgacacttcctcagcatccacaggtcaggccacctctcttcttgtcaccgacacttcctcagtatccacaggtgacaccacgcctcttcctgtcactagcacttcctcagcatccacaggtcacgtcactcctcttcatgtcaccagcccttcctcagcatccacaggtcacgccacccctcttcctgtcaccagcctttcctcagcatccacaggtgacaccatgcctcttcctgtcactagcccttcctcagcatccacaggtgacaccacccctcttcctgtcaccgacgcttcctcagtatccacaggtcacaccacccctcttcctgtcaccagcccttcctcagcatctacaggtcacaccacccctcttcctgtcaccgacacttcctcagcatccaaaggtgacaccacccctcttcctgtcaccagcccttcctcagcatctacaggtcacaccacccctcttcctgtcaccgacacttcctcagcatccacaggtgacaccacccctcttcctgtcaccaatgcttcctcattatccacaggtcacgccacccctcttcatgtcaccagcccttcctcagcatccacaggtcacgccacccctcttcctgtcaccagcacttcctcagcatccaccggtcacgccacccctcttcctgtcaccggcctttcctcagctaccacagatgacaccacccgtcttcctgtcaccgacgtttcctcggcatccacaggtcaggccacccctcttcctgtcaccagcctttcctcagtatccacaggtgacaccacgcctcttcctgtcactagcccttcctcagcatccacaggtcacgccagccctcttcttgtcactgacgcttcctcagcatccacaggtcaggccacccctcttcctgtcaccgacacttcctcagtatccacagctcacgccaccccacttcctgtcaccggcctttcttcagcttccacagatgacaccacccgtcttcctgtcaccgacgtttcctcggcatccacaggtcaggccatccctcttcctgtcaccagcccttcctcagcatccacaggtgacaccacccctcttcctgtcaccgacgcttcctcagcatccacaggtgacaccacctctcttcctgtcaccatcccttcctcagcatcttcaggtcacaccacctctcttcctgtcaccgacgcttcctcagtgtccacaggtcacgccacctctcttcttgtcaccgacgcttcctcagtatccacaggtgacaccacccctcttcctgtcaccgacactaactcagcatccacaggtgacaccacccctcttcatgtcaccgacgcttcctcagtatccacaggtcacgccacctctcttcctgtcaccagcctttcctcagcatccacaggtgacaccacgcctcttcctgtcactagcccttcctcagcatcctcaggtcacaccacccctcttcctgtcaccgacgcttcctcagtacccacaggtcacgccacctctcttcctgtcaccgacgcttcctcagtgtccacaggtcacgccacccctcttcctgtcaccgacgcttcctcagtgtccacaggtcatgccacccctcttccggtcaccgacacttcctcagtatctacaggacaggccacccctcttcctgtcaccagcctttcctcagcatccactggtgacaccacgccgcttcctgtcaccgatacttcctcagcatccacaggtcaggacacccctcttcctgtcaccagcctttcctcagtatccacaggtgacaccacgcctcttcctgtcactaacccttcctcagcatccacaggtcacgccacccctcttcttgtcaccgacgcttcctcaatatccacaggtcacgccacctctcttcttgtcaccgacgcttcctcagtatccacaggtcacgccaccgctcttcatgacaccgatgcttcctcattatccacaggggacaccacccctcttcctgtcaccagcccttcctcaacatccacaggtgacaccacccctcttcctgtcaccgaaacttcctcagtatccacaggtcacgccacctctcttcctgtcaccgacacttcctcagcatccacaggtcacgccacctctcttcctgtcaccgacacttcctcagcatccacaggtcacgccacccctcttcctgtcaccgacacttcctcagcatccacaggtcaggccacccctcttcctgtcaccagcccttcctcagcatccacaggtcacgccatccctcttcttgtcaccgacacttcctcagcatccacaggacaggccacccctcttcctgtcaccagcctttcctcagcatccacaggtgacaccacccctcttcctgtcaccgacgcttcctcagtgtccacaggtcacgccacctctcttcctgtcaccagcctttcctcagtatccacaggtgacaccactcctcttcctgtcactagcccttcctcagcatccacaggtcacgccacccctcttcatgtcaccgacgcttcctcagcatccacaggtcacgccacccctcttcctgtcaccagcctttcctcagcatccacaggtgacaccacgcctcttcctgtcactagcccttcctcagcatccacaggtcacgccacccctcttcatgtcaccgacgcttcctcagtatccacaggtgacaccacccctcttcctgtcaccagctcttcctcagcatcctcaggtcacaccacccctcttcctgtcaccgacgcttcctcagcatccacaggtgacaccacccctcttcctgtcaccgacacttcctcagcatccacaggtcacgccacccatcttcctgtcaccggcctttcctcagcttccacaggtgacaccacccgtcttcctgtcaccaacgtttcctcggcatccacaggtcatgccacccctcttcctgtcaccagcacttcctcagcatccacaggtgacaccacccctcttcctggcaccgacacttcctcagtatccacaggtcacaccacccctcttcttgtcaccgacgcttcgtcagtatccacaggtgacaccacccgtcttcctgtcaccagcccttcctcagcatctacaggtcacaccacccctctacctgtcaccgacactccctcagcatccacaggtgacaccacccctcttcctgtcaccaatgcttcctcattatccacacgtcacgccacctctcttcatgtcaccagcccttcctcagcatccacaggtcacgccacctctcttcctgtcaccgacacttccgcagcatccacaggtcacgccacccctcttcctgtcaccagcacttcctcagcatccacaggtgacaccacccctcttcctgtcaccgacacttactcagcatccacaggtcaggccacccctcttcctgtcaccagcctttcctcagtatccacaggtgacaccacgcctcttcctgtcactagcccttcctcagcatccacaggtcacgccactcctcttcttgtcaccgacgcttcctcagcatccacaggtcaggccacccctcttcctgtcaccagcctttcctcagtatccacaggtgacaccacgcctcttcctgtcactagcccttcctcagcatccaccggtcatgccacctctcttcctgtcaccgacacttcctcagcatccacaggtgacaccacctctcttcctgtcaccgacacttcctcagcatacacaggtgacaccacctctcttcctgtcaccgacacttcctcatcatccacaggtgacaccacccctcttcttgtcaccgagacttcctcagtatccacaggtgacaccacccctcttcctgtcaccgacacttcctcagcatccacaggtcacgccacccctcttcctgtcaccaacacttcctcagtatccacaggtcacgccacccctcttcatgtcaccagcccttcctcagcatccacaggtcacaccacccctcttcctgtcaccgacgcttcgtcagtgtccacaggtcacgccacctctcttcctgtcaccgacgcttcctcagtgttcacaggtcatgccacctctcttcctgtcaccatcccttcctcagcatcctcaggtcacaccacccctcttcctgtcaccgacgcttcctcagtgtccacaggtcacgccacctctcttcctgtcaccgacgcttcctcagtgtccacaggtcatgccacccctcttcctgtcaccgacgcttcctcagtgtccacaggtcacgctacccctcttcctctcaccagcctttcctcagtatccacaggtgacaccacgcctcttcctgtcaccgacacttcctcagcatccacaggtcaggccacccctcttcctgtcaccagcctttcctcagtatccacaggtgacaccacccctcttcctgtcaccgacacttcctcagcatccacaggtcacgccacctctcttcctgtcaccgacacttcctcagcatccacaggtcacgccacccctcttcctgacaccgacacttcctcagcatccacaggtcacgccacccttcttcctgtcaccgacacttcctcagcatccataggtcacgccacctctcttcctgtcaccgacacttcctcaatatccacaggtcacgccacccctcttcatgtcaccagcccttcctcagcatccaccggtcacgccaccccgcttcctgtcaccgacacttcctcagcatccacaggtcacgccaaccctcttcatgtcaccagcccttcctcagcatccaccggtcacgccaccccgcttcctgtcaccgacacttcctcagcatccacaggtcacgccacccctcttcctgtcaccagcctttcctcagtatccacaggtgacaccacgcctcttcctgtcactagcccttcctcagcatccacaggtcacaccacccctcttcctgtcaccgacacttcctcagcatccacaggtcaggccaccgctcttcctgtcaccagcacttcctcagcatccacaggtgacaccacccctcttcctgtcaccgacacttcctcagcatccacaggtcaggccacccctcttcctgtcaccagcctttcctcagtatccacaggtgacaccacgcctcttcctgtcactagcccttcctcagcatccacaggtcacgccactcctcttcttgtcaccgacgcttcctcagcatccacaggtcaggccacccctcttcctgtcaccagcctttcctcagtatccacaggtgacaccacgcctcttcctgtcactagcccttcctcagcatccaccggtcatgccacctctcttcctgtcaccgacacttcctcagcatccacaggtgacaccacctctcttcctgtcaccgacacttcctcagcatacacaggtgacaccacctctcttcctgtcaccgacacttcctcatcatccacaggtgacaccacccctcttcttgtcaccgagacttcctcagtatccacaggtcacgccactcctcttcttgtcaccgacgcttcctcagcatccacaggtcacgccacccctcttcatgtcaccagcccttcctcagcatccacaggtgacaccacccctgtgcctgtcaccgacacttcctcagtatccacaggtcacgccacccctcttcctgtcaccggcctttcctcagcttccacaggtgacaccacccgtcttcctgtcaccgacatttcctcggcatccacaggtcaggccacccctcttcctgtcaccaacacttcctcagtatccacaggtgacaccatgcctcttcctgtcactagcccttcctcagcatccacaggtcacgccacccctcttcctgtcaccagcacttcctcagcatccaccggtcacgccacccctgttcctgtcaccagcacttcctcagcatctacaggtcacaccacccctcttcctgtcaccgacacttcctcagcatccacaggtgacaccacccctcttcctgtcaccagcccttcctcagcatctacaggtcacaccacccctcttcatgtcaccatcccttcctcagcatccacaggtgacaccagcactcttcctgtcaccggcgcttcctcagcatccaccggtcacgccacccctcttcctgtcaccgacacttcctcagtatccaccggtcacgccacgcctcttcctgtcaccagcctttcctcagtatccacaggtgacaccacccctcttcctgtcaccgacgcttcctcggcatccacaggtcaggccacccctcttcctgtcaccagcctttcctcagtatccacaggtgacaccacccctcttcttgtcaccgacgcttcctcagtatccacaggtcacgccacccctcttcctgtcaccgacacttcctcagcatccacaggtgacaccacccgtcttcctgtcacggacacttcctcagcatccacaggtcaggccacccctcttcctgtcaccagcctttcctcagtatccacaggtgacaccacccctcttcttgtcaccgacgcttcctcagtatccacaggtcacgccacccctcttcctgtcaccgacacttcctcagcatccacaggtgacaccacccgtcttcctgtcacggacacttcctcagcatccacaggtcaggccacccctcttcctgtcaccatcccttcctcatcatcctcaggtcacaccacccctcttcctgtcaccagcacttcctcagtatctacaggtcacgtcacccctcttcatgtcaccagcccttcctcagcatccacaggtcacgtcacccctcttcctgtcaccagcacttcctcagcatccacaggtcacgccacccctcttcttgtcaccgacgcttcctcagtgtccacaggtcacgccacgcctcttcctgtcaccgacgcttcctcagcatccacaggtgacaccacccctcttcctgtcaccgacacttcctcagcatccacaggtcaggccacccctcttcctgtcaccagcctttcctcagtatccacaggtgacaccacccctcttcctgtcaccgacgcttcctcagcatccacaggtcacgccacccctcttcctgtcaccatcccttcctcagtatccacaggtgacaccatgcctcttcctgtcactagcccttcctcagcatccacaggtcacgccacccctcttcctgttaccggcctttcctcagcttccacaggtgacaccacccctcttcctgtcaccgacacttcctcagcatccacacgtcacgccacccctcttcctgtcaccgacacttcctcagcttccacagatgacaccacccgtcttcctgtcaccgacgtttcctcggcatccacaggacatgccacccctcttcctgtcaccagcacttcctcagcatccacaggtgacaccacccctcttcctgtcaccgacacttcctcagtatccacaggtcacgccacctctcttcctgtcaccagccgttcctcagcatccacaggtcacgccaccccccttcctgtcaccgacacttcctcagtatccacaggtcacgccacccctcttcctgtcaccagcacttcctcagtatctacaggtcacgccacccctcttcctgtcaccagcccttcctcagcatccacaggtcacgccacccctgttcctgtcaccagcacttcctcagcatccacaggtgacaccacccctcttcctgtcaccaatgcttcctcattatccacaggtcacgccacccctcttcatgtcaccagcccttcctcagcatccagaggtgacaccagcactcttcctgtcaccgatgcttcctcagcatccaccggtcacgccacccctcttcctctcaccagcctttcctcagtatccacaggtgacaccacgcctcttcctgtcaccgacacttcctctgcatccacaggtcaggccacccctcttcctgtcaccagcctttcctcagtatccacaggtgacaccacgcctcttcctgtcaccatcccttcctcagcatcctcaggtcacaccacctctcttcctgtcaccgacgcttcctcagtgtccacaggtcacggcacccctcttcctgtcaccagcacttcctcagcatccacaggtgacaccacccctcttcctgtcaccgacacttcctcagcatccacaggtcacgccacccctcttcctgtcaccgacacttcctcagcatccacaggtcacgccacccctcttcctgtcaccagcctttcctcagtatccacaggtcacgccacccctcttgctgtcagcagtgctacctcagcttccacagtatcctcggactcccctctgaagatggaaacaccaggaatgacaacaccgtcactgaagacagacggtgggagacgcacagccacatcaccaccccccacaacctcccagaccatcatttccaccattcccagcactgccatgcacacccgctccacagctgcccccatccccatcctgcctgagagaggagtttccctcttcccctatggggcaggcgccggggacctggagttcgtcaggaggaccgtggacttcacctccccactcttcaagccggcgactggcttcccccttggctcctctctccgtgattccctctacttcacagacaatggccagatcatcttcccagagtcagactaccagattttctcctaccccaacccactcccaacaggcttcacaggccgggaccctgtggccctggtggctccgttctgggacgatgctgacttctccactggtcgggggaccacattttatcaggaatacgagacgttctatggtgaacacagcctgctagtccagcaggccgagtcttggattagaaagatgacaaacaacgggggctacaaggccaggtgggccctaaaggtcacgtgggtcaatgcccacgcctatcctgcccagtggaccctcgggagcaacacctaccaagccatcctctccacggacgggagcaggtcctatgccctgtttctctaccagagcggtgggatgcagtgggacgtggcccagcgctcaggcaacccggtgctcatgggcttctctagtggagatggctatttcgaaaacagcccactgatgtcccagccagtgtgggagaggtatcgccctgatagattcctgaattccaactcaggcctccaagggctgcagttctacaggctacaccgggaagaaaggcccaactaccgtctcgagtgcctgcagtggctgaagagccagcctcggtggcccagctggggctggaaccaggtctcctgcccttgttcctggcagcagggacgacgggacttacgattccaacccgtcagcataggtcgctggggcctcggcagtaggcagctgtgcagcttcacctcttggcgaggaggcgtgtgctgcagctacgggccctggggagagtttcgtgaaggctggcacgtgcagcgtccttggcagttggcccaggaactggagccacagagctggtgctgccgctggaatgacaagccctacctctgtgccctgtaccagcagaggcggccccacgtgggctgtgctacatacaggcccccacagcccgcctggatgttcggggacccccacatcaccaccttggatggtgtcagttacaccttcaatgggctgggggacttcctgctggtcggggcccaagacgggaactcctccttcctgcttcagggccgcaccgcccagactggctcagcccaggccaccaacttcatcgcctttgcggctcagtaccgctccagcagcctgggccccgtcacggtccaatggctccttgagcctcacgacgcaatccgtgtcctgctggataaccagactgtgacatttcagcctgaccatgaagacggcggaggccaggagacgttcaacgccaccggagtcctcctgagccgcaacggctctgaggtctcggccagcttcgacggctgggccaccgtctcggtgatcgcgctctccaacatcctccacgcctccgccagcctcccgcccgagtaccagaaccgcacggaggggctcctgggggtctggaataacaatccagaggacgacttcaggatgcccaatggctccaccattcccccagggagccctgaggagatgcttttccactttggaatgacctggcagatcaacgggacaggcctccttggcaagaggaatgaccagctgccttccaacttcacccctgttttctactcacaactgcaaaaaaacagctcctgggctgaacatttgatctccaactgtgacggagatagctcatgcatctatgacaccctggccctgcgcaacgcaagcatcggacttcacacgagggaagtcagtaaaaactacgagcaggcgaacgccaccctcaatcagtacccgccctccatcaatggtggtcgtgtgattgaagcctacaaggggcagaccacgctgattcagtacaccagcaatgctgaggatgccaacttcacgctcagagacagctgcaccgacttggagctctttgagaatgggacgttgctgtggacacccaagtcgctggagccattcactctggagattctagcaagaagtgccaagattggcttggcatctgcactccagcccaggactgtggtctgccattgcaatgcagagagccagtgtttgtacaatcagaccagcagggtgggcaactcctccctggaggtggctggctgcaagtgtgacgggggcaccttcggccgctactgcgagggctccgaggatgcctgtgaggagccgtgcttcccgagtgtccactgcgttcctgggaagggctgcgaggcctgccctccaaacctgactggggatgggcggcactgtgcggctctggggagctctttcctgtgtcagaaccagtcctgccctgtgaattactgctacaatcaaggccactgctacatctcccagactctgggctgtcagcccatgtgcacctgccccccagccttcactgacagccgctgcttcctggctgggaacaacttcagtccaactgtcaacctagaacttcccttaagagtcatccagctcttgctcagtgaagaggaaaatgcctccatggcagaagtcaacgcctcggtggcatacagactggggaccctggacatgcgggcctttctccgcaacagccaagtggaacgaatcgattctgcagcaccggcctcgggaagccccatccaacactggatggtcatctcggagttccagtaccgccctcggggcccggtcattgacttcctgaacaaccagctgctggccgcggtggtggaggcgttcttataccacgttccacggaggagtgaggagcccaggaacgacgtggtcttccagcccatctccggggaagacgtgcgcgatgtgacagccctgaacgtgagcacgctgaaggcttacttcagatgcgatggctacaagggctacgacctggtctacagcccccagagcggcttcacctgcgtgtccccgtgcagtaggggctactgtgaccatggaggccagtgccagcacctgcccagtgggccccgctgcagctgtgtgtccttctccatctacacggcctggggcgagcactgtgagcacctgagcatgaaactcgacgcgttcttcggcatcttctttggggccctgggcggcctcttgctgctgggggtcgggacgttcgtggtcctgcgcttctggggttgctccggggccaggttctcctatttcctgaactcagctgaggccttgccttgaaggggcagctgtggcctaggctacctcaagactcacctcatccttaccgcacatttaaggcgccattgcttttgggagactggaaaagggaaggtgactgaaggctgtcaggattcttcaaggagaatgaatactgggaatcaagacaagactataccttatccataggcgcaggtgcacagggggaggccataaagatcaaacatgcatggatgggtcctcacgcagacacacccacagaaggacactagcctgtgcacgcgcgcgtgcacacacacacacacacacacgagttcataatgtggtgatggccctaagttaagcaaaatgcttctgcacacaaaactctctggtttacttcaaattaactctatttaaataaagtctctctgactttttgtgtctccaaaa

SEQ ID NO: 155665 - DNA, 16119 bp, Homo sapiens
  Payload ID: 10597
  Gene Symbol: MUC4
  Gene Name: mucin 4, cell surface associated
  ENST ID: ENST00000612796
  CDS Start-End: 1-16001
gaaccacagaggacacattaataactggaagtaaaactgctgccccagtcacctcaacaggctcaacaacagcgacactagagggacaatcaactgcagcttcttcaaggacctctaatcaggacatatcagcttcatctcagaaccaccagactaagagcacggagaccaccagcaaagctcaaaccgacaccctcacgcagatgatgacatcaactcttttttcttccccaagtgtacacaatgtgatggagacagctcctccagatgaaatgaccacatcatttccctccagtgtcaccaacacactcatgatgacatcaaagactataacaatgacaacctccacagactccactcttggaaacacagaagagacatcaacagcaggaactgaaagttctaccccagtgacctcagcagtctcaataacagctggacaggaaggacaatcacgaacaacttcctggaggacctctatccaagacacatcagcttcttctcagaaccactggactcggagcacgcagaccaccagggaatctcaaaccagcaccctaacacacagaaccacttcaactccttctttctctccaagtgtacacaatgtgacagggactgtttctcagaagacatctccttcaggtgaaacagctacctcatccctctgtagtgtcacaaacacatccatgatgacatcagagaagataacagtgacaacctccacaggctccactcttggaaacccaggggagacatcatcagtacctgttactggaagtcttatgccagtcacctcagcagccttagtaacatttgatccagaaggacaatcaccagcaactttctcaaggacttctactcaggacacaacagctttttctaagaaccaccagactcagagcgtggagaccaccagagtatctcaaatcaacaccctcaacaccctcacaccggttacaacatcaactgttttatcctcaccaagtggattcaacccaagtggaacagtttctcaggagacattcccttctggtgaaacaaccacctcatccccttccagtgtcagcaatacattcctggtaacatcaaaggtgttcagaatgccaacctccagagactctactcttggaaacacagaggagacatcactatctgtaagtggaaccatttctgcaatcacttccaaagtttcaaccatatggtggtcagacactctgtcaacagcactctcccccagttctctacctccaaaaatatccacagctttccacacccagcagagtgaaggtgcagagaccacaggacggcctcatgagaggagctcattctctccaggtgtgtctcaagaaatatttactctacatgaaacaacaacatggccttcctcattctccagcaaaggccacacaacttggtcacaaacagaactgccctcaacatcaacaggtgctgccactaggcttgtcacaggaaatccatctacagggacagctggcactattccaagggtcccctctaaggtctcagcaataggggaaccaggagagcccaccacatactcctcccacagcacaactctcccaaaaacaacaggggcaggcgcccagacacaatggacacaagaaacggggaccactggagaggctcttctcagcagcccaagctacagtgtgactcagatgataaaaacggccacatccccatcttcttcacctatgctggatagacacacatcccaacaaattacaacggcaccatcaacaaatcattcaacaatacattccacaagcacctctcctcaggaatcaccagctgtttcccaaaggggtcacactcaagccccgcagaccacacaagaatcacaaaccacgaggtccgtctcccccatgactgacaccaagacagtcaccaccccaggttcttccttcacagccagtgggcactcgccctcagaaattgttcctcaggacgcacccaccataagtgcagcaacaacctttgccccagctcccaccggggatggtcacacaacccaggccccgaccacagcactgcaggcagcacccagcagccatgatgccaccctggggccctcaggaggcacgtcactttccaaaacaggtgcccttactctggccaactctgtagtgtcaacaccagggggcccagaaggacaatggacatcagcctctgccagcacctcacctgacacagcagcagccatgacccatacccaccaggctgagagcacagaggcctctggacaaacacagaccagcgaaccggcctcctcagggtcacgaaccacctcagcgggcacagctaccccttcctcatccggggcgagtggcacaacaccttcaggaagcgaaggaatatccacctcaggagagacgacaaggttttcatcaaacccctccagggacagtcacacaacccagtcaacaaccgaattgctgtccgcctcagccagtcatggtgccatcccagtaagcacaggaatggcgtcttcgatcgtccccggcacctttcatcccaccctctctgaggcctccactgcagggagaccgacaggacagtcaagcccaacttctcccagtgcctctcctcaggagacagccgccatttcccggatggcccagactcagaggacaagaaccagcagagggtctgacactatcagcctggcgtcccaggcaaccgacaccttctcaacagtcccacccacacctccatcgatcacatccactgggcttacatctccacaaaccgagacccacactctgtcaccttcagggtctggtaaaaccttcaccacggccctcatcagcaacgccacccctcttcctgtcacctacgcttcctcggcatccacaggtcacaccacccctcttcatgtcaccgatgcttcctcagtatccacaggtcacgccacccctcttcctgtcaccagcccttcctcagtatccacaggtcacaccacccctcttcctgtcaccgacacttcctcagaatccacaggtcacgtcacccctcttcctgtcaccagcttttcctcagcatccacaggtgacagcacccctcttcctgtcactgacacttcctcagcatccacaggtcacgtcacccctcttcctgtcaccagcctttcctcagcatccacaggtgacaccacccctcttcctgtcactgacacttcctcagcatccacaggtcacgccacctctcttcctgtcaccgacacttcctcagtatccacaggtcacaccacccctcttcctgtcaccgacacttcctcagcatccacaggtcacgccacctctcttcctgtcaccgacacttcctcagtatccacaggtcacaccacccctcttcatgtcactgatgcttcctcagcatccacaggtcaggccacccctcttcctgtcaccagcctttcctcagtatccacaggtgacaccacgcctcttcctgtcactagcccttcctcagcatccacaggtcacgccacccctcttcttgtcaccgacacttcctcagcatccacaggacacgccacccctcttcctgtcaccgacgcttcctcagtgtccacagatcacgccacctctcttcctgtaaccatcccttccgcagcatccacaggtcacaccacccctcttcctgtcaccgacacttcctcagcatccacaggtcaggccacctctcttcttgtcaccgacacttcctcagtatccacaggtgacaccacgcctcttcctgtcactagcacttcctcagcatccacaggtcacgtcactcctcttcatgtcaccagcccttcctcagcatccacaggtcacgccacccctcttcctgtcaccagcctttcctcagcatccacaggtgacaccatgcctcttcctgtcactagcccttcctcagcatccacaggtgacaccacccctcttcctgtcaccgacgcttcctcagtatccacaggtcacaccacccctcttcatgtcactgatgcttcctcagcatccacaggtcaggccacccctcttcctgtcaccagcctttcctcagtatccacaggtgacaccacgcctcttcctgtcactagcccttcctcagcatccacaggtcacgccacccctcttcttgtcaccgacacttcctcagcatccacaggacacgccacccctcttcctgtcaccgacgcttcctcagtgtccacagatcacgccacctctcttcctgtaaccatcccttccgcagcatccacaggtcacaccacccctcttcctgtcaccgacacttcctcagcatccacaggtcaggccacctctcttcttgtcaccgacacttcctcagtatccacaggtgacaccacgcctcttcctgtcactagcacttcctcagcatccacaggtcacgtcactcctcttcatgtcaccagcccttcctcagcatccacaggtcacgccacccctcttcctgtcaccagcctttcctcagcatccacaggtgacaccatgcctcttcctgtcactagcccttcctcagcatccacaggtgacaccacccctcttcctgtcaccgacgcttcctcagtatccacaggtcacaccacccctcttcctgtcaccagcccttcctcagcatctacaggtcacaccacccctcttcctgtcaccgacacttcctcagcatccaaaggtgacaccacccctcttcctgtcaccagcccttcctcagcatctacaggtcacaccacccctcttcctgtcaccgacacttcctcagcatccacaggtgacaccacccctcttcctgtcaccaatgcttcctcattatccacaggtcacgccacccctcttcatgtcaccagcccttcctcagcatccacaggtcacgccacccctcttcctgtcaccagcacttcctcagcatccaccggtcacgccacccctcttcctgtcaccggcctttcctcagctaccacagatgacaccacccgtcttcctgtcaccgacgtttcctcggcatccacaggtcaggccacccctcttcctgtcaccagcctttcctcagtatccacaggtgacaccacgcctcttcctgtcactagcccttcctcagcatccacaggtcacgccagccctcttcttgtcactgacgcttcctcagcatccacaggtcaggccacccctcttcctgtcaccgacacttcctcagtatccacagctcacgccaccccacttcctgtcaccggcctttcttcagcttccacagatgacaccacccgtcttcctgtcaccgacgtttcctcggcatccacaggtcaggccatccctcttcctgtcaccagcccttcctcagcatccacaggtgacaccacccctcttcctgtcaccgacgcttcctcagcatccacaggtgacaccacctctcttcctgtcaccatcccttcctcagcatcttcaggtcacaccacctctcttcctgtcaccgacgcttcctcagtgtccacaggtcacgccacctctcttcttgtcaccgacgcttcctcagtatccacaggtgacaccacccctcttcctgtcaccgacactaactcagcatccacaggtgacaccacccctcttcatgtcaccgacgcttcctcagtatccacaggtcacgccacctctcttcctgtcaccagcctttcctcagcatccacaggtgacaccacgcctcttcctgtcactagcccttcctcagcatcctcaggtcacaccacccctcttcctgtcaccgacgcttcctcagtacccacaggtcacgccacctctcttcctgtcaccgacgcttcctcagtgtccacaggtcacgccacccctcttcctgtcaccgacgcttcctcagtgtccacaggtcatgccacccctcttccggtcaccgacacttcctcagtatctacaggacaggccacccctcttcctgtcaccagcctttcctcagcatccactggtgacaccacgccgcttcctgtcaccgatacttcctcagcatccacaggtcaggacacccctcttcctgtcaccagcctttcctcagtatccacaggtgacaccacgcctcttcctgtcactaacccttcctcagcatccacaggtcacgccacccctcttcttgtcaccgacgcttcctcaatatccacaggtcacgccacctctcttcttgtcaccgacgcttcctcagtatccacaggtcacgccaccgctcttcatgacaccgatgcttcctcattatccacaggggacaccacccctcttcctgtcaccagcccttcctcaacatccacaggtgacaccacccctcttcctgtcaccgaaacttcctcagtatccacaggtcacgccacctctcttcctgtcaccgacacttcctcagcatccacaggtcacgccacctctcttcctgtcaccgacacttcctcagcatccacaggtcacgccacccctcttcctgtcaccgacacttcctcagcatccacaggtcaggccacccctcttcctgtcaccagcccttcctcagcatccacaggtcacgccatccctcttcttgtcaccgacacttcctcagcatccacaggacaggccacccctcttcctgtcaccagcctttcctcagcatccacaggtgacaccacccctcttcctgtcaccgacgcttcctcagtgtccacaggtcacgccacctctcttcctgtcaccagcctttcctcagtatccacaggtgacaccactcctcttcctgtcactagcccttcctcagcatccacaggtcacgccacccctcttcatgtcaccgacgcttcctcagcatccacaggtcacgccacccctcttcctgtcaccagcctttcctcagcatccacaggtgacaccacgcctcttcctgtcactagcccttcctcagcatccacaggtcacgccacccctcttcatgtcaccgacgcttcctcagtatccacaggtgacaccacccctcttcctgtcaccagctcttcctcagcatcctcaggtcacaccacccctcttcctgtcaccgacgcttcctcagcatccacaggtgacaccacccctcttcctgtcaccgacacttcctcagcatccacaggtcacgccacccatcttcctgtcaccggcctttcctcagcttccacaggtgacaccacccgtcttcctgtcaccaacgtttcctcggcatccacaggtcatgccacccctcttcctgtcaccagcacttcctcagcatccacaggtgacaccacccctcttcctggcaccgacacttcctcagtatccacaggtcacaccacccctcttcttgtcaccgacgcttcgtcagtatccacaggtgacaccacccgtcttcctgtcaccagcccttcctcagcatctacaggtcacaccacccctctacctgtcaccgacactccctcagcatccacaggtgacaccacccctcttcctgtcaccaatgcttcctcattatccacacgtcacgccacctctcttcatgtcaccagcccttcctcagcatccacaggtcacgccacctctcttcctgtcaccgacacttccgcagcatccacaggtcacgccacccctcttcctgtcaccagcacttcctcagcatccacaggtgacaccacccctcttcctgtcaccgacacttactcagcatccacaggtcaggccacccctcttcctgtcaccagcctttcctcagtatccacaggtgacaccacgcctcttcctgtcactagcccttcctcagcatccacaggtcacgccactcctcttcttgtcaccgacgcttcctcagcatccacaggtcaggccacccctcttcctgtcaccagcctttcctcagtatccacaggtgacaccacgcctcttcctgtcactagcccttcctcagcatccaccggtcatgccacctctcttcctgtcaccgacacttcctcagcatccacaggtgacaccacctctcttcctgtcaccgacacttcctcagcatacacaggtgacaccacctctcttcctgtcaccgacacttcctcatcatccacaggtgacaccacccctcttcttgtcaccgagacttcctcagtatccacaggtgacaccacccctcttcctgtcaccgacacttcctcagcatccacaggtcacgccacccctcttcctgtcaccaacacttcctcagtatccacaggtcacgccacccctcttcatgtcaccagcccttcctcagcatccacaggtcacaccacccctcttcctgtcaccgacgcttcgtcagtgtccacaggtcacgccacctctcttcctgtcaccgacgcttcctcagtgttcacaggtcatgccacctctcttcctgtcaccatcccttcctcagcatcctcaggtcacaccacccctcttcctgtcaccgacgcttcctcagtgtccacaggtcacgccacctctcttcctgtcaccgacgcttcctcagtgtccacaggtcatgccacccctcttcctgtcaccgacgcttcctcagtgtccacaggtcacgctacccctcttcctctcaccagcctttcctcagtatccacaggtgacaccacgcctcttcctgtcaccgacacttcctcagcatccacaggtcaggccacccctcttcctgtcaccagcctttcctcagtatccacaggtgacaccacccctcttcctgtcaccgacacttcctcagcatccacaggtcacgccacctctcttcctgtcaccgacacttcctcagcatccacaggtcacgccacccctcttcctgacaccgacacttcctcagcatccacaggtcacgccacccttcttcctgtcaccgacacttcctcagcatccataggtcacgccacctctcttcctgtcaccgacacttcctcaatatccacaggtcacgccacccctcttcatgtcaccagcccttcctcagcatccaccggtcacgccaccccgcttcctgtcaccgacacttcctcagcatccacaggtcacgccaaccctcttcatgtcaccagcccttcctcagcatccaccggtcacgccaccccgcttcctgtcaccgacacttcctcagcatccacaggtcacgccacccctcttcctgtcaccagcctttcctcagtatccacaggtgacaccacgcctcttcctgtcactagcccttcctcagcatccacaggtcacaccacccctcttcctgtcaccgacacttcctcagcatccacaggtcaggccaccgctcttcctgtcaccagcacttcctcagcatccacaggtgacaccacccctcttcctgtcaccgacacttcctcagcatccacaggtcaggccacccctcttcctgtcaccagcctttcctcagtatccacaggtgacaccacgcctcttcctgtcactagcccttcctcagcatccacaggtcacgccactcctcttcttgtcaccgacgcttcctcagcatccacaggtcaggccacccctcttcctgtcaccagcctttcctcagtatccacaggtgacaccacgcctcttcctgtcactagcccttcctcagcatccaccggtcatgccacctctcttcctgtcaccgacacttcctcagcatccacaggtgacaccacctctcttcctgtcaccgacacttcctcagcatacacaggtgacaccacctctcttcctgtcaccgacacttcctcatcatccacaggtgacaccacccctcttcttgtcaccgagacttcctcagtatccacaggtcacgccactcctcttcttgtcaccgacgcttcctcagcatccacaggtcacgccacccctcttcatgtcaccagcccttcctcagcatccacaggtgacaccacccctgtgcctgtcaccgacacttcctcagtatccacaggtcacgccacccctcttcctgtcaccggcctttcctcagcttccacaggtgacaccacccgtcttcctgtcaccgacatttcctcggcatccacaggtcaggccacccctcttcctgtcaccaacacttcctcagtatccacaggtgacaccatgcctcttcctgtcactagcccttcctcagcatccacaggtcacgccacccctcttcctgtcaccagcacttcctcagcatccaccggtcacgccacccctgttcctgtcaccagcacttcctcagcatctacaggtcacaccacccctcttcctgtcaccgacacttcctcagcatccacaggtgacaccacccctcttcctgtcaccagcccttcctcagcatctacaggtcacaccacccctcttcatgtcaccatcccttcctcagcatccacaggtgacaccagcactcttcctgtcaccggcgcttcctcagcatccaccggtcacgccacccctcttcctgtcaccgacacttcctcagtatccaccggtcacgccacgcctcttcctgtcaccagcctttcctcagtatccacaggtgacaccacccctcttcctgtcaccgacgcttcctcggcatccacaggtcaggccacccctcttcctgtcaccagcctttcctcagtatccacaggtgacaccacccctcttcttgtcaccgacgcttcctcagtatccacaggtcacgccacccctcttcctgtcaccgacacttcctcagcatccacaggtgacaccacccgtcttcctgtcacggacacttcctcagcatccacaggtcaggccacccctcttcctgtcaccagcctttcctcagtatccacaggtgacaccacccctcttcttgtcaccgacgcttcctcagtatccacaggtcacgccacccctcttcctgtcaccgacacttcctcagcatccacaggtgacaccacccgtcttcctgtcacggacacttcctcagcatccacaggtcaggccacccctcttcctgtcaccatcccttcctcatcatcctcaggtcacaccacccctcttcctgtcaccagcacttcctcagtatctacaggtcacgtcacccctcttcatgtcaccagcccttcctcagcatccacaggtcacgtcacccctcttcctgtcaccagcacttcctcagcatccacaggtcacgccacccctcttcttgtcaccgacgcttcctcagtgtccacaggtcacgccacgcctcttcctgtcaccgacgcttcctcagcatccacaggtgacaccacccctcttcctgtcaccgacacttcctcagcatccacaggtcaggccacccctcttcctgtcaccagcctttcctcagtatccacaggtgacaccacccctcttcctgtcaccgacgcttcctcagcatccacaggtcacgccacccctcttcctgtcaccatcccttcctcagtatccacaggtgacaccatgcctcttcctgtcactagcccttcctcagcatccacaggtcacgccacccctcttcctgttaccggcctttcctcagcttccacaggtgacaccacccctcttcctgtcaccgacacttcctcagcatccacacgtcacgccacccctcttcctgtcaccgacacttcctcagcttccacagatgacaccacccgtcttcctgtcaccgacgtttcctcggcatccacaggacatgccacccctcttcctgtcaccagcacttcctcagcatccacaggtgacaccacccctcttcctgtcaccgacacttcctcagtatccacaggtcacgccacctctcttcctgtcaccagccgttcctcagcatccacaggtcacgccaccccccttcctgtcaccgacacttcctcagtatccacaggtcacgccacccctcttcctgtcaccagcacttcctcagtatctacaggtcacgccacccctcttcctgtcaccagcccttcctcagcatccacaggtcacgccacccctgttcctgtcaccagcacttcctcagcatccacaggtgacaccacccctcttcctgtcaccaatgcttcctcattatccacaggtcacgccacccctcttcatgtcaccagcccttcctcagcatccagaggtgacaccagcactcttcctgtcaccgatgcttcctcagcatccaccggtcacgccacccctcttcctctcaccagcctttcctcagtatccacaggtgacaccacgcctcttcctgtcaccgacacttcctctgcatccacaggtcaggccacccctcttcctgtcaccagcctttcctcagtatccacaggtgacaccacgcctcttcctgtcaccatcccttcctcagcatcctcaggtcacaccacctctcttcctgtcaccgacgcttcctcagtgtccacaggtcacggcacccctcttcctgtcaccagcacttcctcagcatccacaggtgacaccacccctcttcctgtcaccgacacttcctcagcatccacaggtcacgccacccctcttcctgtcaccgacacttcctcagcatccacaggtcacgccacccctcttcctgtcaccagcctttcctcagtatccacaggtcacgccacccctcttgctgtcagcagtgctacctcagcttccacagtatcctcggactcccctctgaagatggaaacaccaggaatgacaacaccgtcactgaagacagacggtgggagacgcacagccacatcaccaccccccacaacctcccagaccatcatttccaccattcccagcactgccatgcacacccgctccacagctgcccccatccccatcctgcctgagagaggagtttccctcttcccctatggggcaggcgccggggacctggagttcgtcaggaggaccgtggacttcacctccccactcttcaagccggcgactggcttcccccttggctcctctctccgtgattccctctacttcacagacaatggccagatcatcttcccagagtcagactaccagattttctcctaccccaacccactcccaacaggcttcacaggccgggaccctgtggccctggtggctccgttctgggacgatgctgacttctccactggtcgggggaccacattttatcagagcaacacctaccaagccatcctctccacggacgggagcaggtcctatgccctgtttctctaccagagcggtgggatgcagtgggacgtggcccagcgctcaggcaacccggtgctcatgggcttctctagtggagatggctatttcgaaaacagcccactgatgtcccagccagtgtgggagaggtatcgccctgatagattcctgaattccaactcaggcctccaagggctgcagttctacaggctacaccgggaagaaaggcccaactaccgtctcgagtgcctgcagtggctgaagagccagcctcggtggcccagctggggctggaaccaggtctcctgcccttgttcctggcagcagggacgacgggacttacgattccaacccgtcagcataggtcgctggggcctcggcagtaggcagctgtgcagcttcacctcttggcgaggaggcgtgtgctgcagctacgggccctggggagagtttcgtgaaggctggcacgtgcagcgtccttggcagttggcccaggaactggagccacagagctggtgctgccgctggaatgacaagccctacctctgtgccctgtaccagcagaggcggccccacgtgggctgtgctacatacaggcccccacagcccgcctggatgttcggggacccccacatcaccaccttggatggtgtcagttacaccttcaatgggctgggggacttcctgctggtcggggcccaagacgggaactcctccttcctgcttcagggccgcaccgcccagactggctcagcccaggccaccaacttcatcgcctttgcggctcagtaccgctccagcagcctgggccccgtcacggtccaatggctccttgagcctcacgacgcaatccgtgtcctgctggataaccagactgtgacatttcagcctgaccatgaagacggcggaggccaggagacgttcaacgccaccggagtcctcctgagccgcaacggctctgaggtctcggccagcttcgacggctgggccaccgtctcggtgatcgcgctctccaacatcctccacgcctccgccagcctcccgcccgagtaccagaaccgcacggaggggctcctgggggtctggaataacaatccagaggacgacttcaggatgcccaatggctccaccattcccccagggagccctgaggagatgcttttccactttggaatgacctggcagatcaacgggacaggcctccttggcaagaggaatgaccagctgccttccaacttcacccctgttttctactcacaactgcaaaaaaacagctcctgggctgaacatttgatctccaactgtgacggagatagctcatgcatctatgacaccctggccctgcgcaacgcaagcatcggacttcacacgagggaagtcagtaaaaactacgagcaggcgaacgccaccctcaatcagtacccgccctccatcaatggtggtcgtgtgattgaagcctacaaggggcagaccacgctgattcagtacaccagcaatgctgaggatgccaacttcacgctcagagacagctgcaccgacttggagctctttgagaatgggacgttgctgtggacacccaagtcgctggagccattcactctggagattctagcaagaagtgccaagattggcttggcatctgcactccagcccaggactgtggtctgccattgcaatgcagagagccagtgtttgtacaatcagaccagcagggtgggcaactcctccctggaggtggctggctgcaagtgtgacgggggcaccttcggccgctactgcgagggctccgaggatgcctgtgaggagccgtgcttcccgagtgtccactgcgttcctgggaagggctgcgaggcctgccctccaaacctgactggggatgggcggcactgtgcggctctggggagctctttcctgtgtcagaaccagtcctgccctgtgaattactgctacaatcaaggccactgctacatctcccagactctgggctgtcagcccatgtgcacctgccccccagccttcactgacagccgctgcttcctggctgggaacaacttcagtccaactgtcaacctagaacttcccttaagagtcatccagctcttgctcagtgaagaggaaaatgcctccatggcagaagtcaacgcctcggtggcatacagactggggaccctggacatgcgggcctttctccgcaacagccaagtggaacgaatcgattctgcagcaccggcctcgggaagccccatccaacactggatggtcatctcggagttccagtaccgccctcggggcccggtcattgacttcctgaacaaccagctgctggccgcggtggtggaggcgttcttataccacgttccacggaggagtgaggagcccaggaacgacgtggtcttccagcccatctccggggaagacgtgcgcgatgtgacagccctgaacgtgagcacgctgaaggcttacttcagatgcgatggctacaagggctacgacctggtctacagcccccagagcggcttcacctgcgtgtccccgtgcagtaggggctactgtgaccatggaggccagtgccaacacctgcccagtgggccccgctgcagctgtgtgtccttctccatctacacggcctggggcgagcactgtgagcacctgagcatgaaactcgacgcgttcttcggcatcttctttggggccctgggcggcctcttgctgctgggggtcgggacgttcgtggtcctgcgcttctggggttgctccggggccaggttctcctatttcctgaactcagctgaggccttgccttgaaggggcagctgtggcctaggctacctcaagactcacctcatccttaccgcacatttaaggcgccattgcttttgggagactggaaaagggaaggtgactgaaggctgtcaggattctt

SEQ ID NO: 155666 - DNA, 14907 bp, Homo sapiens
  Payload ID: 10597
  Gene Symbol: MUC4
  Gene Name: mucin 4, cell surface associated
  ENST ID: ENST00000614666
  CDS Start-End: 1-14907
ccaggaaccacagaggacacattaataactggaagtaaaactgctgccccagtcacctcaacaggctcaacaacagcgacactagagggacaatcaactgcagcttcttcaaggacctctaatcaggacatatcagcttcatctcagaaccaccagactaagagcacggagaccaccagcaaagctcaaaccgacaccctcacgcagatgatgacatcaactcttttttcttccccaagtgtacacaatgtgatggagacagctcctccagatgaaatgaccacatcatttccctccagtgtcaccaacacactcatgatgacatcaaagactataacaatgacaacctccacagactccactcttggaaacacagaagagacatcaacagcaggaactgaaagttctaccccagtgacctcagcagtctcaataacagctggacaggaaggacaatcacgaacaacttcctggaggacctctatccaagacacatcagcttcttctcagaaccactggactcggagcacgcagaccaccagggaatctcaaaccagcaccctaacacacagaaccacttcaactccttctttctctccaagtgtacacaatgtgacagggactgtttctcagaagacatctccttcaggtgaaacagctacctcatccctctgtagtgtcacaaacacatccatgatgacatcagagaagataacagtgacaacctccacaggctccactcttggaaacccaggggagacatcatcagtacctgttactggaagtcttatgccagtcacctcagcagccttagtaacatttgatccagaaggacaatcaccagcaactttctcaaggacttctactcaggacacaacagctttttctaagaaccaccagactcagagcgtggagaccaccagagtatctcaaatcaacaccctcaacaccctcacaccggttacaacatcaactgttttatcctcaccaagtggattcaacccaagtggaacagtttctcaggagacattcccttctggtgaaacaaccacctcatccccttccagtgtcagcaatacattcctggtaacatcaaaggtgttcagaatgccaacctccagagactctactcttggaaacacagaggagacatcactatctgtaagtggaaccatttctgcaatcacttccaaagtttcaaccatatggtggtcagacactctgtcaacagcactctcccccagttctctacctccaaaaatatccacagctttccacacccagcagagtgaaggtgcagagaccacaggacggcctcatgagaggagctcattctctccaggtgtgtctcaagaaatatttactctacatgaaacaacaacatggccttcctcattctccagcaaaggccacacaacttggtcacaaacagaactgccctcaacatcaacaggtgctgccactaggcttgtcacaggaaatccatctacagggacagctggcactattccaagggtcccctctaaggtctcagcaataggggaaccaggagagcccaccacatactcctcccacagcacaactctcccaaaaacaacaggggcaggcgcccagacacaatggacacaagaaacggggaccactggagaggctcttctcagcagcccaagctacagtgtgactcagatgataaaaacggccacatccccatcttcttcacctatgctggatagacacacatcccaacaaattacaacggcaccatcaacaaatcattcaacaatacattccacaagcacctctcctcaggaatcaccagctgtttcccaaaggggtcacactcaagccccgcagaccacacaagaatcacaaaccacgaggtccgtctcccccatgactgacaccaagacagtcaccaccccaggttcttccttcacagccagtgggcactcgccctcagaaattgttcctcaggacgcacccaccataagtgcagcaacaacctttgccccagctcccaccggggatggtcacacaacccaggccccgaccacagcactgcaggcagcacccagcagccatgatgccaccctggggccctcaggaggcacgtcactttccaaaacaggtgcccttactctggccaactctgtagtgtcaacaccagggggcccagaaggacaatggacatcagcctctgccagcacctcacctgacacagcagcagccatgacccatacccaccaggctgagagcacagaggcctctggacaaacacagaccagcgaaccggcctcctcagggtcacgaaccacctcagcgggcacagctaccccttcctcatccggggcgagtggcacaacaccttcaggaagcgaaggaatatccacctcaggagagacgacaaggttttcatcaaacccctccagggacagtcacacaacccagtcaacaaccgaattgctgtccgcctcagccagtcatggtgccatcccagtaagcacaggaatggcgtcttcgatcgtccccggcacctttcatcccaccctctctgaggcctccactgcagggagaccgacaggacagtcaagcccaacttctcccagtgcctctcctcaggagacagccgccatttcccggatggcccagactcagaggacaagaaccagcagagggtctgacactatcagcctggcgtcccaggcaaccgacaccttctcaacagtcccacccacacctccatcgatcacatccactgggcttacatctccacaaaccgagacccacactctgtcaccttcagggtctggtaaaaccttcaccacggccctcatcagcaacgccacccctcttcctgtcacctacgcttcctcggcatccacaggtcacaccacccctcttcatgtcaccgatgcttcctcagtatccacaggtcacgccacccctcttcctgtcaccagcccttcctcagtatccacaggtcacaccacccctcttcctgtcaccgacacttcctcagaatccacaggtcacgtcacccctcttcctgtcaccagcttttcctcagcatccacaggtgacagcacccctcttcctgtcactgacacttcctcagcatccacaggtcacgtcacccctcttcctgtcaccagcctttcctcagcatccacaggtgacaccacccctcttcctgtcactgacacttcctcagcatccacaggtcacgccacctctcttcctgtcaccgacacttcctcagtatccacaggtcacaccacccctcttcctgtcaccgacacttcctcagcatccacaggtcacgccacctctcttcctgtcaccgacacttcctcagtatccacaggtcacaccacccctcttcatgtcactgatgcttcctcagcatccacaggtcaggccacccctcttcctgtcaccagcctttcctcagtatccacaggtgacaccacgcctcttcctgtcactagcccttcctcagcatccacaggtcacgccacccctcttcttgtcaccgacacttcctcagcatccacaggacacgccacccctcttcctgtcaccgacgcttcctcagtgtccacagatcacgccacctctcttcctgtaaccatcccttccgcagcatccacaggtcacaccacccctcttcctgtcaccgacacttcctcagcatccacaggtcaggccacctctcttcttgtcaccgacacttcctcagtatccacaggtgacaccacgcctcttcctgtcactagcacttcctcagcatccacaggtcacgtcactcctcttcatgtcaccagcccttcctcagcatccacaggtcacgccacccctcttcctgtcaccagcctttcctcagcatccacaggtgacaccatgcctcttcctgtcactagcccttcctcagcatccacaggtgacaccacccctcttcctgtcaccgacgcttcctcagtatccacaggtcacaccacccctcttcatgtcactgatgcttcctcagcatccacaggtcaggccacccctcttcctgtcaccagcctttcctcagtatccacaggtgacaccacgcctcttcctgtcactagcccttcctcagcatccacaggtcacgccacccctcttcttgtcaccgacacttcctcagcatccacaggacacgccacccctcttcctgtcaccgacgcttcctcagtgtccacagatcacgccacctctcttcctgtaaccatcccttccgcagcatccacaggtcacaccacccctcttcctgtcaccgacacttcctcagcatccacaggtcaggccacctctcttcttgtcaccgacacttcctcagtatccacaggtgacaccacgcctcttcctgtcactagcacttcctcagcatccacaggtcacgtcactcctcttcatgtcaccagcccttcctcagcatccacaggtcacgccacccctcttcctgtcaccagcctttcctcagcatccacaggtgacaccatgcctcttcctgtcactagcccttcctcagcatccacaggtgacaccacccctcttcctgtcaccgacgcttcctcagtatccacaggtcacaccacccctcttcctgtcaccagcccttcctcagcatctacaggtcacaccacccctcttcctgtcaccgacacttcctcagcatccaaaggtgacaccacccctcttcctgtcaccagcccttcctcagcatctacaggtcacaccacccctcttcctgtcaccgacacttcctcagcatccacaggtgacaccacccctcttcctgtcaccaatgcttcctcattatccacaggtcacgccacccctcttcatgtcaccagcccttcctcagcatccacaggtcacgccacccctcttcctgtcaccagcacttcctcagcatccaccggtcacgccacccctcttcctgtcaccggcctttcctcagctaccacagatgacaccacccgtcttcctgtcaccgacgtttcctcggcatccacaggtcaggccacccctcttcctgtcaccagcctttcctcagtatccacaggtgacaccacgcctcttcctgtcactagcccttcctcagcatccacaggtcacgccagccctcttcttgtcactgacgcttcctcagcatccacaggtcaggccacccctcttcctgtcaccgacacttcctcagtatccacagctcacgccaccccacttcctgtcaccggcctttcttcagcttccacagatgacaccacccgtcttcctgtcaccgacgtttcctcggcatccacaggtcaggccatccctcttcctgtcaccagcccttcctcagcatccacaggtgacaccacccctcttcctgtcaccgacgcttcctcagcatccacaggtgacaccacctctcttcctgtcaccatcccttcctcagcatcttcaggtcacaccacctctcttcctgtcaccgacgcttcctcagtgtccacaggtcacgccacctctcttcttgtcaccgacgcttcctcagtatccacaggtgacaccacccctcttcctgtcaccgacactaactcagcatccacaggtgacaccacccctcttcatgtcaccgacgcttcctcagtatccacaggtcacgccacctctcttcctgtcaccagcctttcctcagcatccacaggtgacaccacgcctcttcctgtcactagcccttcctcagcatcctcaggtcacaccacccctcttcctgtcaccgacgcttcctcagtacccacaggtcacgccacctctcttcctgtcaccgacgcttcctcagtgtccacaggtcacgccacccctcttcctgtcaccgacgcttcctcagtgtccacaggtcatgccacccctcttccggtcaccgacacttcctcagtatctacaggacaggccacccctcttcctgtcaccagcctttcctcagcatccactggtgacaccacgccgcttcctgtcaccgatacttcctcagcatccacaggtcaggacacccctcttcctgtcaccagcctttcctcagtatccacaggtgacaccacgcctcttcctgtcactaacccttcctcagcatccacaggtcacgccacccctcttcttgtcaccgacgcttcctcaatatccacaggtcacgccacctctcttcttgtcaccgacgcttcctcagtatccacaggtcacgccaccgctcttcatgacaccgatgcttcctcattatccacaggggacaccacccctcttcctgtcaccagcccttcctcaacatccacaggtgacaccacccctcttcctgtcaccgaaacttcctcagtatccacaggtcacgccacctctcttcctgtcaccgacacttcctcagcatccacaggtcacgccacctctcttcctgtcaccgacacttcctcagcatccacaggtcacgccacccctcttcctgtcaccgacacttcctcagcatccacaggtcaggccacccctcttcctgtcaccagcccttcctcagcatccacaggtcacgccatccctcttcttgtcaccgacacttcctcagcatccacaggacaggccacccctcttcctgtcaccagcctttcctcagcatccacaggtgacaccacccctcttcctgtcaccgacgcttcctcagtgtccacaggtcacgccacctctcttcctgtcaccagcctttcctcagtatccacaggtgacaccactcctcttcctgtcactagcccttcctcagcatccacaggtcacgccacccctcttcatgtcaccgacgcttcctcagcatccacaggtcacgccacccctcttcctgtcaccagcctttcctcagcatccacaggtgacaccacgcctcttcctgtcactagcccttcctcagcatccacaggtcacgccacccctcttcatgtcaccgacgcttcctcagtatccacaggtgacaccacccctcttcctgtcaccagctcttcctcagcatcctcaggtcacaccacccctcttcctgtcaccgacgcttcctcagcatccacaggtgacaccacccctcttcctgtcaccgacacttcctcagcatccacaggtcacgccacccatcttcctgtcaccggcctttcctcagcttccacaggtgacaccacccgtcttcctgtcaccaacgtttcctcggcatccacaggtcatgccacccctcttcctgtcaccagcacttcctcagcatccacaggtgacaccacccctcttcctggcaccgacacttcctcagtatccacaggtcacaccacccctcttcttgtcaccgacgcttcgtcagtatccacaggtgacaccacccgtcttcctgtcaccagcccttcctcagcatctacaggtcacaccacccctctacctgtcaccgacactccctcagcatccacaggtgacaccacccctcttcctgtcaccaatgcttcctcattatccacacgtcacgccacctctcttcatgtcaccagcccttcctcagcatccacaggtcacgccacctctcttcctgtcaccgacacttccgcagcatccacaggtcacgccacccctcttcctgtcaccagcacttcctcagcatccacaggtgacaccacccctcttcctgtcaccgacacttactcagcatccacaggtcaggccacccctcttcctgtcaccagcctttcctcagtatccacaggtgacaccacgcctcttcctgtcactagcccttcctcagcatccacaggtcacgccactcctcttcttgtcaccgacgcttcctcagcatccacaggtcaggccacccctcttcctgtcaccagcctttcctcagtatccacaggtgacaccacgcctcttcctgtcactagcccttcctcagcatccaccggtcatgccacctctcttcctgtcaccgacacttcctcagcatccacaggtgacaccacctctcttcctgtcaccgacacttcctcagcatacacaggtgacaccacctctcttcctgtcaccgacacttcctcatcatccacaggtgacaccacccctcttcttgtcaccgagacttcctcagtatccacaggtgacaccacccctcttcctgtcaccgacacttcctcagcatccacaggtcacgccacccctcttcctgtcaccaacacttcctcagtatccacaggtcacgccacccctcttcatgtcaccagcccttcctcagcatccacaggtcacaccacccctcttcctgtcaccgacgcttcgtcagtgtccacaggtcacgccacctctcttcctgtcaccgacgcttcctcagtgttcacaggtcatgccacctctcttcctgtcaccatcccttcctcagcatcctcaggtcacaccacccctcttcctgtcaccgacgcttcctcagtgtccacaggtcacgccacctctcttcctgtcaccgacgcttcctcagtgtccacaggtcatgccacccctcttcctgtcaccgacgcttcctcagtgtccacaggtcacgctacccctcttcctctcaccagcctttcctcagtatccacaggtgacaccacgcctcttcctgtcaccgacacttcctcagcatccacaggtcaggccacccctcttcctgtcaccagcctttcctcagtatccacaggtgacaccacccctcttcctgtcaccgacacttcctcagcatccacaggtcacgccacctctcttcctgtcaccgacacttcctcagcatccacaggtcacgccacccctcttcctgacaccgacacttcctcagcatccacaggtcacgccacccttcttcctgtcaccgacacttcctcagcatccataggtcacgccacctctcttcctgtcaccgacacttcctcaatatccacaggtcacgccacccctcttcatgtcaccagcccttcctcagcatccaccggtcacgccaccccgcttcctgtcaccgacacttcctcagcatccacaggtcacgccaaccctcttcatgtcaccagcccttcctcagcatccaccggtcacgccaccccgcttcctgtcaccgacacttcctcagcatccacaggtcacgccacccctcttcctgtcaccagcctttcctcagtatccacaggtgacaccacgcctcttcctgtcactagcccttcctcagcatccacaggtcacaccacccctcttcctgtcaccgacacttcctcagcatccacaggtcaggccaccgctcttcctgtcaccagcacttcctcagcatccacaggtgacaccacccctcttcctgtcaccgacacttcctcagcatccacaggtcaggccacccctcttcctgtcaccagcctttcctcagtatccacaggtgacaccacgcctcttcctgtcactagcccttcctcagcatccacaggtcacgccactcctcttcttgtcaccgacgcttcctcagcatccacaggtcaggccacccctcttcctgtcaccagcctttcctcagtatccacaggtgacaccacgcctcttcctgtcactagcccttcctcagcatccaccggtcatgccacctctcttcctgtcaccgacacttcctcagcatccacaggtgacaccacctctcttcctgtcaccgacacttcctcagcatacacaggtgacaccacctctcttcctgtcaccgacacttcctcatcatccacaggtgacaccacccctcttcttgtcaccgagacttcctcagtatccacaggtcacgccactcctcttcttgtcaccgacgcttcctcagcatccacaggtcacgccacccctcttcatgtcaccagcccttcctcagcatccacaggtgacaccacccctgtgcctgtcaccgacacttcctcagtatccacaggtcacgccacccctcttcctgtcaccggcctttcctcagcttccacaggtgacaccacccgtcttcctgtcaccgacatttcctcggcatccacaggtcaggccacccctcttcctgtcaccaacacttcctcagtatccacaggtgacaccatgcctcttcctgtcactagcccttcctcagcatccacaggtcacgccacccctcttcctgtcaccagcacttcctcagcatccaccggtcacgccacccctgttcctgtcaccagcacttcctcagcatctacaggtcacaccacccctcttcctgtcaccgacacttcctcagcatccacaggtgacaccacccctcttcctgtcaccagcccttcctcagcatctacaggtcacaccacccctcttcatgtcaccatcccttcctcagcatccacaggtgacaccagcactcttcctgtcaccggcgcttcctcagcatccaccggtcacgccacccctcttcctgtcaccgacacttcctcagtatccaccggtcacgccacgcctcttcctgtcaccagcctttcctcagtatccacaggtgacaccacccctcttcctgtcaccgacgcttcctcggcatccacaggtcaggccacccctcttcctgtcaccagcctttcctcagtatccacaggtgacaccacccctcttcttgtcaccgacgcttcctcagtatccacaggtcacgccacccctcttcctgtcaccgacacttcctcagcatccacaggtgacaccacccgtcttcctgtcacggacacttcctcagcatccacaggtcaggccacccctcttcctgtcaccagcctttcctcagtatccacaggtgacaccacccctcttcttgtcaccgacgcttcctcagtatccacaggtcacgccacccctcttcctgtcaccgacacttcctcagcatccacaggtgacaccacccgtcttcctgtcacggacacttcctcagcatccacaggtcaggccacccctcttcctgtcaccatcccttcctcatcatcctcaggtcacaccacccctcttcctgtcaccagcacttcctcagtatctacaggtcacgtcacccctcttcatgtcaccagcccttcctcagcatccacaggtcacgtcacccctcttcctgtcaccagcacttcctcagcatccacaggtcacgccacccctcttcttgtcaccgacgcttcctcagtgtccacaggtcacgccacgcctcttcctgtcaccgacgcttcctcagcatccacaggtgacaccacccctcttcctgtcaccgacacttcctcagcatccacaggtcaggccacccctcttcctgtcaccagcctttcctcagtatccacaggtgacaccacccctcttcctgtcaccgacgcttcctcagcatccacaggtcacgccacccctcttcctgtcaccatcccttcctcagtatccacaggtgacaccatgcctcttcctgtcactagcccttcctcagcatccacaggtcacgccacccctcttcctgttaccggcctttcctcagcttccacaggtgacaccacccctcttcctgtcaccgacacttcctcagcatccacacgtcacgccacccctcttcctgtcaccgacacttcctcagcttccacagatgacaccacccgtcttcctgtcaccgacgtttcctcggcatccacaggacatgccacccctcttcctgtcaccagcacttcctcagcatccacaggtgacaccacccctcttcctgtcaccgacacttcctcagtatccacaggtcacgccacctctcttcctgtcaccagccgttcctcagcatccacaggtcacgccaccccccttcctgtcaccgacacttcctcagtatccacaggtcacgccacccctcttcctgtcaccagcacttcctcagtatctacaggtcacgccacccctcttcctgtcaccagcccttcctcagcatccacaggtcacgccacccctgttcctgtcaccagcacttcctcagcatccacaggtgacaccacccctcttcctgtcaccaatgcttcctcattatccacaggtcacgccacccctcttcatgtcaccagcccttcctcagcatccagaggtgacaccagcactcttcctgtcaccgatgcttcctcagcatccaccggtcacgccacccctcttcctctcaccagcctttcctcagtatccacaggtgacaccacgcctcttcctgtcaccgacacttcctctgcatccacaggtcaggccacccctcttcctgtcaccagcctttcctcagtatccacaggtgacaccacgcctcttcctgtcaccatcccttcctcagcatcctcaggtcacaccacctctcttcctgtcaccgacgcttcctcagtgtccacaggtcacggcacccctcttcctgtcaccagcacttcctcagcatccacaggtgacaccacccctcttcctgtcaccgacacttcctcagcatccacaggtcacgccacccctcttcctgtcaccgacacttcctcagcatccacaggtcacgccacccctcttcctgtcaccagcctttcctcagtatccacaggtcacgccacccctcttgctgtcagcagtgctacctcagcttccacagtatcctcggactcccctctgaagatggaaacaccaggaatgacaacaccgtcactgaagacagacggtgggagacgcacagccacatcaccaccccccacaacctcccagaccatcatttccaccattcccagcactgccatgcacacccgctccacagctgcccccatccccatcctgcctgagagaggagtttccctcttcccctatggggcaggcgccggggacctggagttcgtcaggaggaccgtggacttcacctccccactcttcaagccggcgactggcttcccccttggctcctctctccgtgattccctctacttcacagacaatggccagatcatcttcccagagtcagactaccagattttctcctaccccaacccactcccaacaggcttcacaggccgggaccctgtggccctggtggctccgttctgggacgatgctgacttctccactggtcgggggaccacattttatcaggaatacgagacgttctatggtgaacacagcctgctagtccagcaggccgagtcttggattagaaagatgacaaacaacgggggctacaaggccaggtgggccctaaaggtcacgtgggtcaatgcccacgcctatcctgcccagtggaccctcgggagcaacacctaccaagccatcctctccacggacgggagcaggtcctatgccctgtttctctaccagagcggtgggatgcagtgggacgtggcccagcgctcaggcaacccggtgctcatgggcttctctagtggagatggctatttcgaaaacagcccactgatgtcccagccagtgtgggagaggtatcgccctgatagattcctgaattccaactcaggcctccaagggctgcagttctacaggctacaccgggaagaaaggcccaactaccgtctcgagtgcctgcagtggctgaagagccagcctcggtggcccagctggggctggaaccaggtctcctgcccttgttcctggcagcagggacgacgggacttacgattccaacccgtcagcataggtcgctggggcctcggcagtaggcagctgtgcagcttcacctcttggcgaggaggcgtgtgctgcagctacgggccctggggagagtttcgtgaaggctggcacgtgcagcgtccttggcagttggcccaggaactggagccacagagctggtgctgccgctggaatgacaagccctacctctgtgccctgtaccagcagaggcggccccacgtgggctgtgctacatacaggcccccacagcccgcctggatgttcggggacccccacatcaccaccttggatggtgtcagttacaccttcaatgggctgggggacttcctgctggtcggggcccaagacgggaactcctccttcctgcttcagggccgcaccgcccagactggctcagcccaggccaccaacttcatcgcctttgcggctcagtaccgctccagcagcctgggccccgtcacggtccaatggctccttgagcctcacgacgcaatccgtgtcctgctggataaccagactgtgacatttcagcctgaccatgaagacggcggaggccaggagacgttcaacgccaccggagtcctcctgagccgcaacggctctgaggtctcggccagcttcgacggctgggccaccgtctcggtgatcgcgctctccaacatcctccacgcctccgccagcctcccgcccgagtaccagaaccgcacggaggggctcctgggggtctggaataacaatccagaggacgacttcaggatgcccaatggctccaccattcccccagggagccctgaggagatgcttttccactttggaatgacctggcagatcaacgggacaggcctccttggcaagaggaatgaccagctgccttccaacttcacccctgttttctactcacaactgcaaaaaaacagctcctgggctgaacatttgatctccaactgtgacggagatagctcatgcatctatgacaccctggccctgcgcaacgcaagcatcggacttcacacgagggaagtcagtaaaaactacgagcaggcgaacgccaccctcaatcagtacccgccctccatcaatggtggtcgtgtgattgaagcctacaaggggcagaccacgctgattcagtacaccagcaatgctgaggatgccaacttcacgctcagagacagctgcaccgacttggagctcttt

SEQ ID NO: 155667 - DNA, 14907 bp, Homo sapiens; identical to SEQ ID NO: 155666
  Payload ID: 10597
  Gene Symbol: MUC4
  Gene Name: mucin 4, cell surface associated
  ENST ID: ENST00000615271
  CDS Start-End: 1-14907

SEQ ID NO: 155668 - DNA, 1827 bp, Homo sapiens
  Payload ID: 10597
  Gene Symbol: MUC4
  Gene Name: mucin 4, cell surface associated
  ENST ID: ENST00000613615
  CDS Start-End: 1-1827
tcctcagtatccacaggtgacaccacgcctcttcctgtcactagcccttcctcagcatccacaggtcacgccacccctcttcttgtcaccgacacttcctcagcatccacaggacacgccacccctcttcctgtcaccgacgcttcctcagtgtccacagatcacgccacctctcttcctgtaaccatcccttccgcagcatccacaggtcacaccacccctcttcctgtcaccgacacttcctcagcatccacaggtcaggccacctctcttcttgtcaccgacacttcctcagtatccacaggtgacaccacgcctcttcctgtcactagcacttcctcagcatccacaggtcacgtcactcctcttcatgtcaccagcccttcctcagcatccacaggtcacgccacccctcttcctgtcaccagcctttcctcagcatccacaggtgacaccatgcctcttcctgtcactagcccttcctcagcatccacaggtgacaccacccctcttcctgtcaccgacgcttcctcagtatccacaggtcacaccacccctcttcctgtcaccagcccttcctcagcatctacaggtcacaccacccctcttcctgtcaccgacacttcctcagcatccaaaggtgacaccacccctcttcctgtcaccagcccttcctcagcatctacaggtcacaccacccctcttcctgtcaccgacacttcctcagcatccacaggtgacaccacccctcttcctgtcaccaatgcttcctcattatccacaggtcacgccacccctcttcatgtcaccagcccttcctcagcatccacaggtcacgccacccctcttcctgtcaccagcacttcctcagcatccaccggtcacgccacccctcttcctgtcaccggcctttcctcagcatccacaggtcaggccacccctcttcctgtcaccagcctttcctcagtatccacaggtgacaccacgcctcttcctgtcactagcccttcctcagcatccacaggtcacgccagccctcttcttgtcactgacgcttcctcagcatccacaggtcaggccacccctcttcctgtcaccgacacttcctcagtatccacagctcacgccaccccacttcctgtcaccggcctttcttcagcttccacagatgacaccacccgtcttcctgtcaccgacgtttcctcggcatccacaggtcaggccatccctcttcctgtcaccagcccttcctcagcatccacaggtgacaccacccctcttcctgtcaccgacgcttcctcagcatccacaggtgacaccacctctcttcctgtcaccatcccttcctcagcatcttcaggtcacaccacctctcttcctgtcaccgacgcttcctcagtgtccacaggtcacgccacctctcttcttgtcaccgacgcttcctcagtatccacaggtgacaccacccctcttcctgtcaccgacactaactcagcatccacaggtgacaccacccctcttcatgtcaccgacgcttcctcagtatccacaggtcacgccacctctcttcctgtcaccagcctttcctcagcatccacaggtgacaccacgcctcttcctgtcactagcccttcctcagcatcctcaggtcacaccacccctcttcctgtcaccgacgcttcctcagtacccacaggtcacgccacctctcttcctgtcaccgacgcttcctcagtgtccacaggtcacgccacccctcttcctgtcaccgacgcttcctcagtgtccacaggtcatgccacccctcttccggtcaccgacacttcc

SEQ ID NO: 155669 - DNA, 3860 bp, Homo sapiens
  Payload ID: 10597
  Gene Symbol: MUC4
  Gene Name: mucin 4, cell surface associated
  ENST ID: ENST00000619175
  CDS Start-End: 1-3449
gaatgacaacaccgtcactgaagacagacggtgggagacgcacagccacatcaccaccccccacaacctcccagaccatcatttccaccattcccagcactgccatgcacacccgctccacagctgcccccatccccatcctgcctgagagaggagtttccctcttcccctatggggcaggcgccggggacctggagttcgtcaggaggaccgtggacttcacctccccactcttcaagccggcgactggcttcccccttggctcctctctccgtgattccctctacttcacagacaatggccagatcatcttcccagagtcagactaccagattttctcctaccccaacccactcccaacaggcttcacaggccgggaccctgtggccctggtggctccgttctgggacgatgctgacttctccactggtcgggggaccacattttatcaggaatacgagacgttctatggtgaacacagcctgctagtccagcaggccgagtcttggattagaaagatgacaaacaacgggggctacaaggccaggtgggccctaaaggtcacgtgggtcaatgcccacgcctatcctgcccagtggaccctcgggagcaacacctaccaagccatcctctccacggacgggagcaggtcctatgccctgtttctctaccagagcggtgggatgcagtgggacgtggcccagcgctcaggcaacccggtgctcatgggcttctctagtggagatggctatttcgaaaacagcccactgatgtcccagccagtgtgggagaggtatcgccctgatagattcctgaattccaactcaggcctccaagggctgcagttctacaggctacaccgggaagaaaggcccaactaccgtctcgagtgcctgcagtggctgaagagccagcctcggtggcccagctggggctggaaccaggtctcctgcccttgttcctggcagcagggacgacgggacttacgattccaacccgtcagcataggtcgctggggcctcggcagtaggcagctgtgcagcttcacctcttggcgaggaggcgtgtgctgcagctacgggccctggggagagtttcgtgaaggctggcacgtgcagcgtccttggcagttggcccaggaactggagccacagagctggtgctgccgctggaatgacaagccctacctctgtgccctgtaccagcagaggcggccccacgtgggctgtgctacatacaggcccccacagcccgcctggatgttcggggacccccacatcaccaccttggatggtgtcagttacaccttcaatgggctgggggacttcctgctggtcggggcccaagacgggaactcctccttcctgcttcagggccgcaccgcccagactggctcagcccaggccaccaacttcatcgcctttgcggctcagtaccgctccagcagcctgggccccgtcacggtccaatggctccttgagcctcacgacgcaatccgtgtcctgctggataaccagactgtgacatttcagcctgaccatgaagacggcggaggccaggagacgttcaacgccaccggagtcctcctgagccgcaacggctctgaggtctcggccagcttcgacggctgggccaccgtctcggtgatcgcgctctccaacatcctccacgcctccgccagcctcccgcccgagtaccagaaccgcacggaggggctcctgggggtctggaataacaatccagaggacgacttcaggatgcccaatggctccaccattcccccagggagccctgaggagatgcttttccactttggaatgacctggcagatcaacgggacaggcctccttggcaagaggaatgaccagctgccttccaacttcacccctgttttctactcacaactgcaaaaaaacagctcctgggctgaacatttgatctccaactgtgacggagatagctcatgcatctatgacaccctggccctgcgcaacgcaagcatcggacttcacacgagggaagtcagtaaaaactacgagcaggcgaacgccaccctcaatcagtacccgccctccatcaatggtggtcgtgtgattgaagcctacaaggggcagaccacgctgattcagtacaccagcaatgctgaggatgccaacttcacgctcagagacagctgcaccgacttggagctctttgagaatgggacgttgctgtggacacccaagtcgctggagccattcactctggagattctagcaagaagtgccaagattggcttggcatctgcactccagcccaggactgtggtctgccattgcaatgcagagagccagtgtttgtacaatcagaccagcagggtgggcaactcctccctggaggtggctggctgcaagtgtgacgggggcaccttcggccgctactgcgagggctccgaggatgcctgtgaggagccgtgcttcccgagtgtccactgcgttcctgggaagggctgcgaggcctgccctccaaacctgactggggatgggcggcactgtgcggctctggggagctctttcctgtgtcagaaccagtcctgccctgtgaattactgctacaatcaaggccactgctacatctcccagactctgggctgtcagcccatgtgcacctgccccccagccttcactgacagccgctgcttcctggctgggaacaacttcagtccaactgtcaacctagaacttcccttaagagtcatccagctcttgctcagtgaagaggaaaatgcctccatggcagaagtcaacgcctcggtggcatacagactggggaccctggacatgcgggcctttctccgcaacagccaagtggaacgaatcgattctgcagcaccggcctcgggaagccccatccaacactggatggtcatctcggagttccagtaccgccctcggggcccggtcattgacttcctgaacaaccagctgctggccgcggtggtggaggcgttcttataccacgttccacggaggagtgaggagcccaggaacgacgtggtcttccagcccatctccggggaagacgtgcgcgatgtgacagccctgaacgtgagcacgctgaaggcttacttcagatgcgatggctacaagggctacgacctggtctacagcccccagagcggcttcacctgcgtgtccccgtgcagtaggggctactgtgaccatggaggccagtgccaacacctgcccagtgggccccgctgcagctgtgtgtccttctccatctacacggcctggggcgagcactgtgagcacctgagcatgaaactcgacgcgttcttcggcatcttctttggggccctgggcggcctcttgctgctgggggtcgggacgttcgtggtcctgcgcttctggggttgctccggggccaggttctcctatttcctgaactcagctgaggccttgccttgaaggggcagctgtggcctaggctacctcaagactcacctcatccttaccgcacatttaaggcgccattgcttttgggagactggaaaagggaaggtgactgaaggctgtcaggattcttcaaggagaatgaatactgggaatcaagacaagactataccttatccataggcgcaggtgcacagggggaggccataaagatcaaacatgcatggatgggtcctcacgcagacacacccacagaaggacactagcctgtgcacgcgcgcgtgcacacacacacacacacacacgagttcataatgtggtgatggccctaagttaagcaaaatgcttctgcacacaaaactctctggtttacttcaaattaactctatttaaataaagtctctctgactttttgtgtcttcaaaa

SEQ ID NO: 155670 - DNA, 6420 bp, Homo sapiens
  Payload ID: 10597
  Gene Symbol: MUC4
  Gene Name: mucin 4, cell surface associated
  ENST ID: ENST00000618077
  CDS Start-End: 1-6417
ccaggaaccacagaggacacattaataactggaagtaaaactgctgccccagtcacctcaacaggctcaacaacagcgacactagagggacaatcaactgcagcttcttcaaggacctctaatcaggacatatcagcttcatctcagaaccaccagactaagagcacggagaccaccagcaaagctcaaaccgacaccctcacgcagatgatgacatcaactcttttttcttccccaagtgtacacaatgtgatggagacagctcctccagatgaaatgaccacatcatttccctccagtgtcaccaacacactcatgatgacatcaaagactataacaatgacaacctccacagactccactcttggaaacacagaagagacatcaacagcaggaactgaaagttctaccccagtgacctcagcagtctcaataacagctggacaggaaggacaatcacgaacaacttcctggaggacctctatccaagacacatcagcttcttctcagaaccactggactcggagcacgcagaccaccagggaatctcaaaccagcaccctaacacacagaaccacttcaactccttctttctctccaagtgtacacaatgtgacagggactgtttctcagaagacatctccttcaggtgaaacagctacctcatccctctgtagtgtcacaaacacatccatgatgacatcagagaagataacagtgacaacctccacaggctccactcttggaaacccaggggagacatcatcagtacctgttactggaagtcttatgccagtcacctcagcagccttagtaacatttgatccagaaggacaatcaccagcaactttctcaaggacttctactcaggacacaacagctttttctaagaaccaccagactcagagcgtggagaccaccagagtatctcaaatcaacaccctcaacaccctcacaccggttacaacatcaactgttttatcctcaccaagtggattcaacccaagtggaacagtttctcaggagacattcccttctggtgaaacaaccacctcatccccttccagtgtcagcaatacattcctggtaacatcaaaggtgttcagaatgccaacctccagagactctactcttggaaacacagaggagacatcactatctgtaagtggaaccatttctgcaatcacttccaaagtttcaaccatatggtggtcagacactctgtcaacagcactctcccccagttctctacctccaaaaatatccacagctttccacacccagcagagtgaaggtgcagagaccacaggacggcctcatgagaggagctcattctctccaggtgtgtctcaagaaatatttactctacatgaaacaacaacatggccttcctcattctccagcaaaggccacacaacttggtcacaaacagaactgccctcaacatcaacaggtgctgccactaggcttgtcacaggaaatccatctacagggacagctggcactattccaagggtcccctctaaggtctcagcaataggggaaccaggagagcccaccacatactcctcccacagcacaactctcccaaaaacaacaggggcaggcgcccagacacaatggacacaagaaacggggaccactggagaggctcttctcagcagcccaagctacagtgtgactcagatgataaaaacggccacatccccatcttcttcacctatgctggatagacacacatcccaacaaattacaacggcaccatcaacaaatcattcaacaatacattccacaagcacctctcctcaggaatcaccagctgtttcccaaaggggtcacactcaagccccgcagaccacacaagaatcacaaaccacgaggtccgtctcccccatgactgacaccaagacagtcaccaccccaggttcttccttcacagccagtgggcactcgccctcagaaattgttcctcaggacgcacccaccataagtgcagcaacaacctttgccccagctcccaccggggatggtcacacaacccaggccccgaccacagcactgcaggcagcacccagcagccatgatgccaccctggggccctcaggaggcacgtcactttccaaaacaggtgcccttactctggccaactctgtagtgtcaacaccagggggcccagaaggacaatggacatcagcctctgccagcacctcacctgacacagcagcagccatgacccatacccaccaggctgagagcacagaggcctctggacaaacacagaccagcgaaccggcctcctcagggtcacgaaccacctcagcgggcacagctaccccttcctcatccggggcgagtggcacaacaccttcaggaagcgaaggaatatccacctcaggagagacgacaaggttttcatcaaacccctccagggacagtcacacaacccagtcaacaaccgaattgctgtccgcctcagccagtcatggtgccatcccagtaagcacaggaatggcgtcttcgatcgtccccggcacctttcatcccaccctctctgaggcctccactgcagggagaccgacaggacagtcaagcccaacttctcccagtgcctctcctcaggagacagccgccatttcccggatggcccagactcagaggacaagaaccagcagagggtctgacactatcagcctggcgtcccaggcaaccgacaccttctcaacagtcccacccacacctccatcgatcacatccactgggcttacatctccacaaaccgagacccacactctgtcaccttcagggtctggtaaaaccttcaccacggccctcatcagcaacgccacccctcttcctgtcacctacgcttcctcggcatccacaggtcacgccacccctcttgctgtcagcagtgctacctcagcttccacagtatcctcggactcccctctgaagatggaaacatcaggaatgacaacaccgtcactgaagacagacggtgggagacgcacagccacatcaccaccccccacaacctcccagaccatcatttccaccattcccagcactgccatgcacacccgctccacagctgcccccatccccatcctgcctgagagaggagtttccctcttcccctatggggcagacgccggggacctggagttcgtcaggaggaccgtggacttcacctccccactcttcaagccggcgactggcttcccccttggctcctctctccgtgattccctctacttcacagacaatggccagatcatcttcccagagtcagactaccagattttctcctaccccaacccactcccaacaggcttcacaggccgggaccctgtggccctggtggctccgttctgggacgatgctgacttctccactggtcgggggaccacattttatcaggaatacgagacgttctatggtgaacacagcctgctagtccagcaggccgagtcttggattagaaagatcacaaacaacgggggctacaaggccaggtgggccctaaaggtcacgtgggtcaatgcccacgcctatcctgcccagtggaccctcgggagcaacacctaccaagccatcctctccacggacgggagcaggtcctatgccctgtttctctaccagagcggtgggatgcagtgggacgtggcccagcgctcaggcaagccggtgctcatgggcttctctagtggagatggctatttcgaaaacagcccactgatgtcccagccagtgtgggagaggtatcgccctgatagattcctgaattccaactcaggcctccaagggctgcagttctacaggctacaccgggaagaaaggcccaactaccgtctcgagtgcctgcagtggctgaagagccagcctcggtggcccagctggggctggaaccaggtctcctgcccttgttcctggcagcagggacgacgggacttacgattccaacccgtcagcataggtcgctggggcctcggcagtaggcagctgtgcagcttcacctcttggcgaggaggcgtgtgctgcagctacgggccctggggagagtttcgtgaaggctggcacgtgcagcgtccttggcagttggcccaggaactggagccacagagctggtgctgccgctggaatgacaagccctacctctgtgccctgtaccagcagaggcggccccacgtgggctgtgctacatacaggcccccacagcccgcctggatgttcggggacccccacatcaccaccttggatggtgtcagttacaccttcaatgggctgggggacttcctgctggtcggggcccaagacgggaactcctccttcctgcttcagggccgcaccgcccagactggctcagcccaggccaccaacttcatcgcctttgcggctcagtaccgctccagcagcctgggccccgtcacggtccaatggctccttgagcctcacgacgcaatccgtgtcctgctggataaccagactgtgacatttcagcctgaccatgaagacggcggaggccaggagacgttcaacgccaccggagtcctcctgagccgcaacggctctgaggtctccgccagcttcgacggctgggccaccgtctcggtgatcgcgctctccaacatcctccactcctccgccagcctcccgcccgagtaccagaaccgcacggaggggctcctgggggtctggaataacaatccagaggacgacttcaggatgcccaatggctccaccattcccccagggagccctgaggagatgcttttccactttggaatgacctggcagatcaacgggacaggcctccttggcaagaggaatgaccagctgccttccaacttcacccctgttttctactcacaactgcaaaaaaacagctcctgggctgaacatttgatctccaactgtgacggagatagctcatgcatctatgacaccctggccctgcgcaacgcaagcatcggacttcacacgagggaagtcagtaaaaactacgagcaggcgaacgccaccctcaatcagtacccgccctccatcaatggtggtcgtgtgattgaagcctacaaggggcagaccacgctgattcagtacaccagcaatgctgaggatgccaacttcacgctcagagacagctgcaccgacttggagctctttgagaatgggacgttgctgtggacacccaagtcgctggagccattcactctggagattctagcaagaagtgccaagattggcttggcatctgcactccagcccaggactgtggtctgccattgcaatgcagagagccagtgtttgtacaatcagaccagcagggtgggcaactcctccctggaggtggctggctgcaagtgtgacgggggcaccttcggccgctactgcgagggctccgaggatgcctgtgaggagccgtgcttcccgagtgtccactgcgttcctgggaagggctgcgaggcctgccctccaaacctgactggggatgggcggcactgtgcggctctggggagctctttcctgtgtcagaaccagtcctgccctgtgaattactgctacaatcaaggccactgctacatctcccagactctgggctgtcagcccatgtgcacctgccccccagccttcactgacagccgctgcttcctggctgggaacaacttcagtccaactgtcaacctagaacttcccttaagagtcatccagctcttgctcagtgaagaggaaaatgcctccatggcagaggtcaacgcctcggtggcatacagactggggaccctggacatgcgggcctttctccgcaacagccaagtggaacgaatcgattctgcagcaccggcctcgggaagccccatccaacactggatggtcatctcggagttccagtaccgccctcggggcccggtcattgacttcctgaacaaccagctgctggccgcggtggtggaggcgttcttataccacgttccacggaggagtgaggagcccaggaacgacgtggtcttccagcccatctccggggaagacgtgcgcgatgtgacagccctgaacgtgagcacgctgaaggcttacttcagatgcgatggctacaagggctacgacctggtctacagcccccagagcggcttcacctgcgtgtccccgtgcagtaggggctactgtgaccatggaggccagtgccagcacctgcccagtgggccccgctgcagctgtgtgtccttctccatctacacggcctggggcgagcactgtgagcacctgagcatgaaactcgacgcgttcttcggcatcttctttggggccctgggcggcctcttgctgctgggggtcgggacgttcgtggtcctgcgcttctggggttgctccggggccaggttctcctatttcctgaactcagctgaggccttgccttgaagg

SEQ ID NO: 155671 - DNA, 16568 bp, Homo sapiens
  Payload ID: 10597
  Gene Symbol: MUC4
  Gene Name: mucin 4, cell surface associated
  ENST ID: ENST00000617056
  CDS Start-End: 1-16157
gaaccacagaggacacattaataactggaagtaaaactgctgccccagtcacctcaacaggctcaacaacagcgacactagagggacaatcaactgcagcttcttcaaggacctctaatcaggacatatcagcttcatctcagaaccaccagactaagagcacggagaccaccagcaaagctcaaaccgacaccctcacgcagatgatgacatcaactcttttttcttccccaagtgtacacaatgtgatggagacagctcctccagatgaaatgaccacatcatttccctccagtgtcaccaacacactcatgatgacatcaaagactataacaatgacaacctccacagactccactcttggaaacacagaagagacatcaacagcaggaactgaaagttctaccccagtgacctcagcagtctcaataacagctggacaggaaggacaatcacgaacaacttcctggaggacctctatccaagacacatcagcttcttctcagaaccactggactcggagcacgcagaccaccagggaatctcaaaccagcaccctaacacacagaaccacttcaactccttctttctctccaagtgtacacaatgtgacagggactgtttctcagaagacatctccttcaggtgaaacagctacctcatccctctgtagtgtcacaaacacatccatgatgacatcagagaagataacagtgacaacctccacaggctccactcttggaaacccaggggagacatcatcagtacctgttactggaagtcttatgccagtcacctcagcagccttagtaacatttgatccagaaggacaatcaccagcaactttctcaaggacttctactcaggacacaacagctttttctaagaaccaccagactcagagcgtggagaccaccagagtatctcaaatcaacaccctcaacaccctcacaccggttacaacatcaactgttttatcctcaccaagtggattcaacccaagtggaacagtttctcaggagacattcccttctggtgaaacaaccacctcatccccttccagtgtcagcaatacattcctggtaacatcaaaggtgttcagaatgccaacctccagagactctactcttggaaacacagaggagacatcactatctgtaagtggaaccatttctgcaatcacttccaaagtttcaaccatatggtggtcagacactctgtcaacagcactctcccccagttctctacctccaaaaatatccacagctttccacacccagcagagtgaaggtgcagagaccacaggacggcctcatgagaggagctcattctctccaggtgtgtctcaagaaatatttactctacatgaaacaacaacatggccttcctcattctccagcaaaggccacacaacttggtcacaaacagaactgccctcaacatcaacaggtgctgccactaggcttgtcacaggaaatccatctacagggacagctggcactattccaagggtcccctctaaggtctcagcaataggggaaccaggagagcccaccacatactcctcccacagcacaactctcccaaaaacaacaggggcaggcgcccagacacaatggacacaagaaacggggaccactggagaggctcttctcagcagcccaagctacagtgtgactcagatgataaaaacggccacatccccatcttcttcacctatgctggatagacacacatcccaacaaattacaacggcaccatcaacaaatcattcaacaatacattccacaagcacctctcctcaggaatcaccagctgtttcccaaaggggtcacactcaagccccgcagaccacacaagaatcacaaaccacgaggtccgtctcccccatgactgacaccaagacagtcaccaccccaggttcttccttcacagccagtgggcactcgccctcagaaattgttcctcaggacgcacccaccataagtgcagcaacaacctttgccccagctcccaccggggatggtcacacaacccaggccccgaccacagcactgcaggcagcacccagcagccatgatgccaccctggggccctcaggaggcacgtcactttccaaaacaggtgcccttactctggccaactctgtagtgtcaacaccagggggcccagaaggacaatggacatcagcctctgccagcacctcacctgacacagcagcagccatgacccatacccaccaggctgagagcacagaggcctctggacaaacacagaccagcgaaccggcctcctcagggtcacgaaccacctcagcgggcacagctaccccttcctcatccggggcgagtggcacaacaccttcaggaagcgaaggaatatccacctcaggagagacgacaaggttttcatcaaacccctccagggacagtcacacaacccagtcaacaaccgaattgctgtccgcctcagccagtcatggtgccatcccagtaagcacaggaatggcgtcttcgatcgtccccggcacctttcatcccaccctctctgaggcctccactgcagggagaccgacaggacagtcaagcccaacttctcccagtgcctctcctcaggagacagccgccatttcccggatggcccagactcagaggacaagaaccagcagagggtctgacactatcagcctggcgtcccaggcaaccgacaccttctcaacagtcccacccacacctccatcgatcacatccactgggcttacatctccacaaaccgagacccacactctgtcaccttcagggtctggtaaaaccttcaccacggccctcatcagcaacgccacccctcttcctgtcacctacgcttcctcggcatccacaggtcacaccacccctcttcatgtcaccgatgcttcctcagtatccacaggtcacgccacccctcttcctgtcaccagcccttcctcagtatccacaggtcacaccacccctcttcctgtcaccgacacttcctcagaatccacaggtcacgtcacccctcttcctgtcaccagcttttcctcagcatccacaggtgacagcacccctcttcctgtcactgacacttcctcagcatccacaggtcacgtcacccctcttcctgtcaccagcctttcctcagcatccacaggtgacaccacccctcttcctgtcactgacacttcctcagcatccacaggtcacgccacctctcttcctgtcaccgacacttcctcagtatccacaggtcacaccacccctcttcctgtcaccgacacttcctcagcatccacaggtcacgccacctctcttcctgtcaccgacacttcctcagtatccacaggtcacaccacccctcttcatgtcactgatgcttcctcagcatccacaggtcaggccacccctcttcctgtcaccagcctttcctcagtatccacaggtgacaccacgcctcttcctgtcactagcccttcctcagcatccacaggtcacgccacccctcttcttgtcaccgacacttcctcagcatccacaggacacgccacccctcttcctgtcaccgacgcttcctcagtgtccacagatcacgccacctctcttcctgtaaccatcccttccgcagcatccacaggtcacaccacccctcttcctgtcaccgacacttcctcagcatccacaggtcaggccacctctcttcttgtcaccgacacttcctcagtatccacaggtgacaccacgcctcttcctgtcactagcacttcctcagcatccacaggtcacgtcactcctcttcatgtcaccagcccttcctcagcatccacaggtcacgccacccctcttcctgtcaccagcctttcctcagcatccacaggtgacaccatgcctcttcctgtcactagcccttcctcagcatccacaggtgacaccacccctcttcctgtcaccgacgcttcctcagtatccacaggtcacaccacccctcttcatgtcactgatgcttcctcagcatccacaggtcaggccacccctcttcctgtcaccagcctttcctcagtatccacaggtgacaccacgcctcttcctgtcactagcccttcctcagcatccacaggtcacgccacccctcttcttgtcaccgacacttcctcagcatccacaggacacgccacccctcttcctgtcaccgacgcttcctcagtgtccacagatcacgccacctctcttcctgtaaccatcccttccgcagcatccacaggtcacaccacccctcttcctgtcaccgacacttcctcagcatccacaggtcaggccacctctcttcttgtcaccgacacttcctcagtatccacaggtgacaccacgcctcttcctgtcactagcacttcctcagcatccacaggtcacgtcactcctcttcatgtcaccagcccttcctcagcatccacaggtcacgccacccctcttcctgtcaccagcctttcctcagcatccacaggtgacaccatgcctcttcctgtcactagcccttcctcagcatccacaggtgacaccacccctcttcctgtcaccgacgcttcctcagtatccacaggtcacaccacccctcttcctgtcaccagcccttcctcagcatctacaggtcacaccacccctcttcctgtcaccgacacttcctcagcatccaaaggtgacaccacccctcttcctgtcaccagcccttcctcagcatctacaggtcacaccacccctcttcctgtcaccgacacttcctcagcatccacaggtgacaccacccctcttcctgtcaccaatgcttcctcattatccacaggtcacgccacccctcttcatgtcaccagcccttcctcagcatccacaggtcacgccacccctcttcctgtcaccagcacttcctcagcatccaccggtcacgccacccctcttcctgtcaccggcctttcctcagctaccacagatgacaccacccgtcttcctgtcaccgacgtttcctcggcatccacaggtcaggccacccctcttcctgtcaccagcctttcctcagtatccacaggtgacaccacgcctcttcctgtcactagcccttcctcagcatccacaggtcacgccagccctcttcttgtcactgacgcttcctcagcatccacaggtcaggccacccctcttcctgtcaccgacacttcctcagtatccacagctcacgccaccccacttcctgtcaccggcctttcttcagcttccacagatgacaccacccgtcttcctgtcaccgacgtttcctcggcatccacaggtcaggccatccctcttcctgtcaccagcccttcctcagcatccacaggtgacaccacccctcttcctgtcaccgacgcttcctcagcatccacaggtgacaccacctctcttcctgtcaccatcccttcctcagcatcttcaggtcacaccacctctcttcctgtcaccgacgcttcctcagtgtccacaggtcacgccacctctcttcttgtcaccgacgcttcctcagtatccacaggtgacaccacccctcttcctgtcaccgacactaactcagcatccacaggtgacaccacccctcttcatgtcaccgacgcttcctcagtatccacaggtcacgccacctctcttcctgtcaccagcctttcctcagcatccacaggtgacaccacgcctcttcctgtcactagcccttcctcagcatcctcaggtcacaccacccctcttcctgtcaccgacgcttcctcagtacccacaggtcacgccacctctcttcctgtcaccgacgcttcctcagtgtccacaggtcacgccacccctcttcctgtcaccgacgcttcctcagtgtccacaggtcatgccacccctcttccggtcaccgacacttcctcagtatctacaggacaggccacccctcttcctgtcaccagcctttcctcagcatccactggtgacaccacgccgcttcctgtcaccgatacttcctcagcatccacaggtcaggacacccctcttcctgtcaccagcctttcctcagtatccacaggtgacaccacgcctcttcctgtcactaacccttcctcagcatccacaggtcacgccacccctcttcttgtcaccgacgcttcctcaatatccacaggtcacgccacctctcttcttgtcaccgacgcttcctcagtatccacaggtcacgccaccgctcttcatgacaccgatgcttcctcattatccacaggggacaccacccctcttcctgtcaccagcccttcctcaacatccacaggtgacaccacccctcttcctgtcaccgaaacttcctcagtatccacaggtcacgccacctctcttcctgtcaccgacacttcctcagcatccacaggtcacgccacctctcttcctgtcaccgacacttcctcagcatccacaggtcacgccacccctcttcctgtcaccgacacttcctcagcatccacaggtcaggccacccctcttcctgtcaccagcccttcctcagcatccacaggtcacgccatccctcttcttgtcaccgacacttcctcagcatccacaggacaggccacccctcttcctgtcaccagcctttcctcagcatccacaggtgacaccacccctcttcctgtcaccgacgcttcctcagtgtccacaggtcacgccacctctcttcctgtcaccagcctttcctcagtatccacaggtgacaccactcctcttcctgtcactagcccttcctcagcatccacaggtcacgccacccctcttcatgtcaccgacgcttcctcagcatccacaggtcacgccacccctcttcctgtcaccagcctttcctcagcatccacaggtgacaccacgcctcttcctgtcactagcccttcctcagcatccacaggtcacgccacccctcttcatgtcaccgacgcttcctcagtatccacaggtgacaccacccctcttcctgtcaccagctcttcctcagcatcctcaggtcacaccacccctcttcctgtcaccgacgcttcctcagcatccacaggtgacaccacccctcttcctgtcaccgacacttcctcagcatccacaggtcacgccacccatcttcctgtcaccggcctttcctcagcttccacaggtgacaccacccgtcttcctgtcaccaacgtttcctcggcatccacaggtcatgccacccctcttcctgtcaccagcacttcctcagcatccacaggtgacaccacccctcttcctggcaccgacacttcctcagtatccacaggtcacaccacccctcttcttgtcaccgacgcttcgtcagtatccacaggtgacaccacccgtcttcctgtcaccagcccttcctcagcatctacaggtcacaccacccctctacctgtcaccgacactccctcagcatccacaggtgacaccacccctcttcctgtcaccaatgcttcctcattatccacacgtcacgccacctctcttcatgtcaccagcccttcctcagcatccacaggtcacgccacctctcttcctgtcaccgacacttccgcagcatccacaggtcacgccacccctcttcctgtcaccagcacttcctcagcatccacaggtgacaccacccctcttcctgtcaccgacacttactcagcatccacaggtcaggccacccctcttcctgtcaccagcctttcctcagtatccacaggtgacaccacgcctcttcctgtcactagcccttcctcagcatccacaggtcacgccactcctcttcttgtcaccgacgcttcctcagcatccacaggtcaggccacccctcttcctgtcaccagcctttcctcagtatccacaggtgacaccacgcctcttcctgtcactagcccttcctcagcatccaccggtcatgccacctctcttcctgtcaccgacacttcctcagcatccacaggtgacaccacctctcttcctgtcaccgacacttcctcagcatacacaggtgacaccacctctcttcctgtcaccgacacttcctcatcatccacaggtgacaccacccctcttcttgtcaccgagacttcctcagtatccacaggtgacaccacccctcttcctgtcaccgacacttcctcagcatccacaggtcacgccacccctcttcctgtcaccaacacttcctcagtatccacaggtcacgccacccctcttcatgtcaccagcccttcctcagcatccacaggtcacaccacccctcttcctgtcaccgacgcttcgtcagtgtccacaggtcacgccacctctcttcctgtcaccgacgcttcctcagtgttcacaggtcatgccacctctcttcctgtcaccatcccttcctcagcatcctcaggtcacaccacccctcttcctgtcaccgacgcttcctcagtgtccacaggtcacgccacctctcttcctgtcaccgacgcttcctcagtgtccacaggtcatgccacccctcttcctgtcaccgacgcttcctcagtgtccacaggtcacgctacccctcttcctctcaccagcctttcctcagtatccacaggtgacaccacgcctcttcctgtcaccgacacttcctcagcatccacaggtcaggccacccctcttcctgtcaccagcctttcctcagtatccacaggtgacaccacccctcttcctgtcaccgacacttcctcagcatccacaggtcacgccacctctcttcctgtcaccgacacttcctcagcatccacaggtcacgccacccctcttcctgacaccgacacttcctcagcatccacaggtcacgccacccttcttcctgtcaccgacacttcctcagcatccataggtcacgccacctctcttcctgtcaccgacacttcctcaatatccacaggtcacgccacccctcttcatgtcaccagcccttcctcagcatccaccggtcacgccaccccgcttcctgtcaccgacacttcctcagcatccacaggtcacgccaaccctcttcatgtcaccagcccttcctcagcatccaccggtcacgccaccccgcttcctgtcaccgacacttcctcagcatccacaggtcacgccacccctcttcctgtcaccagcctttcctcagtatccacaggtgacaccacgcctcttcctgtcactagcccttcctcagcatccacaggtcacaccacccctcttcctgtcaccgacacttcctcagcatccacaggtcaggccaccgctcttcctgtcaccagcacttcctcagcatccacaggtgacaccacccctcttcctgtcaccgacacttcctcagcatccacaggtcaggccacccctcttcctgtcaccagcctttcctcagtatccacaggtgacaccacgcctcttcctgtcactagcccttcctcagcatccacaggtcacgccactcctcttcttgtcaccgacgcttcctcagcatccacaggtcaggccacccctcttcctgtcaccagcctttcctcagtatccacaggtgacaccacgcctcttcctgtcactagcccttcctcagcatccaccggtcatgccacctctcttcctgtcaccgacacttcctcagcatccacaggtgacaccacctctcttcctgtcaccgacacttcctcagcatacacaggtgacaccacctctcttcctgtcaccgacacttcctcatcatccacaggtgacaccacccctcttcttgtcaccgagacttcctcagtatccacaggtcacgccactcctcttcttgtcaccgacgcttcctcagcatccacaggtcacgccacccctcttcatgtcaccagcccttcctcagcatccacaggtgacaccacccctgtgcctgtcaccgacacttcctcagtatccacaggtcacgccacccctcttcctgtcaccggcctttcctcagcttccacaggtgacaccacccgtcttcctgtcaccgacatttcctcggcatccacaggtcaggccacccctcttcctgtcaccaacacttcctcagtatccacaggtgacaccatgcctcttcctgtcactagcccttcctcagcatccacaggtcacgccacccctcttcctgtcaccagcacttcctcagcatccaccggtcacgccacccctgttcctgtcaccagcacttcctcagcatctacaggtcacaccacccctcttcctgtcaccgacacttcctcagcatccacaggtgacaccacccctcttcctgtcaccagcccttcctcagcatctacaggtcacaccacccctcttcatgtcaccatcccttcctcagcatccacaggtgacaccagcactcttcctgtcaccggcgcttcctcagcatccaccggtcacgccacccctcttcctgtcaccgacacttcctcagtatccaccggtcacgccacgcctcttcctgtcaccagcctttcctcagtatccacaggtgacaccacccctcttcctgtcaccgacgcttcctcggcatccacaggtcaggccacccctcttcctgtcaccagcctttcctcagtatccacaggtgacaccacccctcttcttgtcaccgacgcttcctcagtatccacaggtcacgccacccctcttcctgtcaccgacacttcctcagcatccacaggtgacaccacccgtcttcctgtcacggacacttcctcagcatccacaggtcaggccacccctcttcctgtcaccagcctttcctcagtatccacaggtgacaccacccctcttcttgtcaccgacgcttcctcagtatccacaggtcacgccacccctcttcctgtcaccgacacttcctcagcatccacaggtgacaccacccgtcttcctgtcacggacacttcctcagcatccacaggtcaggccacccctcttcctgtcaccatcccttcctcatcatcctcaggtcacaccacccctcttcctgtcaccagcacttcctcagtatctacaggtcacgtcacccctcttcatgtcaccagcccttcctcagcatccacaggtcacgtcacccctcttcctgtcaccagcacttcctcagcatccacaggtcacgccacccctcttcttgtcaccgacgcttcctcagtgtccacaggtcacgccacgcctcttcctgtcaccgacgcttcctcagcatccacaggtgacaccacccctcttcctgtcaccgacacttcctcagcatccacaggtcaggccacccctcttcctgtcaccagcctttcctcagtatccacaggtgacaccacccctcttcctgtcaccgacgcttcctcagcatccacaggtcacgccacccctcttcctgtcaccatcccttcctcagtatccacaggtgacaccatgcctcttcctgtcactagcccttcctcagcatccacaggtcacgccacccctcttcctgttaccggcctttcctcagcttccacaggtgacaccacccctcttcctgtcaccgacacttcctcagcatccacacgtcacgccacccctcttcctgtcaccgacacttcctcagcttccacagatgacaccacccgtcttcctgtcaccgacgtttcctcggcatccacaggacatgccacccctcttcctgtcaccagcacttcctcagcatccacaggtgacaccacccctcttcctgtcaccgacacttcctcagtatccacaggtcacgccacctctcttcctgtcaccagccgttcctcagcatccacaggtcacgccaccccccttcctgtcaccgacacttcctcagtatccacaggtcacgccacccctcttcctgtcaccagcacttcctcagtatctacaggtcacgccacccctcttcctgtcaccagcccttcctcagcatccacaggtcacgccacccctgttcctgtcaccagcacttcctcagcatccacaggtgacaccacccctcttcctgtcaccaatgcttcctcattatccacaggtcacgccacccctcttcatgtcaccagcccttcctcagcatccagaggtgacaccagcactcttcctgtcaccgatgcttcctcagcatccaccggtcacgccacccctcttcctctcaccagcctttcctcagtatccacaggtgacaccacgcctcttcctgtcaccgacacttcctctgcatccacaggtcaggccacccctcttcctgtcaccagcctttcctcagtatccacaggtgacaccacgcctcttcctgtcaccatcccttcctcagcatcctcaggtcacaccacctctcttcctgtcaccgacgcttcctcagtgtccacaggtcacggcacccctcttcctgtcaccagcacttcctcagcatccacaggtgacaccacccctcttcctgtcaccgacacttcctcagcatccacaggtcacgccacccctcttcctgtcaccgacacttcctcagcatccacaggtcacgccacccctcttcctgtcaccagcctttcctcagtatccacaggtcacgccacccctcttgctgtcagcagtgctacctcagcttccacagtatcctcggactcccctctgaagatggaaacaccaggaatgacaacaccgtcactgaagacagacggtgggagacgcacagccacatcaccaccccccacaacctcccagaccatcatttccaccattcccagcactgccatgcacacccgctccacagctgcccccatccccatcctgcctgagagaggagtttccctcttcccctatggggcaggcgccggggacctggagttcgtcaggaggaccgtggacttcacctccccactcttcaagccggcgactggcttcccccttggctcctctctccgtgattccctctacttcacagacaatggccagatcatcttcccagagtcagactaccagattttctcctaccccaacccactcccaacaggcttcacaggccgggaccctgtggccctggtggctccgttctgggacgatgctgacttctccactggtcgggggaccacattttatcaggaatacgagacgttctatggtgaacacagcctgctagtccagcaggccgagtcttggattagaaagatgacaaacaacgggggctacaaggccaggtgggccctaaaggtcacgtgggtcaatgcccacgcctatcctgcccagtggaccctcgggagcaacacctaccaagccatcctctccacggacgggagcaggtcctatgccctgtttctctaccagagcggtgggatgcagtgggacgtggcccagcgctcaggcaacccggtgctcatgggcttctctagtggagatggctatttcgaaaacagcccactgatgtcccagccagtgtgggagaggtatcgccctgatagattcctgaattccaactcaggcctccaagggctgcagttctacaggctacaccgggaagaaaggcccaactaccgtctcgagtgcctgcagtggctgaagagccagcctcggtggcccagctggggctggaaccaggtctcctgcccttgttcctggcagcagggacgacgggacttacgattccaacccgtcagcataggtcgctggggcctcggcagtaggcagctgtgcagcttcacctcttggcgaggaggcgtgtgctgcagctacgggccctggggagagtttcgtgaaggctggcacgtgcagcgtccttggcagttggcccaggaactggagccacagagctggtgctgccgctggaatgacaagccctacctctgtgccctgtaccagcagaggcggccccacgtgggctgtgctacatacaggcccccacagcccgcctggatgttcggggacccccacatcaccaccttggatggtgtcagttacaccttcaatgggctgggggacttcctgctggtcggggcccaagacgggaactcctccttcctgcttcagggccgcaccgcccagactggctcagcccaggccaccaacttcatcgcctttgcggctcagtaccgctccagcagcctgggccccgtcacggtccaatggctccttgagcctcacgacgcaatccgtgtcctgctggataaccagactgtgacatttcagcctgaccatgaagacggcggaggccaggagacgttcaacgccaccggagtcctcctgagccgcaacggctctgaggtctcggccagcttcgacggctgggccaccgtctcggtgatcgcgctctccaacatcctccacgcctccgccagcctcccgcccgagtaccagaaccgcacggaggggctcctgggggtctggaataacaatccagaggacgacttcaggatgcccaatggctccaccattcccccagggagccctgaggagatgcttttccactttggaatgacctggcagatcaacgggacaggcctccttggcaagaggaatgaccagctgccttccaacttcacccctgttttctactcacaactgcaaaaaaacagctcctgggctgaacatttgatctccaactgtgacggagatagctcatgcatctatgacaccctggccctgcgcaacgcaagcatcggacttcacacgagggaagtcagtaaaaactacgagcaggcgaacgccaccctcaatcagtacccgccctccatcaatggtggtcgtgtgattgaagcctacaaggggcagaccacgctgattcagtacaccagcaatgctgaggatgccaacttcacgctcagagacagctgcaccgacttggagctctttgagaatgggacgttgctgtggacacccaagtcgctggagccattcactctggagattctagcaagaagtgccaagattggcttggcatctgcactccagcccaggactgtggtctgccattgcaatgcagagagccagtgtttgtacaatcagaccagcagggtgggcaactcctccctggaggtggctggctgcaagtgtgacgggggcaccttcggccgctactgcgagggctccgaggatgcctgtgaggagccgtgcttcccgagtgtccactgcgttcctgggaagggctgcgaggcctgccctccaaacctgactggggatgggcggcactgtgcggctctggggagctctttcctgtgtcagaaccagtcctgccctgtgaattactgctacaatcaaggccactgctacatctcccagactctgggctgtcagcccatgtgcacctgccccccagccttcactgacagccgctgcttcctggctgggaacaacttcagtccaactgtcaacctagaacttcccttaagagtcatccagctcttgctcagtgaagaggaaaatgcctccatggcagaagtcaacgcctcggtggcatacagactggggaccctggacatgcgggcctttctccgcaacagccaagtggaacgaatcgattctgcagcaccggcctcgggaagccccatccaacactggatggtcatctcggagttccagtaccgccctcggggcccggtcattgacttcctgaacaaccagctgctggccgcggtggtggaggcgttcttataccacgttccacggaggagtgaggagcccaggaacgacgtggtcttccagcccatctccggggaagacgtgcgcgatgtgacagccctgaacgtgagcacgctgaaggcttacttcagatgcgatggctacaagggctacgacctggtctacagcccccagagcggcttcacctgcgtgtccccgtgcagtaggggctactgtgaccatggaggccagtgccaacacctgcccagtgggccccgctgcagctgtgtgtccttctccatctacacggcctggggcgagcactgtgagcacctgagcatgaaactcgacgcgttcttcggcatcttctttggggccctgggcggcctcttgctgctgggggtcgggacgttcgtggtcctgcgcttctggggttgctccggggccaggttctcctatttcctgaactcagctgaggccttgccttgaaggggcagctgtggcctaggctacctcaagactcacctcatccttaccgcacatttaaggcgccattgcttttgggagactggaaaagggaaggtgactgaaggctgtcaggattcttcaaggagaatgaatactgggaatcaagacaagactataccttatccataggcgcaggtgcacagggggaggccataaagatcaaacatgcatggatgggtcctcacgcagacacacccacagaaggacactagcctgtgcacgcgcgcgtgcacacacacacacacacacacgagttcataatgtggtgatggccctaagttaagcaaaatgcttctgcacacaaaactctctggtttacttcaaattaactctatttaaataaagtctctctgactttttgtgtcttcaaaa
